United States Patent Application Publication US 2020/0109395 A1 - sequence listing, part 20

SEQ ID NO: 79949 - DNA, 1809 bp, Comamonas thiooxydans
atgtcaagaatggcttcacatcgctctagttccaagtacctgcaggcagcgcgccagcttaggggcaatcccggtcaatgggaagcttacgagtccacaggtagctgctgtgtcctggcgggaccaggaagcggtaagaccaagacgcttgtcacaaagctagcccgagtcatggcagaagacgtacgcgcgccacgcggggtagcctgcatcacgttcagtaacgaagctgctcgcgagctatctcgccgcctgcgacagcttggactggagcagtcgccgcggctcttcgtgggaaccgttcactcgttttgcctactgcacctgctgctgcccttcggagagctcgccgacctgccgctaccatttccgctcaaggtcgccacggagtctcaagcagcgagcatttacagggcggcggcggaggagcttcgaggagttggccagccgactcgcaaagacgaggtcgaccggtatcgccgagtaaacctggaccgcgacagcaatgcctggacacaggaccctgaattggcggcgctggccgaagcctatgaagaggcgttgcacgaacagggactcatcgacttcgatgacattgtccattacggtcagcgactggttaacgagcatgactgggtactaaatgcaatacgcgcgaagtttccggtcctggctgtcgacgagtaccaagatttgggcggggcgttagaccgcatcgttaggcgacttacctttgagggaggcgtgaggctgattgcagtgggtgatgtcgaccaatcggtgtacgggttcaccggagcaaatagcgaattacttgcagaactatctcaactggacggcatccaggctatccctctcacggtgaattaccgaagcgggaccggcatcattgaggtcgctcagctcgctctcggcaaggacagagggtacacatcgtcagaaccagacaggcaggcctcggtccagacacacaaatgtgacgagggcctgcagcaccaggccgagtacgcaatgcagacgttgattcctgccgcgcttgcagcaaaggcggggcgtcagctcggtgatattgccgtcctgtaccgaaaccggaatgttggagacgtggccgccatccaggcactcaacgccaggtatccattcgtgcgcatcgacaatgccgcaccatatcgcaaggtccctctcacgagttgggttgaggattgcgccatctggtgtgccggaggctggaaaacctctgcgccaccattgcgcgacctacaaagccggtggcggtcattccatggtgctctagccgacagagctgcgcgcgatgcatcggcgaggcttacagcatttctttggtcgcaccgtggcaacggcttggcactaggtttcgttgaggcccttagagaggaactgctcgacacgctgattgctgcgcgcggagaactggcagaccaagctgcacatgtcgaaaagatgcacaaagcccttcacccaaaggcaccgcttgccgggatgacgaaagcacagctcggtcgacgagacggagcacctaagcagctaaatctattgacgcttcactccgctaaaggcactgagtacgatgttgtcatcatcctgggactagaccaaggcgattttccttccccaaattggtttgacaacactccggagaaaatggaagaggcgcgaagattgttctacgtcggtgtaacgcgtgcccgcgatgaagctcaccttatgtacagtggctttaggcaaaaccagtacggcaaaatttatcgcgatggaccttccgaattcttgaatggtctgctgccctag

SEQ ID NO: 79950 - DNA, 2235 bp, Clostridium sp. C105KSO15
atggaaattgcttttgttgaagtgcagaatttcaggaaattacagtcatgcagaattgattttgggaagaagtcgactgtgtttgtaggggcaaataacagtggaaaaacctcagccatgactgcgctgaggaagttcctaaaaaagagacaattgatgttagatgattttacaattagcaatttagcaagcgttaaaaaaataggaaaaaaaatattggatttaaacaatgaatctaatattacactagaagattggaatcctctcttaccctctttagatgtttggctgaatgtagaagcaaatgaattgcgatatgtagcacaaattattcctaccttggactggagagaaggtcttattggtatacgattgatttatgagccaaaagatattgaaaaattatttgcatctttttctattgcatataaagcctctcatgaaggaaaatcagacttgaaattgtggccattagatatgtgtgattttcttagagaaaaaatcagttcttattttacagtaaatgcttatgttttagacccaagtaaaattgttatgccatctgaaaataacattgcaaatcctcaacttacaccaacgggaattagtccgctagattttgatccatttaaggaacttatcagaattgatattatctctgcacaaagaggtttagatgattctgatgatgaaagtgatgataagacggcaggaaatagtactctactttctgatcaactaaggtcttattatgacaaacagcttgatcctgaacaccagccgacacagtctgatattaaggcattaaaggagttacaaggggcaaaagaggtttttgataaacagatatcaaaaaagttttcaaggtccatgaaagagttagcgcaatttggatatccgggaaggtataatccaagaattattattgaatctaaaacaagaaccagtgatgtcctatctcatagtacatcagtgcggtacccactttattctgatggagaagatcaatataaacttcctgaaaaatacaatggtcttggatatcaaaatcttatttctatgtctttcaaattaatgagttttagagattcatggatgaatggggataaacgtaagcctcaagatgatgcagatgagattggtgttataccccctattcacttaattttgattgaagagccagaggcacatcttcatgcacaagttcaacaggtatttataaaaaatgcttatcaaatactaagaaatcattcaaaccttaaaacaaaaagccaatacacaacccagatggtggtaacaacacattctagctatatagcgttagaaacagatttctcggatttaagatattttcggcgcatcaaaagtaaagatggactcccagtatcagcggtatctaatcttaaaaccgtgtttggtaagggagaccaaacagctaaatttgtcacacgttatttgaaaactacacattgtgatttgttttttgcagatgctgtaattatggttgaaggtgcggccgagagaatgtttctgccacattttattgaaaatagttataatgcgctagatcaagcatatatctcaatacttgaaattaacggaaggcatgcacatcgattgaaggggttaattgagcagctgggaattacttgtctaataattacagatatcgataccgttgatgctaaaaagaaagcttcagtaatgcctcgaaggggagaaggacaagtttctacgaatacgactataaccgattggcttcccaatattactttagcagatgatctatggtcagctggttttggacaaaaagaaattttatacacaaacaataaagatgccgcaattagagtagcatatcagacccctgtagttgtaaaattttctaacaattcaacgcatgagtttataccaacaacctttgaagattcgcttgcatatgaaaattttaatgtgtttaaaaggctccaaggaaatgggagtataaagaagctaaagaacatatttaaaactgaggatgccacgctcatacctatgaaagtatatgaactcatttatggaagcaacaaaaaaaagcccacaatgaagaaagcagaatttgcattggatttactttataataaagatccaaagtctataactcctccacactatatagctgaagctttagagtggttgcaaaaaattctcatagaaaaggatgatggagattttctggaaagtgaggaggtgtaa

SEQ ID NO: 79951 - DNA, 1863 bp, Clostridium sp. C105KSO15
gtgacagttgattataaaatccaagatgataatcgagataattctgcggatgaaatcattagagattgtttaaatcaaacagatctaagaagcttttttctttttgctggtgcgggtagtggtaaaacgaaaagtttaatagatgcattgaattatcttaaagacaaatacggaaatcaatttctaactcaaaagagaaatgttgcggtaatcacttataccaatgcagcctgcgatgagattaaaaggagagctaattataactcgctgtttgtaatatcaacgatccacagttttgcttgggagttaattcaaccatatacaatagatataaaagaatggattaaagaggatacgattatacgtatggccgatttggaaagaaagcaactgacgggtaagaaacaaagtcaagcatatcgagatcgagatagaaaaattgaaagctataaaaaacgacttgacagcctttcattaattaaaaaatttatttatagccctgatggtgctaataatgaaaaaaattcattagatcattcagaagtaataaagatatgtgcaaattttttaacatccaaacaaacattgcaaaatatacttattgaccgatatcctgttttattgattgatgaaagtcaggatacaaaaaaagaacttattgaagcctttatagaattagcaagtaaccataaaggtagtttctgtttgggcctattaggagatacaatgcaacgcatttaccttgatggaaaagaaaagttgcaagatattatacctaatgattgggaaaagccgtgtaaggaaatgaatcatagaagtcgaaagcgaatagttgatctttgtaatgaaatccggaaacatgcggatggaattcagcaaaaaccacgacatgacaagaccggtgggactgtaaggatttttgtcgttgaccgaaaacaggataactataaagtcgaaaatcaaattcgcaggaaaatgatagatatggctaaagattcaaattgggatgatatagaacaagtgaagtgtttgacagttgaacatcaaatggcagcgaaacgacttggatttgaacatttttttgaacctctttactctgtttacaaacaaggtgttacagatggatctttatcagcaattagtcctcttttacgcattttgttacctctatatcaggctaatgtagatgaaaacaaatttgaaattgcgaggatagtacgcaaaaatgcaacggcatataaaaattgtataaaggagagagacttatctaaagaagattttgaacgtattaacaattcaattaatgagttgttgaaattatggaaaaataatgatccaaagtgtattgaattaattgataatatagaaaaaaacgatttatttgaattgccgaatgatttaaaaattttgcttaaaagagaatcctcaaatggtgaaaacaatactaaagattcagatattaaaaaattagatgccttggcaacatctttaaatgcaccgttttcagaagttgtaaagtatcaacagtatatttcaggaatagccagttttgatactcatcaaggtgttaaagggctacagtttgaacgtgtgatggtaattattgatgacgaagcatcacaaggttcaacttttaattatggcaagttgtttggaataattcctaaatctaaaactgatattgaaaatgaagatcaaggaaaggaaacaactatggatagaactcgaagattgctttatgtgacatgcagtcgagcaatagatagcttagctattgtttactattcagactcggttgaggaagatattaataaaatttcttcttgcggatggtttattgaagatgagataattaaattgtaa

SEQ ID NO: 79952 - DNA, 1791 bp, Rhodobacteraceae bacterium HL-91
gtgcatctttcacgcatccagataaagaacttcagaaacttcgccgattttgacgtcagcgttggcgggaatctcgtggtcgtaggggaaaaccgcgtcggcaagagcaaccttctgcacgctctgcgcctcgttttcgatccggcgatgcctgacagcgcgcggcagcttgggttgtcggacttctgggacggcttggacgagctgacaaaagacgacagcatcttggtcagtgtggaaattaagggatttgaggatgacgaggacatcctcgcgatactgacggatttcaggcttgacgatgatcctgaaaccgttcgcctgacctacgagcttcgccctcttgctgacctggaagatgatcccacctcggcggaagactacgagttcatctgctatggaggtgagagcgaggccaagcagttcgggcataagcttcggcggcggatcacgatggatgttctgccagccttgcgcgatgccgaagccgacttgtcggtttggcagcgctccccacttcgcccgctgatcgaagaagcctttaagagcgtggataccgattcactgaaagaaatcagcgaggcaatcgaagaagccacggcaaagattactcagttcgacgaagtatcgacgcttgaaaagaatatcgctgacttgttccaagagatgagcggtcagaaacaggacattcatcccacgctcgggttcagccccactgatcctgcgcgcctgtaccgatccgtccgcctgctaattgatgagggcgcgcgtggcattagcgatgccagcctcgggtcggccaatcttgtattcctgacgctgaaatcactcgaattgcggcgactgatcgaagaaaaccaccgcgatcacactttcttggccattgaagagccagaagcgcacctgcacccgcatcttcaacgatcagtgtatcgccacgtgtttaccgaggcacaggaagctggcgcgccgctcaccatgttggtaacgacccactccccgcatatcgcaagcgttgcaccgttgcgttctgtcgtgttgctgaaggacgaaggggatgcgggaacaaagggctatgcggcagaggcgatcaaccttgaagatgatgaagttgacgacatcgctcggtacttggacgtaacgcgcgccgaaatcttgttcgcgcgaggcgtgctgctagtcgagggggacgcggagcggtttcttgtgcctgcctttgctgaagggcttggttacgtgctggatgaaatgggcatcacggtatgttcggtcgctggtacgaattttcggccgtacgccaagttcctagtcggccttggtatccccttcgccgtgattaccgattgggatcctattcaaggtaaaaagcctcttggccgcaaccgctccttgcggcttgttaaagacatcgagacacagcgcacggggacagaaccgacagcgctgatcgaagagcttgatgctatcgcggatcacgacgactttgcagagcgctgcgaggcctacggcatctacacgaatagcaggacgcttgaagtagacctgtttgatgatggttttgcggcggccattatcgcggttctcagggagtatccgtttagcgcggcgcgcaaggagcatatcgacaactgggaggccgatcccgaagaactcgatcccgccttgctgctgaagatgatcgacacgattggcaaaggccgctttgcgcaacggatgctgtcatacatcgacggcatagaagcgcccgactacattaaggatgcgatcaagtacgtggccgaacgtgtctga

SEQ ID NO: 79953 - DNA, 1809 bp, Rhodobacteraceae bacterium HL-91
atgcgatcaagtacgtggccgaacgtgtctgatcgccgcctctatctcaaagctgctgaagagttgcgcccgaactccggccagtgggctgcctacgagtctgaaggccactgtgttgtcatcgcaggaccaggcagtggcaagacgaagacacttacgactaagctggcgcgcatcttatccgaggatgtgcaagaaccacgcggcgtagcctgcatcacgtacaacaatgagtgcgcgcgcgaacttgaacagcggcttgatgcgctcggcatcgagccaggcgggcgcgtgtttatcggcacggttcactcgttttctttgacgcaaattatcctgccctacgccaaggttgcaggcatggggctacctggtgatttccaggtcgccacactccaagaacagcgcggcgcactggagcgtgcgtatgatcgtgtcatagcgcgcggggaagacccgcatagattttggcgtcttcggatggatcgttaccgccgctcgcacttgaagcgcgatacggcagccttccgggaacaggacgcaaagtgtgctgagttggttgtcgcttacgaagaagagctgcgccgcgcaggcctgatcgattttgacgacatgcccctgctgtccgtgcgcgcgttgcgggaacatcaatggcttcaggacgcgatcaaggccaagtaccccgtcttgattgtcgacgagtatcaagaccttgggagcgccctgcaccagatggtgatgggcttgtgctttagtacgggcatacgcttgttcgcggtcggcgatgtcgatcagtccatatacggttttaccggagcaaaccctgtccttcttgaacgcctttcgcagagggaagacgtcgagaccgtcaggctgcgcctgaactatcgctgcgggtcaaagatcgtcactgcctcgcagtacgctcttggtgaagagagagactacgaagccccagagggcgctgaagaaggaacagttttctttcatccggtgaacggaaactatgacgggcaagccggatacgttttcgacactcttattcccgatgcgatggctcgtctgcccgaccttcggcttggcgaagttgcaattctctatccggctgcctggattggcgatgccgttgcgaatgcagcccaggcgcgcggctatgcaaccattcgtgccgatggcaacgcgatctacccccgatctagtcgcctgatgcgatggcttgagcaatgcgggacgtggtgctgtgaaggatggaagtcgggaaaccctagattttcacgcctgatcgatgaaggctgccgcgtattcgctgaatcgcttacttcggaagagtcacgcctcgactttcaacgggcgctgatgcgcttgctttgggaacaccgagaaaacgcgatgtcgctacatgattggctattgagcgtccggcacgagatactgcgtgagttgttcgcggggtcacggaccttggcagatgaaagcgacacgctcgacgcattcattcttaaaacagctcccggtggtgcgaatgaagaaatgaccttgggtcaattctgcggccacggcgaagggaataatcggatcaacctcacaaccttgcacagctccaaagggcgcgagttcaggcttgtcgttatgttcggcatggacgatggcagaattcctcgcccgaacccgaacgaaagagaaaccagagaggcgcgccgcctcttctatgtcggcttcacccgtgctgaagaggaaatccatatgcttcacagcgcgaacaacccatcgcccttcgtaattgaactcgcagaaagactagaggaataa

SEQ ID NO: 79954 - DNA, 2397 bp, Enterobacter cloacae; identical to SEQ ID NO: 75872

SEQ ID NO: 79955 - DNA, 1869 bp, Enterobacter cloacae; identical to SEQ ID NO: 75453

SEQ ID NO: 79956 - DNA, 1980 bp, Enterobacter aerogenes; identical to SEQ ID NO: 75470

SEQ ID NO: 79957 - DNA, 1848 bp, Enterobacter aerogenes; identical to SEQ ID NO: 75471

SEQ ID NO: 79958 - DNA, 1785 bp, Enterobacter cloacae; identical to SEQ ID NO: 75898

SEQ ID NO: 79959 - DNA, 1818 bp, Enterobacter cloacae; identical to SEQ ID NO: 75899

SEQ ID NO: 79960 - DNA, 1701 bp, Enterobacter cloacae; identical to SEQ ID NO: 75204

SEQ ID NO: 79961 - DNA, 1626 bp, Enterobacter cloacae; identical to SEQ ID NO: 75205

SEQ ID NO: 79962 - DNA, 2304 bp, Pseudomonas syringae pv. tomato
atggaagagcttatgcacatccagcatctggagattgcgaacttccgcaagctcctgtctgttcgaatcgacttagcagccgagacaaccctattagtcggagctaataacagcggcaaatcttctgccatgctggctctgcgaagatttctggtatccaaagcctccgcgtttcgccttcaggatctgacactttctcatttggtaaccatagaggcgattgggcaggcctgggaggctgcaggcgccatcccatcggccaatgactgggcagaatggttgccgacgctggatatctggatatcggcggagcaaggcgagctgcatcacatccgagatctaatacctaactttgcttggcgcggtggtttggtcgggatgcggttccggctcgagccggaggacatggaagacctctatgtggactaccgcaagcagagagaacgggtagagatactgaagaccgagattcagagactggctgccgaaggcgaggatccaccacatttacctctttggcctcaaagcctgcacgactacctcaatcgacgtctgggaaagatgttcaaggtgcgctggtatcgcctggatcccgcccagcttcaagacccagatccgagaactcgctctgccaatcggcaatcactctcggcaacttcagtggcattggagcgcaatccactaatcaatctcatccgtgtacatgagatcaatgctcagcgtgggttcggtgacagtgctgacgagggacatgacgatggcaagcaatctggtggtagaaagctttcggaacagcttcgtgcctactacaaccgtcaccttgatccaggagatagcccagatatttcggatttaggtgcgctcagagctatcgaagcagcacaagtggctttcgatacccgattaagcaccagcttcgaaccggcgctgaaggaagtcgctgggttgggatatcccaacaacagcgatccgagtattcgggtcgcgaccagactcgcgcccaccgacgggatgaatcacgaagcagccgtcctgtttgagctcgactccataggtggcgcacctggcgctcctccccttcggctgccagagacgtccaacggtctgggatatcaaaatctcatttcgatgattttccggctcatggcgtttcgagatgagtggctgaaaaaattcagaactgctgacgagcagagcgccgctggagttgagcccattcacctgatgctaattgaggagccggaagctcaccttcatgtacaagttcaacaggtgttcgtgaagcatgcctaccatgtgctctgcagagaccctttgcttgagcgtttcccaaacttgaaaagccaactgatggtgagcacgcactccagccatgtcgctcatgaagttgagtatcagaacctgcggtacttccggcgtctacctgctggcatggacggcgtacaggtgccggtttcaacggtatcaaacctctccaccgtattcggtaaaaagccccaaaccaaagatttcgtcacacggtatcttcgggcacagcacgccgatttgttttttgccgatgccgtaatccttgttgaaggcgccgccgagcgcatgatgcttccgcactttcttcgaaagcattttcctttccttgaccagtgctacatcaccattttagacatcggtggcagccatgcacatcggctgctccccctgatcgacgcattagggatcgtaacgttggtcatcaccgacctggacgctggcagcctgagatctgctcaaccagtccagcgagatgcgggtcaacagacgaacaaccctacgctacgtcattggacaaaagcaggtggcctgccccacagcgtggacgcattgctcgctttggcggatgacctgaaaacccagcagatcgaccagcttttcgcgatcagaattgcttatcaaacgccgatcaatatccacctgccactgaccggtgaacaggtcgagatgctgccaaacaccttcgaagacagcttggtacttagcaatgcctcacatttttcagccaagcaggtaaggcgaggtttgatgcgtgcgtttgctcgggccctgaacggagcagagagctcgaacaaccttgccagtcttttatttgagtctcttcgagacggtgacaaagccgagttcgctctacaggttctaggcgatccaggctttgccgaactcactatccctgaatacatccgggagggactgacttggcttcagtccaagctggagcgcaagcagcgcgaactgttagtcgttcctacagccatcacggaggtgacggcgtga

SEQ ID NO: 79963 - DNA, 1896 bp, Pseudomonas syringae pv. tomato; identical to SEQ ID NO: 72195

SEQ ID NO: 79964 - DNA, 1905 bp, Enterobacter cloacae; identical to SEQ ID NO: 75858

SEQ ID NO: 79965 - DNA, 1671 bp, Enterobacter cloacae; identical to SEQ ID NO: 75859

SEQ ID NO: 79966 - DNA, 1701 bp, Enterobacter cloacae; identical to SEQ ID NO: 75204

SEQ ID NO: 79967 - DNA, 1626 bp, Enterobacter cloacae; identical to SEQ ID NO: 75205

SEQ ID NO: 79968 - DNA, 1980 bp, Enterobacter aerogenes; identical to SEQ ID NO: 75470

SEQ ID NO: 79969 - DNA, 1848 bp, Enterobacter aerogenes; identical to SEQ ID NO: 75471

SEQ ID NO: 79970 - DNA, 2139 bp, Rheinheimera sp. F8
atgcatatatccaagctcagtctggtcaactacagaaactttcccaacacgaagctgctgttcaagaagggtatcaacactgtcatcggcgaaaatggatctggcaaaaccaatctctttcgcgcaatcagattgctgcttgatgacaacatgattcgctctgcctaccggctggagcaagccgactttcatcgcggcctagggcgctggcaggggcattggatcatcatcagtcttgaattcgaggaaatctctgcggatgaatcagtgcaggcgctcttccgacatgggacgggcgtaattgaggaagaggcaaacggcaaggccacttacaacctgatctttcgtccgaagaaggaaatcagactgcgactttctcaattaaacgatggcgatcaggcaggcctcgacgctatcttgaatccggtcaccatcgacgactatgagacgattttcacgggtcggagtgaagccgacttcaacgacaaggccttctataaggatgtggtcggcgacttcgagaatgttcgattcaatgaagaggttgaatttcgtgttatcggcgcgaagattccgaatgtgctgtccgtctccaaagaaatctctttcactttcatccaggcgctacgggacgtcgtctcggaatttcacaataaccggaccaatccgctcttttcgcttctgaagggcaagagcggcgatatcgaccccgtggcgttccaggccatcaccgatggggtaaaggcattgaatgactccatcgaagcgttgccggacgtgcaggtcgtccggacggatatcagagacactatcaaagatgcggcaggcgaggcgtattcgccgtcttctctttctatcaagtcggatctgccggacgaagctgacaagttgttccagtcgctcaagctgttcgttggcgaatcgggggagagccacgaagggccgatccacgagctgagtcttggtggagcgaacctgatattcctcacgttgaaactgcttgaattcaagtatcaaaaggctaaacagtcgatcgccaactttctgctgatcgaagagccggaagctcacatccacactcacattcagaaaacactgttcgacaagctcaaatacgacgacacacagatcatttattcgacccattcgacgcacatctctgaggtcagcaatgttcagaacgtgaacatcctcggcagagaaggtggtcgttgcgaggcctaccagcctgcaattggcctgaacccagaagagattggcaacattcaacgctacttggatgctgtccgaagcaacttgttgtttgccaagagcatcctcctcgtggagggcgatgccgaagaaattctcgtcccaattctggtcaagaacgtgttgggtctaagcctagacgaactcggcatcagcttgattaatattcgtagcaccggtttccagaacgtcgcggttctcttccacgatgaccgaattcggaagcgatgcagcattgtcacggatcttgataaggccatcattgacacaacgccgacggtgggagactctgaggggctgctccgacgcaagagcaagtatcaggcatcccaggaaagagggatcgccaggaaagcgttattggaagataccttcaaagacaacacttgggtttctcctttctttgctccccatacattcgaggtcgacttcgttgccgccggcaatgcgcgtaaggtcgtcggtatcctttctgatgtctacaaggatgctccaaccatcgcgacggccaaggcggagcttgaatcagcggacatcgcgttgtttggtcagcgcgcattgaccatggcggataactacggcaagggatggtttgccatcttgttgggaaagaagatcgatccgcagaccgccatcccaaagtacatcttggacgcaatcgcttttgcgcatccggtagtcactaaggaagtctggtttaacgtgctgagctaccgcgtgaactacatcgacgcagaggatgtcttcactgcatctgccgtcttcgacgactttagggccaagctgctggcattccgaaatggagacatcgatttcgtcggtatccggaacgagatgcttgccacgttcccccatgaccgcatcaacgacgttctcgcggttttctga

SEQ ID NO: 79971 - DNA, 1800 bp, Rheinheimera sp. F8
atgttcatgtggaacaaagatgatctgaatcccgagcaggaagcggccattctgaagccagggagcgtctttctcatcgcttgccctggtagcgggaaaacacgcacactgacctacaaaattgcctatgagttgtccaggctgaaatcgaacaagcagttcgtcgttgccatcacttatacgcaccgtgccgccgacgaaatccacgagcgcattgaaagtctcggggtggatacatccagactatggataggaacaatacattcgttctgtcttgagtggatattgaaaccgtacggcatctatcacgaagcgttggatcgaggcttccgtgtgatcgatcaacatgagcgcgagaaaatcttagaggccctgtgcaagccataccaaaagcccaaaataacgttctgggattgtgagttttattacaccgaaactggctacgtgctctcctgcccacaagattggaagcatcccggtcttcacgtcatattgggcaagtattttgagattctgcacgaaagtcgacagctagactttgagctcattctctattatgcgcaccaactaatcgcacgtcatcctgcgatcagcactcttctggcacagttgttctctttcgtgctgatcgacgagtatcaggacaccaagcgaattcagtattcgatcatcactgctattctgagagctggtcaaggtacgaccaaggcttttattgtaggagatcctaaccaagcgatttatcaatcgcttggcggatatccgattgccttcgaggatttcaaggcaatggccaatatcgatttggaagaactcgaactgtcgcggaactatcgttcctccgaccgcatcattgactacttcggaaactacaacgtctacaacacgcgcattgaagccgcatccgaggacaaggcgtacccaagccttatttcattcaacgacacagtaagcaaaaatgatctagacgctgagttgatccggctcatccgtttcaacattgagactatgggcatctcacctcacgaggtgtgcattctcgcgccacagtggacacatcttgcaagcattacgcgtcgtttggtcgccagcatgcccgagtattcattcgacggccccggtatggttccctttgcacgggacacagagaatttctggtacaggctttctaagattgcacttactcaggcatcgcctggaatgtatgtgcgcagactgcgatgggctggggaaattctgaatgacttggaggcggccggggcaagcgtgtcaaatctcacgcggcggtccctattgagggaatgcaacgcaatcaagatcgatgaaacagatggtcttacctacttgagcgcattcttcgatcagctgtttgcaaatttagttatcgactttcgccttttcacactgcttcaagagcatcatgttgcgttcttcgacagttcgcaagcccgggtaaatcgattgaagagtgaaggcagcgaatttataggggatattgagacattcaggaaggtattccagcaaaggactggaatcaccatctcgacgattcatggcgtcaagggggctgagttcgacgctgtgatcgcttatgcattattagaggatatggtgccgcatttcaatgatccgaatggccaagaaagtgcaatgaaattgctgtatgtcatcggttcgcgcgcacgaaagaacctgcatcttatttcggaaagagatcgagttcgccagtattctggcgaagagtaccaagtaactcacaagctcgccgcttgcagttttggatacgatcaaattccatag

SEQ ID NO: 79972 - DNA, 1785 bp, Escherichia coli; identical to SEQ ID NO: 73688

SEQ ID NO: 79973 - DNA, 1818 bp, Escherichia coli; identical to SEQ ID NO: 73689

SEQ ID NO: 79974 - DNA, 1824 bp, Escherichia coli
atgaatattctgatagataaagttcgtatatctgggtttagaggaatatcaaatgttgagataactctcccaagagtaactgttttactggggcaaaacaatgcagggaaaacatcagtaataaaagcaatgcagttagcaatgggagactattcacgttacttatcggatgaagattttcatataggtgaggatgaaaaacggcgagaggttatcactgtagatcttcgatttattgctgttgatggtgagagtaggactaaagagttttcagaaaattggcagcaagtgtttggcgataaaattcagtcagagcctgatggaaatcaatttgtatgtatacgaaccattgcgaagcctgatcgagttaaggggggttacgttgttgagcggtttcatttggatatttggccagaacgtactaactggcaagatgctcgggttaatagtaaaaacagattaggtaagcgattggagtttgtaccttttattccgattgatgcgcaaagagatatacatagtgaattgaaagagaaatcctcatttgtggggcgtgtgctatcaagtgttgagtatgacgataacgatgttgctgcgctggaaaggatggtggctgaaataaataaagaagctatcgagaagagcgaaccactcaagcgtttgaaaaatcacctagataatttaaaccaatcatttgaaggttcaggacaaacagagcttactccattcccgaaaaagatacgagatttatcaaagagatttagtgttaattttggtgaatctgataagagttcattttcgatggaatatcatggtatggggacacgtagttgggcatctatgttgacagtaaaagcctttactgaactcttagttaaaaatcacgaagaagaggcggagccattttttccaattatggccgcagaggaacctgaggcacatttgcaccctaatgcacagaggactctatatagacagcttgtagatgctccagggcaagtaattatcagcacacactcaccttatattgctggtttggcagagttgcatgaaattaggttcataagtaagcaagagaattcggtgtgtgtatatcagttaagggatgaatttgacggtgatgatctaagaaaattagggagagaagttgttcactctcgtggtgagctattattttcaaaagcaataatattatctgaaggagaaactgaagagcaagccttacctgaactttttgaatcttataccggaaaacatcccttctcgcttggtataaatttcgtaggagttaatggttccggagcgaaatatcgtccgtttcttattttggcgaaagatttcaacatacctgtatttatatttagtgatggtgaagagcaaacggttaaagagctcaaaaagaactatgagaaagtgtttggggttactgatataatgaattcagctaacatcaccatacttgaagggactgattttgaaggctatttgttaagtcaaggtttcgaacagttgattgaaaaatctatacttgaaatcgacggtgatggcgcaattgataagtggattgaaaaaaagaatggaacatcgttaaagcggattcgaactgacaagccaaactgtggtacttgtaatcaaccaatttttgaagatgttctgagggattatattggtgatgatggacgagttcgtgcaatcctcgaaattcttgattcgcggaagccgctttatgcaaaagcaatcacagataatctgattaaattgccgaaagaaaaatttcctcagaagatagttgaactattcaaaaaaattgaatcgggagtttga

SEQ ID NO: 79975 - DNA, 1893 bp, Escherichia coli
atgaatctatcaaatgctcagcgccagatcgttgaagcccctatggatatagctattcaagtgcttgcctctgcaggttctggtaaaactcgagtcttaacagagcgtgttcgatatatattgaataatacaaagagagatgctgttatcgccctgacctttacgaataaagcagcggaagaaatgagtacgcgtttaagtgatttcgatccggatgaagatagggcttggattgctacgattcattctgttgcgcagcacattttagaaaaatacggacacaccgttggtttgccatcagatttgtatatatatgatagagataaggatcgtatggaagtctttatgcagtctttgcgtgaagatggcattgatatagatgaatatctctctattgcagattccagggagttaaaaaatagggagcgaaatctacaatcgtatatggatatattctcaaaaataaagagagagttgcttacagagttcgatgtatctgagttgtatccaaataataatatctggaaaatatataaggattatcaggcttcattgcttaatagcggaggtatcgattatgatgatattttagtatatgcacatcggattctactcacgcatgattggatagcaaaaatatatcgttcaaaatacaaacatatttgtgttgatgaagctcaagatcttaataaagcgcagtatgagtttattaaggtgctatgcggtgatgtaataaaaagtattctaatggtaggtgaccctaatcaaatgatttatggttttaatgggtcgtcaaaagactacttttgtgagaattttattaatgatttttatcctaatcagtttgaattgaaggaaaattatcgtagtaccaaagctattattcgcgcagcaaataagttaagaccgggatcacaagcagagattgattatgccttggaggggggcgttagaatctcagaattcgcttcagaagaggatgaagctgagatggttgttgctactataaagcatcttttggaattgaaagttcacgatgagattgaggggaatatttcactgaacaatatggttgttattagtcgtaatcggtttgtttttggcaagcttgaaaactgccttaaaaataattcaattccttactctttgaggaaaggagagagagcgttagaaccgtcgactagatttggaaaagtcttggactatgccattagactgaagttgaattcgaaggattgggttgatggaaaaaaattatgtcaagtacttggcatatcagagccggcaggctggacacctgatgtgttgcgagagttggcggctcaaatttcatcatcaactgatgattactctgttgtatttgaaaaacttctcactactattgatagcttaaatattgaaaatcctaaaattcctaagctaataaaggaatttaatgaccttctaacatcgttagttgaaaatcataacggtatttcagatgataaaatagaagacgttaagctgagtattgaagagcttaaagagtttagtggtatgtggactcgatttaagcgtaaggggttaggtgattcattagttgcatttaggaacgcattggcattggggcaactagctgaaagtagtatggatgaaggcttaactttaagtacagtgcatacaatgaagggactggaaaaggatattgtgtttttgataggtatgtgtgaaggggttttcccggattacagagctagaacaaccaaagagcttgaagaggaacgcaataacgcttttgttgcggtgacaagagcaaagcgttggctgtacgtttcttaccctaagcagagaatgatgccttggggtgaccttaggtttcagcggaaatcccgatttgtcagtgaaatagaataa

SEQ ID NO: 79976 - DNA, 1971 bp, Escherichia coli
atgttgattgaatcagtgaaactgaccaattttcgtagttttggtccccagggccaacaaatcaagcttgatcccatgttaacaacgctgattggcgcaaatggtacgggcaaaacagcagtgctacaagcgcttcagcggctattcggcgtgaccagtgaacagcgaactgtctcccgtcaggatttccatgttccgtccacagaaaccgatttacccaacattcgtaatttatcattagaagccattattgcttttcctgaactggatgacgcacaaggagaccattcggccataccggagtttttcagaagtatgagcatcgcggatgagaatgggaggcttaaatgtcgtttacggttagatgcccaatgggatgatgatggaaccattgacggttatgtaaccagccagtttcatgccataacgtgttggggtaatgatgaacctgatgattcggatttccacaaggtacgccccgccgatcgcgcaaaaatccagctaatctatatccctgccacccgttcggcaactgcgcaggtctcctcgtttcttaaagggcgattatggaaggccattaactggtcaacgcaagttcgggcatctttcgctgaaaaagcgcacgagcttaatagtgccttcgaaagtgagtcagcaatcgatgctatcacaggaaggctgacgcaacgctggcaacagcttcattcagccggtaccgacagcacgcctaaatttcgacctgttgatgtccgctttgaggagtttgtcaggaaagtggatgttttgttgcaccctgatgaaagcggcagagatcgcagcatcgaagaattaagcgacgggcaaagttctctatttcatatcgccatgacttcggcaacgcttgatgtcgaaagggaaatccggctaaattcaagacgttctgcgtttctctacgatgacttgccattgccctcactcaccttattggcgcttgaggaaccggaaaataatctttcatcacattatttgtcccgcatcattagtcaacttaatgagctgacaggaaacattcatgcgcaagctattatctcaagccattcatccagcattctggctcgaatcgccccaactcagataaggcatttccggttagacgtagtttcaaagaacactattgtaagagcgctgacattgcccgaagaggataatgatgccgcaaaatatatccagcaggcagtacgcgcctggcctgaactttattttgctaaagtggtggttttgggtgaaggtgcttcagaggaggtcatcctgccagccgtggctggagcgatggggactcctattgaccgatcttttgtcgcgatggtcccactcggagggcgacacgtcaaccatatgtggcgattgctcaatgatttgcagatcccctttatcacgttgcttgatttggattggggacggcatgggggtggctggggcaggattaaaaatattatttcgcaacttattgaagttggaactgtgccacaagttttctttcaaaatgtagatccaaggggatataaatataatttgttagagttcgacacgtactctccttcaaacaaagcacacattgatagctgggtcgattttttgaaacgttttagtatattcttttcaaacccattagatatcgattactcaatgctaaaagcattttctggttactatcaaacaccgccagaggaaaacgctagtgggccgtcaacggcgggagatcccagagatgccgtcttagggaatgagggaatacctgcattctacgccgatgatattcatattcttcgctggtatcgttatttatttctgggacgtggaaagcccagtacgcacattagagtattgagccagatcccatcggatcaactggcacaaaatgcgcctgaggagctaaaagctcttgtccaaactcttcaacaccacttaagcaatcggggcagccagcaatga

SEQ ID NO: 79977 - DNA, 1902 bp, Escherichia coli
atgaaattcatttcccccgagcaatggcgtccgaaagagattgatgatctggaacccaacgcatggaatgctttaagaacacccggttctgtaagcgttatcgctggaccgggtgcgggaaaaacagagtttctggcccaaaaagctgcatatttactggaaaccgggatttgcccaccgagccaacaaattttggccatttcctttaaaactgacgcagcaaaaaatctcgctgaccgggttaagttacgttgcactgaggaactgagtcaccgtctggtttcgatgacattcgatgctttcaccaagagtctggttgatcgtttcagattagcgcttccgcaggaatggagaccgtcaaaaaagtacagcatcagttatcccaataggagagatgttgcccagttctgggcgcgacgacagcaccgcgtatcatccagtgatgccagagatattgaatacgaaatccgccatatggacgccgcttcatttgagtctcatgttgttggttcatatcgaattccggaaaatatgtctccaccacaatcaatcaaacattatctggttttctggtggcttcgcgagcaaataaaaaacgagaacgaagaagaatcagcactgtcatttatgacgatcaatcggttagctgagtatattgttcgctctaatatccatattctgcgggcattaagggcaacctatacttttgtttttgtagatgaatttcaggatacaacctatggtcagtacgatttcctgttgtctgcttttggtcaggcaaaggccacgataaccactgttggggactataaacagcgaatcatgggttgggccggtgccaaaacaaatgcttttcatcagtttgagcatgatttttctgctacccgatatcagttacagttaaatcatcgctcatcgccagaattagtcagactccagcatattgttgcaagggaaattgaacacagcgtttgtatggcccacacaagagttccccaaagaatagagaaggaatgtgcttttattctgaatagtcgctctgttgcgttggaggtgagttatattgcaaaatggataagtcgaaatatgcaatccagagaactacggcctcgtgactatgctattttagcgcgacaaaaaccagaaaactattacgatcaattaaatcaatcattggctagttatcatttaaaacttagaaatgaaagcgttaaaattggcaacacaacacttcaggatttgctggcagaagaattcaccattcttttttcaaatctacttaggtttgtgatcgggcaaaaagagccacggatctggggacaggtatactcaagtattgaacaattaagaggtactttgccagatgatatccgcgcgcacaaaacaatagaaaatcagcttgttaatttaaaacaatctttgcaaactcttcttgagcaaccttacagtacaacgactgctcaacccgtcatggaacacattatttcatttatatccctttccgatatgcgtaaagcgtttagccgatataatactggtgatcttttgaatattacgctagaagcgttggaaattcattttttacaatgtgtcagcagtaccagtaactggcaaggctgtgtagatgagtttgatggagtagatcatataccactgatgactattcataaaagtaaagggcttgaatttgataccgtcatttttataggattagatgacaatgcgtggtggtctcaccagccaggtaatgcagaaagtatggcgacattttttgtcgctttatctcgggcaaagcaaagggccgtgttctctttttgctctgaacgaggagaacgccaaaagctattagatatttatgctttattagaaaagtctggagtcaaggagtataatataagttaa

SEQ ID NO: 79978 - DNA, 2127 bp, Enterobacter asburiae
atgtatattaaaaacttatcaatacgtaattttagaaattttcaaagtacgaagttgaactttaagaaggaatgtgtgaatacgatagttggagagaactcatcaggtaaaacaaatgtttttgaggctatgagattaatactagatgattctctcccatattataaaagattccttactgaaagagattttcacagaggatgtttgccggtttttggtcaatggatattaatcagtttggagttaggtgacatttctggagatgaggagtctgaaattttatgtcaattaaatacgacagttgatgcgggtggtacaggtcgagtaacatacatatatcgacctcaattccatattagagagaaactttttaatttatcatctattgcagacttgcaaaaaaggagagaggcatatgataagttgctaaaggaatatattattgataaaacgacctacgaggcctggactgtttatcaaggaacctgtgatttctccgatgaaaatgaatatgtcaggattgctggtgatttttcaaacttcattttcccaaatccttctgtagaatatatagatttattaggaaataggcagcgtggatataatttactagaccatattagttgcacatacgcaagggcgctgagggatgttgttagtgagttaaaaaataatagattcaatccattccaaaaactattggatttcatctctaaagatatttcaaatgatgaagagctcacaagtaatattatagacgtaaataataagatatcaacaatatcagaggttagaaagctttctacaggtattctaacatccattactaatgctgtcggctctacttattcccccttagtaaatatttcatcagaacttcctagtgacgtcaaagatcttgtgaaggttttacagctcaaagcaggagattcgttgagtgatgggtacacggctgatttatccgaaatgagcttgggtggagctaatttaatatatcttgctcttaaattgtatgagtatgaagaaggggtgagtaagaatctattgtcaaacttcctgatcatagaagaacctgaatcgcatattcatactcatattcaaaaaacacttttcagtaatttaaaaaacaaaaaaactcaagtttttatttccacgcattcaacacacatctcatcagtctctaatatatcatcaactaatgttttggtgaaaaaacttggatacactcaagcttgttctccttcctcaggcctcgatgaaccaacgatcaataagatagagcgttttcttgatgcgatacgtacagatattttatttgctaaaaatgtgatattaattgagggggatgcagaggaaattctaatacctcatttagtaaaaaactctttcggtgtaacactggatgagttaggagtatctcttatttctgtgagaggaaccgggtttgaattactctcatcgctttttcatccatcgagaataactaaaaaatgcgcaatactcacggatgatgatattaatatctataacgaagataaaccggagtacatcactcaggtaatgtatgatgatgccatttcctcagaaaaatcagggaaagagagagttgaggcgttaaagttattaactgcaaataataatcttctcaaagcatattttacaaaacatacctttgaaattgatttagctctaagcggttcaaaaaaatattttgagataatagcacgagaatcgttcgaaaaagatttttatttaactccttacttagatgctttccaatcttctgacgatacgaaaattggttcctttgctttaaaattggcaaataaacataagaaaggttggtttgcaatgaaagttgttgagaaacttgaccacaatttccctatccctatggctttgtgtaaagcacttggatttaccagcgattttaataagttaactctcgcaagagtgattaaatataggtgtgattattacactaaaactttaggtgataatataatcgaagtggctttctcagatgatagccttgaatatattgttgacaatatagaaccagttttggatattttcaaaggacactatagcaatgatcctttagtgcatcttttaatggaggcgtaa

SEQ ID NO: 79979 - DNA, 1692 bp, Enterobacter asburiae
atggacgatgaaaaaaaagaattattaaagatcaaaaaaaatctttttgtctctgcttgcccaggcgcagggaaaactaagtttcttttgggtatgcttggcgataatattaggtgtgactcagggtttaagtggcatatagttcttacacatactaatgctgccgccgatgaaataaatttacgattagataaccaaaacattctaaatgatagagtttggtgtggaacaatacattcatttttactcgagtgggtggtaagaaaatatgcgggggcaatggctagaacaaaagatggagtaaggttaatatctgagcgtgaacatcgtgacttaatacgtaagattgagaaggaaaaattccccagtacaagattaaaatttaaatgggatgaatatggtgatcctcatgttgagccattttgtttattaaatgagcctgaaaaaataattgatgctcaaaaaaacgaggcaatagtgtgtgaggaatatgaaaaaaataagatagatgcaagcctcatagattttaacgacatattaactcttagcctggaatttttgactcaaaacgagaagatcgcagagtatttatcgaaacttataggttatatttacttggatgagtctcaggacactagttatatccagttggaagttctttcatttattacaagatataataaaacaatagttcttgttgtgggtgataatgatcaagctatatatcaagatcttggtgtgtctataaaagatgaagttagtattaagaaaatactcaaactcgatgagttggaggtaaggcaacttacgggatgttacagatctacaaaatcattagtagattactataaaaaatattcttattcgaaatcgaatatagaatctatccgtgaggatttaggtaagtcacctattattagacacacgttgcaaactgatttggccggtagggtgatgaatcttattgaggcatataataagtctaaaggtagtgttgagagtttggctataataggtccgaatagatattacttaaatgatcttatcaatagtatttatgaacgttcaaatgagtttgtatttgatttttattcaaccaatcctttgtatacattgaaagataccatttataatgatcttgttcgtcttgtgttgcttgatgtgtcagttaataattacagagccagacatgcgttatgcatttctataaaagacaaacttcctgaatttgatggtttatcttgtagtgacttgaaaaaagcagtaaagcaattcaatacaaagcgaactgtttttattctttggttaaaagatttttatgagttccttttatctgctttacctcattctccaaaaataaattctgattatttgatctgtcagtccaatctttcagcttttccagtaaaggctgacataatttcaatacgaaaaataataaataaagaggctaacgttgtgaaagtgacaacaatacatggttgtaagggtgaagaatacgattatgtaatatctattggatatcatgatcaagttgttccccattcttcggcggttgaaaagggtgctgaatactcagaaagcatcgcaaaaagattaatgttcgttgcattttcgcgcgctaaaaatcacatgaatatatatatcgatgaccggagagttgttagcccttattttatagctgatacttga

SEQ ID NO: 79980 - DNA, 2271 bp, Burkholderia sp. RF7-non_BP4
gtgaatataaagacaataaaaataaagaacttccgcttgctgcatgatatttctctgcagctcgaagacgagaccacagtcgtggttggacgcaacaactgcgggaagacctcgctctcagacatcatccgcaaattcctgtctgaacggagcacgttcgagatcgaggacttctcgagcgcctgctacgacaaattctgcgcggcgcaccgagcatacctaaaaggtgctggcgtcgaagaggttcgggcgctcgtgccgtcaatcgatttgcgacttcatgtgggcttcgacccgactgttcctgagttcggcccgcttcgcgagttcgttatagataccgacgacagttgcaccgaggccgtcatcgtgtgctcgcggagcctcgccgatggccggattgcagacctattcgaggggcacgaggaaaccatcctacacgggcccgacgaatcgcactctgatggggatcgcctggcgctcttccgcagcttgaccgaccgcgtgccgacgctcttcacgacgcggatgtgggccgaggacccgcaggacccgacgaatacgcgtgacgtgacgcccaaggctgtcacaaacctgctgtcgctcggctttgtgaacgcccagcgtgcactcgacggcacgggtgcccgtagcactgacgtgctggcaaaggtgctggagagcctgttccaaagcgcctccgtctcgacggcggacggctcccaaaagaatatcgcggacgggctcaagaaggccgttgaggaaatccagtcggggatggacacggatttcaagaaagagctcgcgaaactcatgcctgcgattgagtatttcgggtatccgggcttggacaacgtgccactgcagccggagacgaagctcgaagtcggcaagcttctgtccgacttcacaaaaattcagtacgccagctacagcggcgtgcagctaccagagtcctacaacgggctcgggtatcgcaacctcctctatatcctgctcaagatcgtcggcttcttccgcgagtaccgggcgcatgcgaacgcgcctggcgtgcagctcatcgtgatcgaagaacccgaagcccatctacatccccagatgcaggaggtcttcattcggcagttgccggagatcgttaaaaagctctgcgctttggagggcgagaacgtctcatggccggtgcaattcatcgtctcgacgcactccccgcacgtcgcgaatgaagcccgcttcgacacgatccgctatttcgccgtgacgtcgacggatctgccggttggtgttcgctgtactcaggtcaaggacctcagcagcgacctcgccggattgaaaggccctgcgtctgacttcctgcatcagtacctcacgctgacgcgctgcgatctcttcttcgcggataaggcagtgctgattgaaggaacgacggagcggctaatgttgccgcaagtaatgcgcgccctcgattctgtcgatccctccctgaagcttggcagccaatacattacgatcatggaggtcggcggggcctatgcgcaactcttcattccgcttctcaaattcctgggcctgcgcagtctgatcattactgatctcgacgccgtcaaacgtaactcgaagaagaagctcgaagcttgtctcgtccacgagggggagaccacgagcaattcctgcatcaaacactggttcaacacggtcgaagctccggccccggtgcccgaaacgcctgctgataaacagacgacaacacgtgatcccatgccgcaagcggcttcgatggccgcagcttcggcgacggcagaggtagccgtcgccgagactgctgacgacgacgaggaagaagtagcggatggggcgacattgttccctctgtcaacggcattggcggcagacaacgctgccaagactcgcggcagtctgcgcctcgcatatcaggtgccggaagcgtcaaacgggccgtgtggtcggacgttcgaagacgcgttcattcttgcgaaccagacccttttcggcattactggcgcgacgaatgacgcactcgcgaaagctgcccaggacaaggccgcgaagcagaagaagtcaaagttcgcactgacctacgcgattgagagaaccgactgggtcacgccgcgatatattgaagagggcatgcgctggctcgccgcgagtaatgttgccgtcgccaatcctagcgtggcactcgccgccgaggcacaggccatcgatgcgatcaatgtactcaccgacacgccactttcaggtgaagccatatga

SEQ ID NO: 79981 - DNA, 1740 bp, Burkholderia sp. RF7-non_BP4
atgagcggggtcactcaccccaatccagctgaagccgctgccgccgccgcttgggaagcgctgaaagactgcctcaacgacgggtcgagcttcgtgttcgaggcgggcgctggcgccggtaagacctactcgctgatcgctgcgcttcgctacatcctgaaggaccaatcgcgggagcttcaacgcacgcaccggcaagtcgcgtgcgtcacctacaccaatgtcgcgcgggatacgatcatcgcgcagactgatggcgatccggcgatctactgtgacacgacccacgcatttgcgtggatgcttgtcagcccgtttcagaaacggcttcgcgagcttgtccgcacgctgccgggctgggtggatcgcgtcgaagaactcgacgccgcgaacatcacggcagttgggtacgcgctcggtcggcgctccatcgaagatggcacggcgaacttgcaccacgatgacatctttccggtgtttatcaagctcatgcagttcgcgaagttccgcaacgcgatggcgtcgcgcttcccgctcatcctcgtggacgagtaccaggacacgaacgtcgaactcgttgaatgcatcaaggaccatttcatcggcaagccgcacgcgccgcaattcggcttcttcggtgaccattggcagaagatttatggcgatggctgcggttcgatcgcacacgacgcgctgaagcgcatcgacaagaaggcgaacttccgcagcgcgaagccaatcgtcgacagcttgaacttgatccgcccggagctcgcccaggcggtgaaagacccggctgcgccgggcgaagttcacgtttaccacaccaacggatggggcgggcgacggctcacggcgaaccactggcagggcagcctccccgctgccgaagccacgcgagcgcttagcaatgtccgctccgagctggagagcgttggctgggattttgccggcgacacgaaggtccttatgctaacccaccgggcgctcgcgacagagatgggctacaactcgatgcgggccgtcttcgcgttcaacgattcctttacgcgtaaggccaacgaggtcatcgcatacttccacgaacatcttgaaccggcggcgcgggcctaccgcaccaagcggttcggcaagatgttcgaagcgattgacgctgagcgtccggtgatgaacgggccggccgacaaggctaggtggacggacaccatgaggcggctctgcgaacttcgcaacacgggcacggtcggcgacgtgctcgcatatctgtcctccaccggactgccgatcctctcagactcggtcgtgcgccaggagaaggcgcttgcggacgcgcttgcgggcggcgaaccgctgacgggacgcatcaaagagctccatgcgcttcacgcagtgtcctaccaagagatcatcgcgctctgcaaatatctcgacggtcactcgccttttgaaaccaagcatggggtgaagggcgatcagttcgaaaatgtcctcgtcgtgttcgggcgcggctggaacgattacgacttcaacctctatcttaagatggccgggaaccctggcctgatcggtactcgaacggcggactacgagcgttatcgcaacctgttctatgtcgcggtctcgcggccgaagaggcgcttggcactgctcttcacgcatctgcttgagcccggcgcgatggcgactctgtcgggatggttcgcggaccacccgatccgggatatcggcccggcactataa

SEQ ID NO: 79982 - DNA, 2097 bp, Burkholderia sp. RF4-BP95
atgcgcattgaaaaggtcaaggtcgaaggatttcgactgcttcaggatgtcgagatcatgctggaatccaattccactgtgatcgtgggacggaacaacagtgggaagacctccctcaccgatatattcgatcgcttcacaggagaaaccggtgcccgcttccgtctggaagatttctcggccgcgtcgcgtagcaaatttttcgatgcgaagacgctgcgagaaaaggaggccagcccagaggaaatactcgccgcgcttccgaaaatcgtgctgacgctcaccttcgcctacgacagcacggcaccgaatttgggcccccttgctccgtttgttatcgacctagacgttgcatccactaaagcgattgcgcgcgtcgagtatggtccaacattggcgacactccacaccttgctcgatattccgccggcagcagaaggtgtaaaaccgaatacgcattttctccgctcattgcgcgaaaccctaccgaaggcgtacagcatccacgtatgcgccatcgacccgacggacgacaccaaccggcgcgattttgagggaacggcagcactagctgctttggtgcaatgtaatttcgtccgtgcacagcgcacccttgaccatgccagacacggcgacaccgacgttattggcaagttgctcagcactctcttcaagactgccacgacaccaacagcggcggcggcagatcaggagctagccgccaagctgaaggcttccgtcgaaggtattgaacgaaatgttcaagaagacttcgacgagatgctgaagaagctgctaccggccatggaagtgctgggcttctcgagcctcaacgacacggagcttcgaccggaaacctcgttgaatgtagaggcgcttctttcggaccatactaaagtggtctacacaggcgcggacggcgttcacttgccggaaggctataacggtctaggcactcgcaatttgatttatatgctgttgcagcttgagagctttcataagagctatcgtgcaaaagcaacccgccctgtcactcacctgatctttatcgaagagcctgaagcccacttgcacccgcagatgcaagaggtattcattaatcaattgaatgcagccattggcaagctgtcggccagttatcccgacgagcctgggtggaaagttcagttcattattacgacgcattcgccgcatgttgcgaacgctgcgtcgttcgaggcagtacggtattttctgaatgaatcaacggagacggcgagcactcggcacactaaggtcaaggacttcaagaaagggatgaccacgatccccccagaggaccaggacttccttcaccagtacatgacattaaccaagtgtgacctctactttgcagacaaagcgatcatggtggaaggaaccacggagcgactgctcatgccgcgcctgtgcgagctggttgacaaaacgctcggcgaaaagcataggctagccagacagtacgtgacatgtgtcgaagtgggtggtgcctacgcgcacctcttctatcccctgctcgattttcttgaactcaagacgctcgttatcaccgacatcgattcaatcaagctagtggaaaaggagaacaagcagggaaagaagatcaaagtgtgggagaagtgcccggtcgcggaaggcgaacgaacgtctaatgctgccatcaaagagtggtttcgcccaaaagacgagagggataaggacaactggcaaatcacgcctgctgaacttgcgaccaagacgcctgcagaaaagcagagcggctaccgcagaattgcttaccagattgcggaggcagccgactccaatgtctgtgcccgcagctacgaagatgcacttgtccttgcaaacccagatcgatttgaatggcctaaagagcaagatgaggcgaccgaggcatgggaaattgcgcaggggcttgcgaaggctgatacagctttgcgctttgctattcgtgagaaggactggacggtaccgcgctacattcgagagggccttgcatggctctccgaacctccccctccgggggcagcgccgccactagaaaaaatggaatcaccggccaatgtggaggcagcatga

SEQ ID NO: 79983 - DNA, 1734 bp, Burkholderia sp. RF4-BP95
atgatcgaagctgccgaaaacccggcactcattgccgccaaggaagctcaaaggaagatcgatgaagcccttgatgcgggccgcagctttcgccttgaagccggtgcaggcgcgggaaagacgtactccctcgttgccgctttaaagcggatcattgcagagcgtggaccggcattggttcaagcaggacaaaaagttgcttgcattacctacaccgaggttgcccgaaacgagattgcgcaggagatcgaagatcatcccgcgattctcgtcgacaccatccacggcttctcgtgggcgttcctacgccaatttcagaaggcgttgcgcgacctcgtcacggaaatggaagacaggcgcgagaagatcgaacagggcggaggcgtaggttcaaagcccatagactatgacctcggcttcttcggtgtcgacgccgatcgaatcacactcggtcatgacgacattccggaaatgatggcgacgcttctgacgcgcgaaaagtttcgtcgtgtgctaacccagcaatttcccgtcatctttatcgatgagtatcaggacacccatcgccagttcatggaggcgattaccgagcatttcttaaaacccaacactggcccgctagtcggcctatttggggatcattggcagaccatctatcgcagtgaatacgaactcgccgagtatccgattgaagaaattggcaaaggctccaatttccgatcagtaccggtcatcgtggatgtactcaacagacttcgaccagaactgaaacaggccgttcgtgatccagaggcgattggtgaagcaagattttttcacgccaatgcctatcaagggcaacgaaccaacgaccgaaactcgaaggaagacctccctcccgaactggcgcgaagcacgcgcgaaagtctgatggagcgacttcagaccgagggctgggaacttggcaagaccaaggttctcatgctcacccacaatgttctggccgccgagcaagggtaccctaccgtcgccgagatattcagtggccggaccgagttgttcgcaaagaaggaagatcccgcaatcaagttctttgctgaaacagtcgagcccatgtgtgcagcctatgatgcctctcgctatggcgacatgtttaaggtgcttggctctggtcctgccattacgaagcatgaggacaaggcatcttggcgcggcgatatggatgcccttcaaaagctgcgtactgaagggacggtcgggcaaatccttgaccacctaaagaagtcaaggcgcccgtcgccgcccgatcgccttttgcggcgcgatgatgaacttgcagcgctcaatggcgaacccatacctgatgacgccactgcacttcagcgctacagcagactccgaaatgttcgttatgacgagataatcgaggtggtcaagtttgtcgaaaagcagacaccctttgccacgcagcatagcgtcaaaggtgccgagtttgagaacgttcttgtagtgcttggtggtggctggaatcactacaactggccacaactattagagcttctagagacaggggcgctgaacgcaaaaaacacgaaagcgttctatcgggcacgtaatctgttctatgtttctatttcgcggcccatgacgcgacttgccattctcgccacacaaaccttgtccgacactgcgctcgcggcggtgagccggctttttgggcaggataacgtggaggagcttgctattcctatgtaa

SEQ ID NO: 79984 - DNA, 2325 bp, Burkholderia sp. RF2-non_BP3
atgcatttgaagaagctggctgtccggaatttcaggcggctgcgcaatgttgtcattgatcttgcttccgacatctccatttttgtcggtgccaacaacagcggcaagacgtcggtcgggcatgcgctccagttattcactggcagtggccgcttcaacattcacgactttagtgccgaactgtgggccgacatcgttgcgtttggtgaaggcgatggcgaggcgagtcttcccacgatggaaatcgacgtttggttcgaaataggcccggacgatgttcaccgcgtcatcgatcttcttcccagccttgcttgggaaggaaagctggtggggatgcgtgttgcctacgcgcccaccaatcctgcggcgacgcatgcacgctatgtcgaagtgcgccagcgcgtgctcgatgcggtcgctaagggcgaagacggagcacccgccttcgatccgtcgccgcgtaatctgcgggagttccttcgcgacaggctgcatgacgaatatgagctgcgttatttcgtactcgatcccgcgcggttcgatgcgaagatggtcgcagaggctggctatgacccagccactctcaccggacgcgatcgcagcggccgtgagatcttgaacggtcttctccacattgacttcttgaacgcgcagcgccatctctcggacagcccaggtggctctcgcgccgaggatctctctcgtgtactcagtcgcttctacgggcgcaacctcgaacaaaaaggcgaagatgtcgaagcgttgcgagccctcgcagcgtccgaggtctcgcttaacgagcatctcgaacgagtcttcgaaccgacgctcaagagtttgtcgaagctcggctatccgggcctctcaaatccgcgcatgatgatccgctcggccctcgaccctgcccagatcatgagcggtcgagatggcgcggtcgttcactatgcgttgggaggagccgatgacgggaatcccgacccacctaccttgcccgatcgatataacggccttggcttcaaaaacctcatcttcatggtcgtcgagctactcgacctccatgctcaatggctggcgatcgaggaaaaccgtccgccggtccacctgatcttcatcgaggagcccgaagcgcacctccatgcccagcttcaacaggccttcatccgcaaggtgatggacatcctaacgctcaagggcgaggaccgcacgcactacacgagccaagtcgtcgtcacgacccattcgactcatatcctttacgaacgaggcttccggccgatccgctattttcgtcgaggccgtgcacggaatggctcgacttccgatgtgctcaatctctcggtcttctatgacaacaccgatccggacatccgaagcttcctcgagcgctatttgaaactcgcgcactgcgatctgttcttcgctgatggcgccgtgctggtcgagggcaatgtcgaacggctgctattgccgcagatgatcgccaatgccgcgccgagactgcaatcaacctatctcaccgtcctagaaatcggcggagcgttcggctaccgattcaaaacgctgatcgagtttctcggactgacaacgctcatcatcacagatctcgacagcgtgttcggtccgctggggcaggatggcgagggtgcggcacccgctggccaaccggaggccgcggaggcagtcggcgaggacgcgcaggctgccggcgccgaggctgaggacattgatgatgacgaagaggatttgcccgtggctgcggagaagcccgggaaggcgtgcatagccggtcatccgggcgcggcgacgtccaatcagaccttgctccaatggctaccgaaatgcgacacggttgccgccctgtgggaggcgacggctgagcagaagatccaggcgaggacggacgacaatgacgctttggtgcgcgttgcctatcagtgccggaccgatgtcacttggggcggagaaaccctcgcgctcgccggccgcacgttggaggaagcattcgcactcgaaaatcttgaatggtgccaggacaagaaccgtaagccgcttcagctccgcatcgccaaggccgacgagaagaacctgaccacgcttgcggaacggatccacaagcgcgtgcaggctaagagcttcagcaaaaccgacttcgcgctcgccttgttagccgaagatccgagcagttggtcggtcccaacctatatcgccgagggcctgaactggcttgagaccgagattgcgccgccggaaccggtcgaggaccagccgcgtgtggacgcgcctcagggtgtgcctgccgccgtcggcgacgaggtggcagcatga

SEQ ID NO: 79985 - DNA, 1878 bp, Burkholderia sp. RF2-non_BP3
atgacaagccgaatcggcagtcctgacacacaagccgatctagatgttcgaggatgtctcgatcggatgcctccacgctcgtttgtcatggtcgccggtgcggggtcggggaaaacgacctcgctgatcaaggctatcgcgcacctagccgagacccgcggtcctgtcctgcgccgcgccgggcagcagatcgcctgcatcacatataccgaagtcgccgccggtgagatttcggccgatgtcggggtctcgtcgctattccacatctcgaccatccacagtttcttgtggtcagtcatccggccgttccattcggatatcgcggcttgggtagccacccgcatcgatgagaagatcgcggagcgacgcgcacactacgacaagcctcggactcaggcgaaaacgaaggcccgccttgagcaggagatcgaagatctcgaggccgagttggctgcgatcagtgaagtggagaagttcgtgtatggcacgggtagcagctacgctgaaggcatccttggccatgacgatatcctcaagctcaccccagcctgcgtcgcagcgcatccgctgctgaggcagctcgttgctaagcgctttccctacatcttcgtcgatgagagccaagacaccaatccggaggtcgtcgaggcgttacggcacattgcgggcgatcatcctggtctgtgcctcgggttcttcggagacccgatgcagaagatctatatgagcggagcaggcgctatcccgctaaacgacggctgggcagagatcacaaagcccgagaacttccggtgcccgacatcggtgctcggagtcatcaatgcaatccgcgcccctggcgacggccttgcgcaggtgcgtggtcggacgacaatcgttgatggcagcgagcaaccggttgccggtacctccaatctgttcatcctaccggcagacacggagcggagtgcacgcctcgcggccattaggcagtggctggccgccgaaaccggtgacggtctgtggctaagcgacgtgcgggaaggagatgtccgcctgcttgtgctggtgcatcgtatggcggccaaccggctcgggttccctaatctgtatgctgcgctcaatgaccgagccccaatgagtctgagtgaagggctgagcgatggcacagcctggccgctccgtccgcttgtccagcacatacttccgctcgttgtcgcggcccaggcgggcgatcggttcacggtgatatcgaccttgcgcagcgaatgcccgagacttgaaccagcgcggcttcgagggcaagcgactgcccccgttcttacagcgctacagcaagcgctcgacgggcttgtaggtctgctggcagcaggatcgcaggcgactattcgggacgtcttgacgcatgtgcgagataacgagttgctgcgcctcgatgatcgctttgccatgcatctggttgcagagccagtggatgacggcagcagcggcttcgagaacgttcaagcctatctggcatgcggtgtcgacgaactctgggcctaccggcgctactttacagaggagtcgccgttcgcgacgcatcatggggtgaagggcgcccaatttgagcgcgtattagttgtcatcgacgatgaggaagcggccttccggcagtattcttacgggaagtatctggggtacgtccccatctcggacaaggacgaagccaacatagccgcaggtgaagagtccgtactcgatcgaacccgccgcctcttctatgtatgttgctcgcgtgcaatgaaggatctggcagtcgtggtctttgtgcccgatgtcgcagcggcccgcaccgcgatcgttgcgcagaatttgttccccgagaccgcaatccggggcgccgagcatctggggtag

SEQ ID NO: 79986 - DNA, 2271 bp, Burkholderia sp. RF7-non_BP1; identical to SEQ ID NO: 79980

SEQ ID NO: 79987 - DNA, 1740 bp, Burkholderia sp. RF7-non_BP1; identical to SEQ ID NO: 79981

SEQ ID NO: 79988 - DNA, 2250 bp, Burkholderia vietnamiensis
atgaaaataaagacaataaaaataaagaacttccgcttgctgcataatatttctctgcagcttgaagatgagaccacagtcgttgtcggacgtaacaactgcgggaagacctcgctcaccgacatcatccgcaaatttctatcggaacggagcacgttcgagatcgcggacttttcgagcgcttgctacgacaaattctgcgcggcgcaccgtgcacacctaaaaggagctggcgacgaagaggttcgcgtactcgtaccgtcaatcgaactgcggctacacgtgagcttcgacccgacagttcctgagttcggcccgctccgcgaattcgtcatagataccgacgacaactgcacggaggccgtaattgtgtgctcgcggagcctcgccgatggccggattgcggatttgttcgagggacacgaggaaaccgtcctgcacgggaccgacgaatcgcactccgctggcgatcgcctcgcgctcttccgcagcttggccgaccgtgtgcctacgctcttcacgacgcgaatatgggccgaggaccctcaagaccctacgaacacgcgtgacgtgacgcccaaagcggtcacaaacctgctatcgctcggctttgtgaatgcgcagcgtgcactcgatagcacgggtggccgtgacacagacgtgctggcaaaggtactggagggcctattccaaagtgcctccgtctcgacggcggacggctcccaaaagaacatagcggacggcctcaaaaaagccgttgaggaaatccagtccgggatggacacggatttcaagaatgagctcgcgaagctcatgcccgcgattgagcaattcgggtatccgggcctggataatgtgccgctacagccggagacgaagctcgaagtcggcaaacttctgtccaacttcacgaaggtacagtacgccggttacagcggcgtgcagctgcccgagtcctacaacggactcgggtatcgcaaccttctctatatcctactcaagatcgttggcttcttccgcgagtatcgggcgcatgtgaatgcgcccggcctgcagctcatcgtgatcgaagaacccgaagctcatctgcatcctcagatgcaggaggtcttcatccggcagttgccggagatcgttaaaaagctctgcgccttggagggtgaaaacgtctcgtggccggtacaattcgtcgtctcgacgcactctccccacgtcgcaaatgaagctcgctttgacacgatccgctatttcgccgtgacgtcgacggatctaccggttggggtgcgctgcactcaggtcaaggacctcagcagcgatcttgccggattgaaaggcccgacctctgacttcctgcaccagtacctcacgctaacgcgctgcgatctcttcttcgcggataaggcgatcctgattgaagggacgacggagcgactgatgttgccccaagtgatacgcgccctcgacgctgccgatccgtccctgaagcttcgcagccagtacattacgatcatggaagtcggcggagcctatgcacagctcttcatcccgctcctcaaattcctgggcctgcgcagtctaatcatcactgatctcgacgctgtcaaacgcaacgccaagaataaactcgaagcttgccttgtccatgagggtgagaccacgagcaattcctgtatcaagcactggttcagctcggccgaagctacgaccccggagcccaatgcacctgccgataaaccggccacaatgcctgtaaccacgccgcaggctgcttcgacagtccccgtcctggcgacggcaggggtaactgatgacgacgacgaggaagaagttgcggatggagcgacgttgttccctctgtcaaccgcattggcggcagacaacgctgccaagactcgcgggagtctgcgcctcgcatatcaggtcccggaagcggcggacgggccgtgtggccggacgttcgaagacgcgttcattctcgcgaaccagaccttcttcggcattaccggcgcgacgaatgacgcgctcgcgaaagccgcgcagaacaaggccgcaaagcaaaagaagtccaagttcgcattgacctacgcgattgagaaaaccgactgggtcacgccgcgatacattgaagagagcgttcgctggctcgccgcgagcaacaccgccgtcgccgatcctggcgtggcgctcgctgccgaggcccaggccgccaatgcgctcgtcgacaagccaacctccggtgacgcaacgtga

SEQ ID NO: 79989 - DNA, 1740 bp, Burkholderia vietnamiensis
gtgaatgagaacacccgacccaacccagctgaagccgccgctgccactgcatgggaagcgctgaaagattgcctcgacggcggatcaagctttgtgttcgaggcgggcgctggcgccggtaagacctactcgctgattgctgcgcttcgctaccttctgcaaggtagggcacgggagcttcaacgcaggcaccagcaagtcgcgtgcatcacctacacgaatgtagcgcgggatatgatcatcgcgcagactgatggtaatccagcgatctactgcgacacgacccacgcgttcgcgtggatgctcgtcagcccgtttcagaaacggcttcgcgagcttgtccgcacgctgccaggctgggccgatcgggtcgaagaactcgacgccgcgaacatcactgccgttggatacgcactcggtcgccgctccatcgaagatggcacggcgaacctgcaccacgacgacatctttccggtgtttatcgagctcatgaggtccgcgaagttccgcaacgctgcggcgtcgcgtttcccaatcatcctcgtggacgagtaccaggacacgaacgccaagctcgtcgaatgtctcaaggaccagttcatcggcaaaccctacgcaccgcagttcggcttcttcggtgaccactggcaaaaaatctatggcgatggctgtggttcgatcacacacgacgcgctgaagcgcatcgacaagaaggcgaacttccgtagtgcgaagccaatcgtcgatagcttgaatctgatccgaccggaactcgcccaggcggtcaaagacccggcagcgccgggcgaggttcacgtcttccacaccaacggatggggcggaaagcggcttacggcgaaccactggcaaggcgatctccctgcgaccgaagccgcgcaagcgctcaggaatgtccgcgccgagttggaaagcgttggctgggattttgccggcgacacgaaggtcctgatgctaacccaccgggcacttgcgacggagatgggctacggctcgatgcggaccgtcttcgcgttcaacgattccttcacgcgtaaagccaacgaggtcatcgcctacttccacgagcatcttgaaccggcggcgcgggcctacctctccaaacgcttcggcaagatgttcgaagcatttgatgccgagcgtccagtgatgaattcgccggcagacaaggtcaggtggacgaacgccatgagacggctctgcgaacttcgtgacacaggcacggttggcgacgtgatcgcacatctgtcctctacgggcctgccgatactctcagacgcagtcgtgcgccaggagagagcgcttgcggacgcgcttgcgggcggtgagccgctgacgggacgcgtcaaggaactccatgcacttcacgcggtgtcgtaccaagagatcatcgcgctctgcaaatatctcgatggtcactcgccttttgaaaccaagcatggggtaaagggcgaccagttcgaaaatgttctagtggtgttcgggcgcggctggaacgagtacgatttcaatctctatcttaagatggccgggaaccctggcctaatcggtacgcgaacggcggactacgagcgttaccgcaacctgttctatgtcgcagtctcgcggccgaagaggcgcttggcgctggtcttcacacaccggcttgagcctagcgcaatggcaacgctatcgaaatggttcacggggtacccgatccgggatatcggcccggcgctatga

SEQ ID NO: 79990 - DNA, 2328 bp, Burkholderia sp. TSV85
atgcgcattgaattcattgagatcgccaactttagaaaactattatcgacccgagtaggattgtcctccgaaaggaccgttttcgttggagcgaacaacagcggaaagacgtcggccatcacggcgctccgctatttcctcgtcgatcaagagcgatcaagcttttgcttcaacgacttcacgctgtcccattggccggcgatcaacgcaatgggcgccgcttgggagacggagcatatcgcaagccagcccttgcccgagcctgaatgggatcaggtgttgccgttcctcgatgtgtggcttcttgttgccgaaaacgaagttcactacgttcagaagatcctacccaccctcgattgggatggcggacgactgggtgtgcgcatgcgcctcgagccgaaggacgccgcgcaactgcagcacgaatatgtgactgcacggtcccaagcgctggcgctgcaggcggccggtgccgccttggccgaggagcaaggcaaggctgcagttgattttcaggtagcaatttggccgcaaaaccttgtcgaattcctgaagcgccggctggcgtcgtttttcatagtcagggcctacgtgctcgatccggccagttgcgtcgatccggagaatggcgtggccaagccgcaggcgcttaatggaagcgagccaattgacggtgacccgtttcgcggcctcattcgcatcgacgagatcagtgctcagcgcggcttcggtgtggggggtgaggacaatggagaagaggctgctgccgccatcagcggatcgcggaagctgtcaactcagctccgccagtactacacgcgacatctcgatccttatgagaatccagatgcgcaagacctccttgcactcaaggcgatcgaagaagcccagaaagccttcaacctgcggctaaacgacggcttcaaaagcccgcttaaggaaatgcacaagcttggctatccgggtgtcacagatcctaaactgaacatttcgacacggctgcgtcccgttgaaggcctaaaccacgacgctgccgtgcagttcgtcgtaccgatccatgacggcgcaaacgccatcaacctatatctgccggaggattccaacgggctgggttaccagaacctcatctccatggtcttccgtcttatggccttccgagacagttggatgcgggttggaaaggccaagcacaaggctgccgacgacacgattatcccgcccttgcatttagtgcttatcgaggagcctgaggttcatcttcatacccaggtccagcaggttttcatccgccaggcgcacaaaattctgcgcaaccacgtcgacctcgccgcgagcgagaatttcgtgacgcagatggtagtcagcactcattcgagccacatcgcccacgagtgcgagtttgattccctacgctatttccgccgtctaccgggaggcgaaaaggcaattccgacctcatgcgtcgttaacctggaaaacgcgtttggcagggatccggacaccaagcgcttcgtgacgcgctacctgcgcgttacccactgtgatctgttctttgccgatgccgcagtcctgatcgagggacccgccgaacgtatcctcgtgcccaattttgtaaattcccatccggagttcgagaagctttcggagagttacatcacctggctcgaaatcggcggtagccatgcccacaaactgcgcagcctgatcgagaaaatcggtcttacgacgctggtcattaccgacatcgattcctgcaatgccacgggggccagcacgcagccggtgcgtggcgcagggtgcacgacccgcaataccaccttgcggacgtggtggcccgtcatcaatgacctagacccgctgctcgacaagccagagaacgagaaggttaaagtctatgcagatgagaacttctcaatacgagttgcctatcagtcgcccatccaggcgacgttcaaaggcgccactgcagaggcactttcctacactctggaagacgcgatagtaatggcgaatctcgatctgttcgaggtattgcccggaaccggacttatcgccaagttccgcacggccatcaccggtagcgccgatttaattgctctgagcggtgcactcaagactgcgctcgaaggtggaggaaaagccgaattcgcacttgacttgctcgagatggaaaacccgctttcgctaaaacccccggcttacatccgtgacggcttgctgtggttggcagcccagcttgaacacaaacaggtcgagctggggctcgctcatgtggcaggcgaagacgatggcagggcggcaactgcacccgaggaggtaacggcatga

SEQ ID NO: 79991 - DNA, 1899 bp, Burkholderia sp. TSV85
atgaacaacgttaccgctgaaccgtcgaacgttacactcgacgatcatgtagacgaggagctgacgaggttcctgagcttagagaagcccaagagtttcttcctgttcgcaggtgccggttcgggcaaaacgcgctcacttgtaaatgcgctgaattatttggccaagacctaccgcgattcactccgcttgcgcgggaggcaggtcgcagttgtcacctacaccaatgcagcgtgtgacgagatcacacggcgcaccgaatacgatccgctgttcgtcgtgagcacaatccacagcttcgcctggtcgcgtatacaggggttaaatacagacatccgtgcttggttgaaagacaacctgcagcgcgagatcgcagacctccaagccgaagaagagaagggccgggcaggcaccaaggcgtcggcagctcggcagactcagatcgagtccaagcagcggcggttagaccggcttgccgacattaagaccttcacttacaacccaagtggggacaatcgggagcgcaacgcgctgaaccacggtgaggtcatcaagatattctcgacgttcctgcttgagaagccactcatgcagcgtatcttcgtcgagaagttcccgtttttgttgatcgatgagagtcaggacacaagccgcgctctcattgacgcgctgctcgtagtgcagaaggcgcatgctgatcgcttttgcctaggcctcatcggcgacacgatgcaacgtatttatccggacggcaaatcgcgaatcgaaagcgagataccccagagctgggcgacgccagagaaaaagctaaaccaccggtgtccccagcgcattgtgcggctaataaatcagattcgcggggccgccgacaatcacaaacaggagccgcgcgatgaccggccggaaggctgggtgcggctctttgtttttcctgtcgatgcacccgaaaaacctaccctggagcggagagtccgagactacatggcggtgctcacgggcgaccaggattggaccgacgccagcaaatgcaaaatattgaccttagagcatcaaatggcagcccggcgaatgggctttctgcagatgttcgaggcgctggcttccgtggatgattaccggacgagctttctcgacggtagctttgcgccgacgcggttcttcacccactacgtcctgccgctcgtgacggcacagcagaagggcaataaattcgcggctaccaagctggtacgggaaagctccccattgctcagcaaggaagccttgaaggggaacgataagccgatagcgcaactccgtgccgcccagacagccatcgacagcttgatggcgctttggaccaatggcgaaccaacctgtggtgcgatcgtcgcgaacattgccgaaaccaatctcttcgcggtccccgacgggcttaaggccgctttggccgtcgttaaacaagccgggccggcggaaacacccgacgatgaggcggctgaccctgtcggcgatcacatagcagcgctcgttgcgtttctcgactgcgcattctcggaaatcgcaccgtatgccgcctacgtcgcgcacgaggctccattcgatacccatcagggggtgaaaggattggagttcgagcgtgtcatggtcctcatggacgacggggaggcccgaggcttcctgtttggctacgacaagctattaggcgccaaagcgcccacggctgccgacgtcaagaacgcccacgagggcaaggaaacttctctcgatcgcacacggcgcctgttctatgtgacctgcagtcgcgctcgatcaagtttagcgctcgtagcctattctcccgaacccgctgcagttcgggcgcatgtcgttgcaaatgagtggttcgcagccgacgaggttctgtccgagttgccttaa

SEQ ID NO: 79992 - DNA, 1731 bp, Burkholderia vietnamiensis
atgatgctgctcaccagcctgaagattgaacactaccggggcattaaggcactcgagctttcgctggggccgacgactgtcctagtgggcgagaacaattgtggcaagaccacagtgcttcatgccttgcgcgcgtgtctgtctgcgctgcgctctgccgggcgtgcgtcaccgttcgatgagttcgacttgcacttcgagaatcgggccgcagacccaaccaccgctccacccatcgttatcacgctgacgttcgaagaagcgcaagctggagagtggtcggatgaagtcgagcagaggctcggcggggatggcggggtgatagtgctggtgccgcccgatgaccgaagtcgtgtccaactgcgtgtcagcgcccagtactcctcggtcatccaagaaatcgaaaccacatatgagttcctcgatgccgttggaaacccgttgccggcgaagagccgcaaccgtctgacaggcttgcagcagcttcggcctttgttctacctctcggctctgcgtgacgctggcaaggagttttcccgcacgtcgcagttttggtcccccttcgtcaagaactcgcagattgacgaggcgacgaaggctgccatcgagacgcagcttgaggacatcaacgcacaaatcatcgaagctcacggaacgttcaaaggtgtccgcgagcatttggctaaggtgcaagagctggtggcgctcggtggacaagacgtagtcagtgtcgatgcagttcctgcacgggtgtttgatatgctgaaccgcacccaggtgagcattgcgtcggctacaggcgcacgattacccattgggcgtcatggagaaggtacccagagtctgactgttctgatgctgttcgatgccttcctcaaatcggagctggctaggaagcaaggcgtcaaggaatcgaagcccatcgtcgcgctggaggagccggaggcccacctgcatccgaatgcagttagggcgctctggaagaccattgaggatattgatggccagaagcttgtcgccacacattcgggtgacttgctgtcagaagttgacgtccatgcgattcggcgcttgtacaaaaaagacgggcaggtttccgtcggagcgatacaccaagggcttcttgacgaacgtcagttgcaaaaatttgattacttcgtgcgcagaactcgcggcgaattattcttcgccagggtgtggattctggtcgaaggagagacagatgtaatcatcctgagtggcgcagccagagcactaggaattgagctagaacaagctgcggttcgtatagtcgactatgcgcagagcgacctttctattttcatcgctgcggctgactcgctcggcatcctatggcacgtcttttcggatggcgatgccgcgggagcgaaaaacctgaagaaggcacgtgacgctctcgcaggtaggcccgaaaaatcccatttgacgttacttccgaatggtgagcctatcgagccattcttgtgtaggaatggttttgtcgaaatctatgaagagcatgccagcccgcagaatcgcccgcgttacataacagtcgacaaagacaatgatgcatacccaagccagctatatcagtgtcttcccaataatgggaaaccatcggctgcccacgcagttgttgcctcaatgattactcgtggcagagattccgtgcccactgaaattgtcgaatgcttagggacagcaatgaagcttgcggagggtaggtga

SEQ ID NO: 79993 - DNA, 1914 bp, Burkholderia vietnamiensis
atggacttcctggccaaactcaatgacagccaacgcgccgccgcgatgtggaacgaggggccgctgttggtccttgctggccccggttccggcaagacagcgactttgactgcccgtgtggcgcgcctcgtcgaacagagtcgcgacgagtcatatcggattctatgtttgaccttcaccaggaaggccgctgcggaaatgcgcgagcgtctgttgaagttggttccagatgcgcgggaccgggtcctgctaaccacgtttcactcgtttgctaccgacatcctgcgacagcacggcagccattttggactgagccctgacttcgagattcttgaggagtctgagcgtgtcgggcttctaaggtcggtgctggcagagaagtcggacgagctcaccaagttcgtttcggcagagaaggcgttgaccgccatcgactttcttctccgtaacgttacccctgacgcccaggttccatccttgctgaaggatacagaggcgggccagcagcttcaaacgctgttcgtccgctacaaggaattgctgaagcagcagaattgcttggactacgggtccatcttgtacttctgcgaggagttgcttcgcgaacggcctcgcgttagcaagcagcttcggacggtgtatcggtttgtctgcgtggacgaatttcaggacacaaatgcagcgcagtaccgggtgcttcgggtcttggttcccgacagggacgccaacgtcttcatcgtcggcgatgacgaccagaccatatatcaatggaacggtgcgagtccggcccgtgtgaaggaactcgagcagcactatgacttgaccaccattcagctcccggaaaactacaggtgccccccagaagtggtggcgcttgcgaatgcacttatcgtccacaacggtgagcggtcgccggacaaaaaaccgttgctcccgatgaaggttggctctggcacgaaccctatccagcttctgtcgtttgaagatgaccaaaaggaggcagagggtattgctgaatgcgtggctgctcggctgaagaacggcgcacgtcctgccgatattgttgtcttggcgcgcgcaaccaagctcttggagcgggtccaaagggcgctggaggcgctgtcagtgccgagccatgtccaacgacggaagtcacagttcgagagtgcgccgatgcggttcgtaatgtcggcgctgaaactggcgttggtgcggtccgacgacgatttggcctcgatggtaaccaaggctctgtccgactgcgtggagcaagactccagtgaagaggacctcgctggattttccgccgcactcaacggggaccaattggaggcgcttggcgcgctagtagctgacagtcccgccgtggctaaagagcttcaagacgctgtctcggtgctggttcagggacgatatgccgaattcatccaggagactctggcgtacttcgacgccgtcgaaagcgctggccgagacggagtagacgagcagtacgccgagtacacaacggagcgaaatgtttggcaaaacatcatccgtgagattggcggcgaggatgaggcttactcgttgtcattgggacagttcctccaagagcttgcactggcgaacaagaccccagaggctccctcaaactcagtccgttgcctgactattcacagctcgaaagggctggagtttctgcatgtttacttggtcggtatgtctgaagaccagttgccgtccttccaaagcaagaaatcgggagacgatagtcgggagattcaggaagagcgccgcaactgctttgttgccattactcgaacgatagaaacgctgacgatgagtttcggtgaaaggtacaacggatggcgcaaggcgccttcccggttcctttttgagatgggcctgttggactcagggagcgaagcttga

SEQ ID NO: 79994 - DNA, 2301 bp, Burkholderia vietnamiensis
atgactgaaaaagcagctgttgtcgctcccagttcgggaagcattacccttcgattcttggagctctgccatttccgtcgactggggaaggttcaactggaaatcgacgaaaagacaaccattctcgtcggtgccaacaacagcggcaagacctctgtgctcgcagcattgcggcatttcctgtctgatggtgcagcgttcggcgccttcgacatcagcctatcgcagtggacgaagctgcgggaactgggcaaacaatgggaggagctggctgaggatccagcgacgtctgcagggaccgatgccaacgactggacggcccagctcgccacgctgttgtctgcgatgccgacgcttgacctttggttcaacgcggaggctggtatgtatcacttcgtggcgccgttcctgtccaagttcaattggcagggcggcgctgtcggtgttcggctacgcctggagccggcgaccgatgtgacctcactcaaggagctggcctggtcgtatcacacggcccgtctccccgtgaaagacatgggtaacgattcgctggcttggcccattgacctgcttgactactggttacgtgaacctttgaagatggggcaggtcagggcctacaagcttgacgcagagaacaatccgttggatgggaaggccgcctacaagacgcagatcttaccggccgacgccgcgcccatcgagcgcaagcatttggcaaagttgattcgcgtcgacttcgtggcggcgcaacgcggcctaggtggcgaagaggcggactctcgatcagcctctggtccccatcgcgtcggcatgttctccaatcaattgttgcaattcgctcggcgtcacttgaacgtggctgcgaccgggcacggtcaccgcgccgatctgatcaaggccgtagccgaggcacagaaggaactcgataagaagatccacgacgccattgctccctccgtggaggaggtcaaggagctcggctatccgggactgcacgaccctcaggaaatccgcttccggactcgcattcacacagcggacctgctcgaccatggcaccgcagtccagtacagcatgaagaaggattccgcagaggacttgctgccggaatactccatcggtctgggctaccagaacctccagtcgttgagctatcagttggtctccttcaagaccgctcgtttgaatccggaaaaaggctcgccgaccccggtgcaccttgtgatgattgaggagccggaggcccacctgcatgtccaagtgcagcgcattttccctgacaaggcgcacaagctcatcagcccgaccgacaaggacatggcagcgctgaagagccagttgctcatcagtacccattcgagtcacctcgcgcacgccgaggacttcgatcggcttcgctatgttcggcgtatcgccaaatccaaggaccacccgatgccgacaaccgaaatcgtcaaccttgggcaggtcttcggcagcgatgacgcgacgcgtcaattcgccgaacgctacttccgtgtgcaacacactgatctgctgttcgccaacgcggccatcttcgtggagggcgtggccgagcgcatgctggtgccgctgttcatggagcgtgactacgagtctctgaataggcgctacgtctcctttctggacatcggcggcagccacgcccatcggttgaagcctctggtcgagagcctgcgcattcccaccatcgttatcaccgatatcgacccggtggaagtgaaggtcggcgccaaaggccagtcggtccgggtggcggtggccaacactggccaagcggggctggagtgcggcaatgcaacgctgcgcaattggcatccgaagcgcgtgcagctggacgacttcaaagctcccaagccagaggacctgacatggaccgaggtggctgaatgcatggtacggttcgcctggcaattgccggttgcggaggctggcaacacttggccgagctcctttgaagattctctcatcctgagcaacatcgagtggttcaaggaattgtccgaagagaaggaaagcaaggacggaaagagggtaaagcccccgactggcgcgctgggcgcagccgcctcgacggtcgccgaggccaagacgcatcccgagctggcgagtgcactgcacgcgctgatgcacgactcctttagcaaaggtgactttgccgctagcatcttcgagaaggtcgccgctggcgagaccatcgcgtgtccgaagtacatcgcggacgccctcgcctggctgcaaacgcagctcgaaccgatcacggatgtggtgctatga

SEQ ID NO: 79995 - DNA, 1956 bp, Burkholderia vietnamiensis
atgagcggcgccgtgtttctcgagggcaacgaccgcgatgccggcgttgtcgaggagatttgtgggtatctgacgggacagccgccgcgcagcttcttccttttcgccggtgctggttctggaaaaacgcggacgctcgtcgaggtcttgcgtcggctgaccggggtggtgcctcacgaggccgggggcgtgctcggccgtcgcctgcgcttgggtggccgatccatccgtgttgtcacatttacgaagaatgcggtcgcggtcatcaacgggcgcttgggcagcaacgatttggtcagcgtctcgacgatccactccttttgttgggagctcattgacggctttgacgacgacatccgcgatgcgctcgttgcagtgaagaagatcgaactcgagaaagcacgtgagaaggctgccgccaaaaagcgcggtgtcagcgctaccgatctcacgaagttcgccgagattgaggcggagattgagcagttcagcaagattgagaagttcatctaccatccagaccggaacacatacgggcctggcgcgatccagcaccggcacgtcctcgacgccacagcctggttgttgctaaatcggccgacgctcaagaccatccttcgggaccgccatccgcttatcctcatcgacgagtcccaagacacgatgaaaggtatgctggacgcgctgatggcgctcgcggagctccaagactgtggactcacgctgggccttttgggcgaccaccggcagcgcatctattctgacggtcattccgacttgccgggcttggtgcccgacggttgggcgaagccggcacttcagatgaatcatcgcagccagcgtcgcatcgtcaccctcatcaacaagatctgggagtcaaagatgcagggccgcacgcagccggttacgggcgttaagcagtatccccggatcgagaagacgggcggtatggtgcggctgtttgttggggatgcgtccctgtcccccgaggagaagcgcgaccgtgaactatggtgcgccgaccagatgtgggcattggctcaggccgacgcctggaaggtcggcggctatcagctcctggcactggagcacaagctggtcgcagcccgtggtggttttctgagggtctacgaggcgatggacttgattgaccccaacgccgcagcgcccgtcggtagcggcgagaacaatgggccttcggctgcgcgcctgcttctggatgaactggcgcaactcgaggcctgcgtccgtcccgacggaacggttaacgaattcgcagcgaccgatgtgctcagacgctgcggaagcctcgaccacctgccgatcgatgcggtcaagcggcatgtccgaacggacgagatgctcaaggcgatccaagcttttgccaaggcgtgtgtcgaccagaagtcgaccgtggcgaacgtgatcgaacccatcctcgctgtaaacctgttcgaagtggatccccggctggcagagtcgtttgccgacaagtcggatcctcctgccccacctgttccccgtagggaaacagaaaccacgcaagcacggatgcgccgcggctggtgcgcactctttgctgcgccgtgggaagagcttggcaggtaccggcgttatctcgcgggcgactccgtactggctacccaccaagtggtgaagggctcggagttcgcgcatgtcatggtcgtgatggacgacagccaagcgggaggcttcctgatctcgtacgacaagctcttcggtggcaaagagctgagcgacacggacgtgtcaaacgtggatgccggcaaggaaaccaccattgatcgcagcctgcgcctgctgtacgtcacctgcagccgtgctagagagtcgttagcgctcgttctatggtcggcgcagccagccgcggcactcgcacacattagggataaaagtgactggtttactccggaggagattctggccattccgtga

SEQ ID NO: 79996 - DNA, 2301 bp, Burkholderia vietnamiensis
atgactgaaaaagcagctgttgtcgctcccagttcgggaagcattacccttcgattcttggagctctgccatttccgtcgactggggaaggttcaactggaaatcgacgaaaagacaaccattctcgtcggtgccaacaacagcggcaagacctctgtgctcgcagcattgcggcatttcctgtctgatggtgcagcgttcggcgccttcgacatcagcctatcgcagtggacgaagctgcgggaactgggcaaacaatgggaggagctggctgaggatccagcgacgtctgcagggaccgataccaacgactggacggcccagctcgccacgctgttgtctgcgatgccgacgcttgacctttggttcaacgcggaggctggtatgtatcacttcgtggcgccgttcctgtccaagttcaattggcagggcggcgctgtcggtgttcggctacgcctggagccggcgaccgatgtgacctcgctcaaggagctggcctggtcgtatcacacggcccgtctccccgtgaaagacatgggtaacgattcgctggcttggcccattgacctgcttgactactggttacgtgaacctttgaagatggggcaggtcagggcctacaagcttgacgcagggaacaatccgttggatgggaaggccgcctacaagacgcagatcttaccggccgacgccgcgcccatcgagcgcaagcatttggcaaagttgattcgcgtcgacttcgtggcggcgcaacgcggcctaggtggcgaagaggcggactctcgatcagcctctggtccccatcgcgtcggcatgttctccaatcaattgttgcaattcgctcggcgtcacttgaacgtggctgcgaccgggcacggtcaccgcgccgatctgatcaaggccgtagccgaggcacagaaggaactcgataagaagatccacgacgccattgctccctccgtggaggaggtcaaggagctcggctatccgggactgcacgaccctcaggaaatccgcttccggactcgcattcacacagcggacctgctcgaccatggcaccgcagtccagtacagcatgaagaaggattccgcagaggacttgctgccggaatactccatcggtctgggctaccagaacctccagtcgttgagctatcagttggtctccttcaagaccgctcgtttgaatccggaaaaaggctcgccgaccccggtgcaccttgtgatgattgaggagccggaggcccacctgcatgtccaagtgcagcgcattttccctgacaaggcgcacaagctcatcagcccgaccgacaaggacatggcagcgctgaagagccagttgctcatcagtacccattcgagtcacctcgcgcacgccgaggacttcgatcggcttcgctatgttcggcgtatcgccaaatccaaggaccacccgatgccgacaaccgaaatcgtcaaccttgggcaggtcttcggcagcgatgacgcgacgcgtcaattcgccgaacgctacttccgtgtgcaacacactgatctgctgttcgccaacgcggccatcttcgtggagggcgtggccgagcgcatgctggtgccgctgttcatggagcgtgactacgagtctctgaataggcgctacgtctcctttctggacatcggcggcagccacgcccatcggttgaagcctctggtcgagagcctgcgcattcccaccatcgttatcaccgatatcgacccggtggaagtgaaggtcggcgccaaaggccagtcggtccgggtggcggtggccaacactggccaagcggggctggagtgcggcaatgcaacgctgcgcaattggcatccgaagcgcgtgcagctggacgacttcaaagctcccaagccagaggacctgacatggaccgaggtggctgaatgcatggtacggttcgcctggcaattgccggttgcggaggctggcaacacttggccgagctcctttgaagattctctcatcctgagcaacatcgagtggttcaaggaattgtccgaagagaaggaaagcaaggacggaaagagggtaaagcccccgactggcgcgctgggcgcagccgcctcgacggtcgccgaggccaagacgcatcccgagctggcgagtgcactgcacgcgctgatgcacgactcctttagcaaaggtgactttgccgctagcatcttcgagaaggtcgccgctggcgagaccatcgcgtgtccgaagtacatcgcggacgccctcgcctggctgcaaacgcagctcgaaccgatcacggatgtggtgctatga

SEQ ID NO: 79997 - DNA, 1956 bp, Burkholderia vietnamiensis
atgagcggcgccgtgtttctcgagggcaacgaccgcgatgccggcgttgtcgaggagatttgtgggtatctgacgggacagccgccgcgcagcttcttccttttcgccggtgctggttctggaaaaacgcggacgctcgtcgaggtcttgcgtcggctgaccggggtggtgcctcacgaggccgggggcgtgctcggccgtcgcctgcgcttgggcggccgatccatccgtgttgtcacatttacgaagaatgcggtcgcggtcatcaacgggcgcttgggcagcaacgatttggtcagcgtctcgacgatccactccttttgttgggagctcattgacggctttgacgacgacatccgcgatgcgctcgttgcagtgaagaagatcgaactcgagaaagcacgtgagaaggctgccgccaaaaagcgcggtgtcagcgctaccgatctcacgaagttcgccgagattgaggcggagattgagcagttcagcaagattgagaagttcatctaccatccagaccggaacacatacgggcctggcgcgatccagcaccggcacgtcctcgacgccacagcctggttgttgctaaatcggccgacgctcaagaccatccttcgggaccgccatccgcttatcctcatcgacgagtcccaagacacgatgaaaggtatgctggacgcgctgatggcgctcgcggagctccaagactgtggactcacgctgggccttttgggcgaccaccggcagcgcatctattctgacggtcattccgacttgccgggcttggtgcccgacggttgggcgaagccggcacttcagatgaatcatcgcagccagcgtcgcatcgtcaccctcatcaacaagatctgggagtcaaagatgcagggccgcacgcagccggttacgggcgttaagcagtatccccggatcgagaagacgggcggtatggtgcggctgtttgttggggatgcgtccctgtcccccgaggagaagcgcgaccgtgaactatggtgcgccgaccagatgtgggcattggctcaggccgacgcctggaaggtcggcggctatcagctcctggcactggagcacaagctggtcgcagcccgtggtggttttctgagggtctacgaggcgatggacttgattgaccccaacgccgcagcgcccgtcggtagcggcgagaacaatgggccttcggctgcgcgcctgcttctggatgagctggcgcaactcgaggcctgcgtccgtcccgacggaacggttaacgaattcgcagcgaccgatgtgctcagacgctgcggaagcctcgaccacctgccgatcgatgcggtcaagcggcatgtccgaacggacgagatgctcaaggcgatccaagcttttgccaaggcgtgcgtcgaccagaagtcgacagtggcgaacgtgatcgaccccatcctcgctgtaaacctgttcgaagtggatccccggctggcagagtcgtttgccgacaagtcggatcctcctgccccacctgttccccgtagggaaacagaaaccacgcaagcacggatgcgccgcggctggtgcgcactctttgctgcgccgtgggaagagcttggcaggtaccggcgttatctcgcgggcgactccgtactggctacccaccaagtggtgaagggctcggagttcgcgcatgtcatggtcgtgatggacgacagccaagcgggaggcttcctgatctcgtacgacaagctcttcggtggcaaagagctgagcgacacggacgtgtcaaacgtggatgccggcaaggaaaccaccattgatcgcagcctgcgcctgctgtacgtcacctgcagccgagctagagagtcgttagcgctcgttctatggtcggcgcagccagccgcggcactcgcacacattagggataaaagtgactggtttactccggaggagattctggccattccgtga

SEQ ID NO: 79998 - DNA, 1788 bp, Burkholderia vietnamiensis
atgagaatatcgaagatacgaattgtcaacttcgccaatttcgcgaatcttgaggtcgagaccggcgggaacatcgtgattgttggcgagaataaggttggaaagagcaattttctttgggcgcttcaattagtgcttgacccagggctttccgagcttgaccggagacttggcctcgaacacttctgggacggcctcggggagaacaaactcggcgcaactgttgaagtttcggttgagctcacggatttcgatgacaatccggacctgattgcatgtcttgctgatgcaatagtttcgccagggccaccaacggttgcacgcttaacctacagatttcggccgatggcgagtctcgcgggaaaaccaccggagagtcttgcacagtacgagtacgtaatttttggcggcacggacgaaaacaatcctattggtacgtcgctgcgacgaagactgcctttggatgtacaagctgcattacgcgatgcagaaaaggacctgttgagttggcggcgctcgccgttacgcccgcttatcgaagaattgaccgaggaccttgacgctgacgcgcgcgaagaaattttgcagatggtgcgtgaggctcagaccgaactcgcagaccgggacgaagtggtttctaccgcggagagaattggcaaacgactactcgacatcgttggcgacaaacatgccgtcccaatcaagcttgggttggcgccgacgcgagtagacgcactgctgcgcgggctgcgcatccttattgacaatggagcccgtggagtctccgatgccagtctcgggaccgcgaatctgatatttctcgccctgaagagcttggagcttgaccgtctggtggtcgagggcgagcggaatcacacgttcttcggcattgaggaaccggaggcgcacctgcaccctcatgtacagcggctcgtatatcgatactttcttggcgtgaacgccgcgccggcccagcagcctcgcagcctttcgacgatactgacaacacactccccccatatcgccagcgttgccccgctccgttcgatagtattgttgcgtaaggatgtcatgcaaggtgcgaccatcgcaacgtcgtcggccaaggtgccattggaggaacgcgaagtctctgacttacaaagatacattgacgttactcgaggagagctcttcttcgctcgaggcgtgatttttgtggaaggtgacgcagagcgattcctaatccccgcttttgccgagaagctaggaatccacctcgacgtgctaggtatttcagtctgctccgttagtggcgtcaacttcacaccttatgtgaagctcttgagcacgcgaagcctgcatataccgcacgccgtcatcacagatatggacccgacggaagggggcgagcctctcgccattaggcgcatttcaaagatgttgcaagcccggaatggaccacctactgcgccagggctgacgaatgagagaattattgagcttggagaagccagcggtttctttgtgaacgagaatacgctcgaaattgatgttttcaaggccggcctggggccggctatgtgtgatgtattagagcaagaaatatccttcaacgataaatctaaggccatcattgatacttggcggaaggacgcaggaaaattggatggagaaagattcttgaaagccgtcgagagggtcggcaaggggcgcttcgcgcaggcgctcgcacctcatatcacgtctgccgcttgtccctcatacattcgcaaagcactcgagtacattcgcaatgccgtctcgtaa

SEQ ID NO: 79999 - DNA, 1332 bp, Burkholderia vietnamiensis
atagccgatagaaccttgccggcatggcacgccaacgaggaattggctgcgctggccgagttgtatgaaattgagctacatagagtcggattggtcgacttcgaggacctagtgcgatacggcacacgccttgttcgtgagcacgattgggtgcttcccctcatccgcgcaaagtttcctgtccttgcagtcgatgaatatcaggacctcggggcgtcgttgcaccaaatcgttaagcgcctggcattcgatggtggcgttaggttgtttgcagttggtgacccggaccaatctatttatgggttcaacggtgcagatagcaaattgttagaggagcttacgaataggaaggatgtcgaatcggttcgcctcgaaataaactaccgcagcgctgagcatattgtccgggtggccgagcgtgcgttgggcgaaccgcgcggttacaaggcctttgacgaaacgaggagtgcgcgggtagtaatggtgaagtgtccagatggactcgcttcgcaagctcagcatgcggtgtcgaaaatcgtgcaagaggcgcttgctagcaagccgggtcgccagttgggtgatatcgcaattttgtaccgtactgcggagctcggcgatattgtcgcggaagccgcgaccaatgaagggctcgatttcattcgcgtggacaatgctgctccctacaggaaatgcacattgacgagctggatagaggattgtgcggcgtggtgttcaggtggctggggcgaagccaaacctagattgcagtcgcttctttctcgttatgcttcgtttcggcgtcgcccgcctgatgagcgaaccattcgggaagagtctcgtcgactgaccgagtttctctggaatcgtcgcggcaacggggtagcactagatttcgtgtcggctcttaggacagaaatgctcgacgccatggcggcgacggaagcgacgttagccgaccaaatggcccaagtaaatgcgatgagcaaggcgctcgcgaagggaggcgccattcatgggcttgatatggcgcgtcttggtggacgagatggctctcccgaccacctaaatcttttgaccctgcactctgccaagggttgtgagtacgatgttgtcgtcatgcttggactcgacgagggggtgtttccttggagcaatgaagaaggtgcaaccctagcagagagtcgtagattgttctacgttggactgacgcgagcgcgcgacgcggttcacatgctttactcgggctggacggtgaacaaatacggacggaagttctataatggccgctctcgatttttagacgagctcgcagggaggaaggaaggaggctag

SEQ ID NO: 80000 - DNA, 2100 bp, Burkholderia cepacia
atgcgcattgaaaaggtccgagtcgaaggattccggttgcttcacgacgttgaaatcatgctggaatcggattccacggtcatcgtgggacgtaacaacagcggaaagacgtccctcaccgatatcttcgatcgtttcacaggtgaaaccggggcacgcttccgactggaagacttcgcggccgcgtcgcgcagcaagtttttcaatgccaaggcattgagagaaaagaacgctaatccggaagaaatactcgccgcacttcccaaaatcgtacttacgctcacctttgcctacgacagtgccgcgccgaatctgggccccctcgcaccatttgttatcgacctggacgtcgcgtccaccaaagcgattgtgcgcgtcgagtatggtccgacgttggcgacactccacacgctactcgatgtaccgcctgcaacggaaggtaccaaaccgaatcagcactttctccgctcgctgcgtgagacattaccgaaggcgtacggcatccacgtttgcgccattgatccgacagacgataccaaccgacgcgattttgagggaacggcagcgctagcgtctttggtccaatgcaacttcgtgcgcgcgcagcgcactctcgaccatgccaggcacggcgatgccgatgtaattggcaaattgctaagcacgctcttcaagactgccaccgcaccaacagctgcggccgcggatcaggaacttgccgcgaagctgaaggcatccgttgaggacattgaacggaatgttcaagaagatttcgatgagatgcttaagaatctgctgccggccatggaagtgttgggcttcccgagcctcaacgatacggagcttcgaccggaaacctcattgaacgttgaagcgcttctttcggaccacaccaaggtcgtctacaccggcgcggacggagtgcatttaccagagggctataacggcctgggcactcgcaacctgatctatatgctgttgcagcttgagagcttccataagacgtaccgcgcgaaggcaacccgccctgtcacgcacctcatttttatcgaagaacctgaggctcatttgcaccctcagatgcaggaagtcttcattagccaattgaatgcagcgattggcaaactgtcggcaagttaccccgaagagccagcgtggaaagtccagttcgttatttcgacgcattctccgcacgttgcgaatgctgcgtcgttcgaggcggtacggtatttcctcaatgatccaacggacaaggcgagcacccggcacaccaaggtcaaggatttcaagaaagggatgactgccatccccactgacgatcaggacttccttcaccagtacatgacactgaccaagtgtgacctctacttcgcagacaaagcgatcatggtggaggggacaacggagcgcctgctgatgccgcgcctatgctccctggtcgatgagacgctcgacgacaagcataagctggccagacagtacgtgacctgtgttgaagtaggcggcgcctacgcccacatcttctatcccctgctcgatttccttgagctcaagacgctcgtgattactgacctggactcaaccagactcgtggaaaaggagaacaagcagggaaagaaaattaagacgtgggagaagtgcccagtctctgaaggtgaacgaacctcgaatgcagccattaaagaatggtttcgacccacaggcgagaaaaataaagacgattggcagatcacgcctgccgagcttctggccaagacggctgcagaaaaacagagtggctaccgcagaattacctaccaagtcgcggagaccgccgactcgaatgtgtgtgcccgcagttacgaagatgcgcttgtccttgcaaacccggaccgatttgaatggccgaaagaacaggaggaggccactgaggcatgggaaatcgcacaagggctcgccaaggcggataccgcactgcgctttgcaattcgtgagaaggattggacagtaccgcgctatatccgggagggtctcgtgtggctctctgaaccgccccctgctccagaggtaccaccacctgcagatagtccggatgcgccagccactacggaggtcgcatga

SEQ ID NO: 80001 - DNA, 1734 bp, Burkholderia cepacia
atgattgagtccaccgaaaaccccgccctcgttgccgcccgggtagcgcaaaagaagatcgatgaggcccttgatgcaggtcgcagcttccgccttgaagcaggtgccggcgctggaaaaacatactctctggttgccgccttaaagcggttgattgcagagcgtggaccaacgttggttcaggcgggacaaaaggttgcctgcataaccttcaccgaggttgcacgaaacgaaatcgcacaggagattgaggatcatcctgcgattctggtcgataccattcacggcttctcatgggcgttcctacgccagttccagaaggcgttacgcgacctcgtctcggaaatggaggaccggcgtgagaagatcaaccaaggtgggggtgtaggtgcaaagtccgtagactacgaattaggattcttcggcgtcgacaaagatcgaatcacacttggacatgacgacattcctgtaatgatggccacgctcctgcatcgggaaaaatttcgccacatattagctcagcagtttcccgtaatttttatcgatgagtatcaagacacacaccgccagttcatggaggcgattaccgagcatttcctggaacccaaagctggcccattagtcggcctctttggggatcactggcagaccatctatcgcagcgaatacgaactcgccgcgtacccgattgaagaaattggcaagggttccaacttccgctcagtgcccgtcattgtggatgtactcaacaagcttcgccccgaactggcacaggctgttcgcgatcccaacgcgatcggtgaagcaaggttttttcataccaacgcttacaaaggtcagcgaaccaacgaaccacattcgaaggaggaccttccgcctgaactggcacgcagcactcgcgacagcttgatgaaacgacttcaggccgaaggctgggaattgagcaaaaccaagatactcatgctcacccacaatgtcctggccgcagagcagggttaccccaacattgccgagatattcagcggccggaacgacttgtttgcaaagaaggaagatccagcgatcaaattctttgctgaaaccgtcgagcccatgtgcgaagcctatggtgcgtctcggtatggcgacatgtttagagcgttcggctctggtcctgccatcacggcgcacaaggacaaagcagcctggcgtgcggatatggacgttctgcaagagctgcgggccgaaggaacaatcggacaagtcattgatcacttgaaaaactcaagacgaccttcactgccggatcgcctgttgcgtcgtgatgaggaacttgccgcgcttaacggcgagcctgtagcggatgacgccacggcccttcaacgctacagcagactccgaaacgttcgctacaacgagatcgtcgagctggtcaaatttgtcgaaaaacagaccccgtttgccacacagcatagcgtcaagggcgccgagtttgagaacgttctagtcgtgctcggcggcggctggaatcactacaactggcctcaactactcgagcttcttgaaacaaaagcgctaaatgcaaaaaataccaaaggcttctatcgggctcgcaatctcttctatgtgtccatttcacggccaatgacacgacttgcggttctcgccacgcaaaccttgtcagatacggccttgactaccgtgaacaatcattttgggaaggacaacgtagaggaacttgctgttcctgcgtaa

SEQ ID NO: 80002 - DNA, 2355 bp, Burkholderia thailandensis; identical to SEQ ID NO: 71708

SEQ ID NO: 80003 - DNA, 1920 bp, Burkholderia thailandensis; identical to SEQ ID NO: 71709

SEQ ID NO: 80004 - DNA, 1872 bp, Burkholderia cepacia
atgccaacctatgcgccagaaagcggtgtcgctattaccgatgttcgtgtcagcaattttcgttcgttggccaacgtcgaggtcgaactcaatgacttgaccgtgctcattggagcaaacaacgccggaaaaacaagcttccttgacgcgatgtttgcggctattggctccgggcgcaggctgttgggacaagatgacatccggctgatgcacggcgaggcgatgccgccaaaagaccggcgggtttgcgtcgacattcggattcgccccgtcgacgaaaacggaagggtcgtcgacaagttcccggagggtagcttctggactgctttgtgggggcccggcatcgtgctggacgatcacgattttgatgagttcatggcctttcgtacgacgctggcttggcgtgccgaaaaagcggactatgtcgtcgaaaggctctttcttaaggaatggaagccgtttgatgagtggattgacacgccgacgcaagacaagccaatcacggcggcacaactcgaacctgtcgccttgcattacatcgatgccaagcgcgacctggaggacgacttgcgccgccaagggtcgttctggcgacgaatgaccgaggatctcggcttgtctggcgacgaggtggccgaactggaggctgctctgaccgggatcaaccagcagatcgtagacaagagctcgatgctccagcgcctgaagacgaacttgtcggatttgcaggcggtggtttctgccgatagcgcaggtatcgacattgctccggtcgcgcggaaactgagagacctgtcgaaaggcgtcgacgtgtcgttctcgactgcgggggcgcagtcgttcccgctcgcgcgccacgggatgggcacgcggagcttggcctctctgctcgtcttcagggcgttcaccgcttggcgcggggacgtggcagcgaagaacaacgataaattgcattctgttctggccttggaagaaccagagtcgcatcttcatccgcaggcgcaacgatcgctgttcgcgcacatcaagaaaatcaaggggcagcgcgtcgtcagtacccattcaccgtattttgccggccaagctcaattggaggaccttcggctcttcatcaagaagggcggagacacgggagcgcgtaagcttgacttgtcgaagctcgagaaggccgacgatatccgcaagttgcaggagacggtcatcgagtcgcgaggggacatcctctttgcgagggccgtggttttgttcgaggggcagacggaagagcaggcgctgccgatttgggcggaagcctattggggggcgtcaattcacgaattggggtttagctttgtacgggcgaacggaaccgactacttcccgttcatctggcttgcaaagagccttgaaatcccttggtatgtcgtgggggacggggagcagaagccgatcaacgacctggaggcggccttgaagaaggcggggcagcccaacatcgcttcatctcccaacgtcgttgtcgtatcccctggtaaaaacttcgagacgcagttgttggaagacggctatcttgccgaaatcgaaacagctcttaacgaagcgcacggtcgggagtccttcttggacgaattcatcgacaagcatcatgggttggaattggcgaagggaaagggcgtcagagactacaagagcgatggaggtagagctcgcgccgccgctgatgccatgaaagcttcaaaaacacgcctcgctaagccgttggcccgaacgatctctggcttgaaggacccggagagacgctttccgaagcacatcgagaggttgttttcggtcatcggacagaatcacggaattcaaaagctggcagtagaggcggaggtcgaggaacaatga

SEQ ID NO: 80005 - DNA, 1827 bp, Burkholderia cepacia
ttgcgcctgtcgatgctgcaagcccaggtcgtcgagcatgtcgacggcgcgttgcttgtggtagccggtccgggctccggcaaaacccgcgtgctgacggagcgagtccgctcacttctcacgaatgttcctggtcactttcgtgtgctggcgctgacgttcaccaacaaggccgctgacgagatgcgcgatcgcctctctgacttgggtgaaaatcggcaacgcgcgttcattggcaccctccacagcttctgcttggaaatgctggtggagcgagggaagcttgtgggcgtggaaggcgagccgcacatctttgaacagcataaggaccggaaggaagttttgctggaggcgattcggcaggaccccgttcttgacgaggaactcaatcagatcgtcgatcgtaaggagcgaaacaggcgggtcgacaactggcttcaaatggtctcgcgcgtcaaggcgcatcccatcacttgcgcggtactcagtgatgaactcgacaagcgagtcctggacgcctacgacgctgggctgcacgcctgtggtgcgtacgatttcgatgatcttttgctgcttggttaccggctgctgaccaacaatccgaagctggcggatttttatcggaggctatacaggttcgtgtgcgtcgacgaggcgcaggatctgaacgaagcgcaatacgcactgctttgcgcgctgtgcggagactcctataaaaacgtcatgatggtgggggatccaaaacagtcgatatatgggtttaacacctcaagcccggaatacatggagaaattccggttcgagttcgcagcgaagctgatcgagctgactgagaactttcgatcttcgcgggcggtggtgaacgttgctcgctccattgatccgaattacctggtcgacgcacagcttccgatcaagggaggcgcgcgcgtgttcgttggagatgacgaagagcacgaggcgcggttgatagttgacgagcttgagctgctgtttgtccaaggacacccggatgttgagggaggtgttgagccatcgaaatgtgcgattctggggcgaacccgtttcgccttgctcgcaatagagaacgagctgcgccgacgtaccgttcccttttacaagcgattgaccgctaatcacgaaaacgaatccgaccttgtcgacgagttccagctgtcgttgcgagtcctagcaaatcctagagacaggcttcattgggctgcgttggcaacgaaatggatgacgcggccgccagaatcggtaacggacgccatggtcgcactgtcgcagatggcgcagagtgcggccgagcagcgagccaaggcagtggcagaggcggttgcttcgattgttcagaacaccgcacgcctggaccttatgccggcattcaagttgttgaggagttatgctgactctctggacgagaatactaggcgcgcgatctatgaggacgtagccgtcttccagcaagaatgggatcaatatcttcgctcggacgggacgtcgcgtacattgtccggatttatgagcagcaaggcgttaggtgctacgcaaaaggctcaccgcgatggcgttgctctgctaaccgttcactcgtccaaagggcttgagttcgatgtggtgtttgttgcagggatggcggaagggacatttcccgactatcgggcgattggccgagtgcgtgagatggctgaagaaagccgaaatgcatttgttgcggtcacacgatcaaagcgtttgctttacttgacttatccccgagttaaactcatgccgtggggggattatcgtgctcaacaagcatctcgattcattcccacgtcctga

SEQ ID NO: 80006 - DNA, 1776 bp, Enterobacter cloacae; identical to SEQ ID NO: 79718

SEQ ID NO: 80007 - DNA, 1899 bp, Enterobacter cloacae; identical to SEQ ID NO: 79719

SEQ ID NO: 80008 - DNA, 2316 bp, Enterobacter asburiae
atgcatttgagaaagctggcagtccgtaatttcagaaggctgcacgatgttgttatcgatcttgcgtcagacatttcaattttcgtaggggcgaataacagtggtaagacttctgtcggtcatgcacttcaactattcaccggtaaaagccgattcaatattcatgacttcaatgctgaatgttggactgacattgtcacatttggagaaggggcggatgctgcgtcgctaccttcactggaacttgatatttggtttgaagtaacaccgaatgatgttcatcgtgtagtcgatcttctccccagcctatcgtggtcaggttctctggttggaatgcgcgttgctttttcccccatcaatcctgaagaaatccgttcgcgtttcctcgcagtacgtcagcttgctatcgatgccacacctaaagatgaaaatggaactcccaaatacgatccttcacctcgtaatctttgggaatatcttcgcgatagactcaatgacgaatatgaactccgctattttgttcttgatcccgcacgtttcaatgcggaaatgatatccgaggaaggctatgagcctactccgctcacagggcgtgatcgaagtggtcgcgaaatactgaacagccttatccaaatcaactttttgaatgctcagcgtcatctttcagatggttccggaggttcccgttcggaagatctttctcgtgttctcagccgtttttacggacgaaatcttgaacaaaaaggtgaagattacgaagcattaattgctttagctgcgtctgaatcagctttcaatcagcatcttgaacgtgtttttgcacctacgctgaaaagtctggcgaaactcggataccctggactttcaaacccacgcatgatgattcgttcggccttagacccggcgcagatcatgaacaaccaaaatggggccgtaatacattacgcgctgggggaggatgacggtaatcctaccccaccaacactacccgatagttataacgggcttggatttaagaatctgatctttatggttgttgaattactcgacatccacaaccaatggttagcaatagaagagaatcgaccaccggttcacctgatttttattgaagagccggaagctcatctccacgcacagttacagcaagcttttatacgcaagataatggaccttcttgccatggagagtcaggagcttatgcactacaccactcaagtggtggtgacttctcattcaactcatattctttacgaacgtggttttcggccgatccgttactttcggcggaagcgttcatcaaatatgtcagcaacagatgtgctcaatctctctgttttttatgataatactgatcctgaaattcgagactttcttgagcgttacttgaagctgacccattgtgacttgttttttgccgacggggctgtacttgtagaaggcaatgttgagcggctactgctcccgcaaatgattgctaccgccgcacctagattaaaatcctcttacctaacagtccttgagattggcggtgcttttggctatcgattccaaaaactaattgaatatcttgggcttactacactcattattactgatctggatagtgtgtactgtacccctccggtacaagatgcaacagaagctcgagcagatgagttagatgctcttgcagaaaatccggctgcaaatgatgatggcgaggaacctgatgatgaggaggaagaacaggccaacacagaaacaccaggaaaggcttgtattgccagtcatcctggagctatgacctctaatcaaacacttcggcagtggttaccgaaatgtgacaccgttgccgctttatgggaagcaactgaggaaatgaaaatacaaagccgcacagctgagtgtgacgctttggttcgtgttgcttaccagtgccagacagatgttacatggaaagaggaaacactggcgcttgctggtcgtactttagaggaggcttttgcacttgaaaatctgtcctggtgtcaggatgtgagctgtaagccactcaagctacgcattgccagagctgtaagtatggacctactacaactggcccagcgcattcacaaacgcgtgcaatcaaaaagcttcagtaaaactgattttgctctgaatttacttcttaaaaaaccggatgaatggtctgtcccaacatacattgctgaaggattaaaatggctcgaagctgaaatagccccgccggaactagaagttgcagaaggtcaggaagaggatgttgaggatatgtccgtcgctctggctgaaacagatggtgggagggttgcatga

SEQ ID NO: 80009 - DNA, 1878 bp, Enterobacter asburiae
atgaccagtcgcattggtagccctgatacacaggcagatattgatgttcgtacttgtctggatagctcgccaccacgttcatttgtcatggtggctggtgctggttcaggtaaaacaacatctctcattaaagccctagcacatttggctgatacccgtggttctgctttacgtcgtgccgggcaaaaaatatcctgtataacgtatacagaagtagctgttggtgagattgccgctgacgttggtaactcacagttatttcatatttcaaccattcatagctttctttggtcggtcatccgcccttttcatttagatatcgcaaagtgggtcgtagcgcgaatacatgaaaaaatagctgaaaagcaagcccattatgataagcccagaacacaagctaaaacaaaatctcgtcttgaagatgaaattgcctatctctctgctcaacttgagtgcattgatgatgttgataaatttatctacgggacaggaagtaactatgcgaagggtattttagggcacgatgatattcttaaactcgtccctgcttgtgttgaggctcatccacttttgagaaggattgtagccaagcgctttccatttgtttttgtcgatgaaagtcaggataccgatcctgatgtgatctctgcgcttcgaactattgccaatgacaatcctgacatgtgcataggattttttggtgatccgatgcagaaaatctatatgagcggagctggtgctattccgttaagtgatgggtgggctgaaattacaaaaccagagaatttcagatgtccgacgtctgtacttggtgttatcaattcgattcgtgcttctggggatggcctccaacaaattcgtggacgaacaactatcgtagatggtgttgaacagactgtatcaggcacagtgaatcttttcatcttgccttcaaatgtggaacgaagtgcctatctcacatctgtcagacgttaccttgcaaatgaaactagcgatgaacaatggctaagtgatacacgcgaaggtgatgttcgtctgcttgttttggtacatcgcatggcagctaatcgactgggattccctaatttattttctgctcttactgataaggcaccgatgagcttgagtgaaggggtgaacgatgggtcagcttggccgcttcgcccatttgtccagcatattcttccaatttttgaggcggctcaggcaaacgatcaatttcagattatgtcgattatgcgtaacgagtgcccaaagctggagccatcacgactgcatggtcaagctatggtggcagttttaaatgaactacaacgagacatcaatggtctgctcgcactgttagaagaaggatcgcaagcaacagttcgggatatattactacacgttagagactgtgaactgctacgtcttgatgatcgttttgataatcatttacgtgatgaacctgtgaatgatggtaatgatgattttgaaaatgttcagaactatctaagatgtgatgcccatgaactttgggcgtaccgacgctacctttcagaggaatcaccttttgccactcaccatggtgtaaaaggtgcacagttcgagcgtgtattggttgttattgatgatgaagaggctcgcttcagccaatattcgtatgggaaatattttcagtacattcccctgtccgacaatgatctagccaatcttgaagagggtaaagagtcagtactcgaccgcactcgtcgccttttttatgtatgttgctctcgtgcactgaaagacttggctgttgtcatctttgttcccgatgttgccgtagctcaatcggcaatcgttgggcaaaatttattcccagcgtcggtaattttaggagcgcacgatctggattag

SEQ ID NO: 80010 - DNA, 2313 bp, Enterobacter aerogenes; identical to SEQ ID NO: 74078

SEQ ID NO: 80011 - DNA, 1950 bp, Enterobacter aerogenes; identical to SEQ ID NO: 74079

SEQ ID NO: 80012 - DNA, 2310 bp, Enterobacter cloacae
atgtcagcagcagacgccactacatcattatctggacagatatcccttcggtttgttgagctttgccagttccgccgacttggtaaggtccagcttgagattgatcctaagactactattctcgtcggtgctaataatagcggcaaaacatcaattctggcagcgctgcgccacttcctcgcagatggctcgtcatttggtgctttcgacatcagtgtttctcaatggccaaaattgcgggaacttggaagagtttgggacgcattagaagaagacccgtctacgtctggcgcatccgaaggtgaatgggaagagcaacttggaaccttaatttcggcgatgccaacgctagatctatggttcgatgctaaggccggcatgttccactatgtctccccgttcttgtcaaaattcagttggaaggggggcggggtaggtgtccgattgcgtctggaacctgctacgaacattgaggatctgaagcagttggcttggaagtatcacctgacgagaatacctgtgaaggatatgggaaaggattcgcttgcgtggccgattgatcttcttgatttttggctgcgagaaccttctcaactcggccaagttcgggcctacaagttagatgccgataacaaccctttggacgggataaagacctacgttagccaggtactggatgctgactcaagcccaattgatcgtaagcatcttcagaaacttataaaagtagactttgtggctgcacagcgtggccttggtagtgaggaagctgattcccggtctgcttctggcacccatcgcataggtttattctccaatcagcttctcaaatttgctcgacagcatctaaatgtggcagcaacaggtcatgggcaccgagcggacctcataaaagctgttgctgatgcccagcaggaactagataaaaagattcatgaggctattggtccatcggtagaagaggttaaagagcttgggtaccccggcttgcatgacccccaagagattcgtttccgcacgcgcatacagacagccgaattactcgaccatgggacagctgttcaatacagcatgcagaaggattcactagaagagcttctcccggaatattccattggtctcggttatcagaatttacagtcccttagttaccaactagtttctttcaaagctgctcgcctaaatcctgaaaagggcgctcccgcacctgttcatctggttatgattgaggagcccgaggctcatttgcacgtacaggtacaacgtattttctcgggtaaggcacataagctcatcagtcctaacggtagcgatgagtcaggtcttaaaagccaactgattatcagtactcattctagccatttagctcatgctgagaattttgaccggctacgatatgttcgccgcgttgccaagagtgaagaacaaaacatgcctaccactgaggtggttaatcttgggcaagtttttggtgatgataaaacaacccgtcaattcgctgaacgttattttcgcgttcaacacacagatcttttatttgccaatgctgcaatctttgtcgagggggttgctgaacgaatgctgttacctcttttcattgaaagagattttgcaacactcaacagtcgctatctgtccttccttgatattggtggcagccatgctcatcggctaagagctctcgttgaaagactccgtattccaactgtaattattactgatatcgatccagttgaagaaagaccaggtaagcctaaaaaaaatggggatccgactacaaccttagttgctgtggctaatacaggacaacccggactgcaatgtgggaacccgactcttcgcggatggcaccctaagttgcaacagcttgaggatttcaagaacccgaaaaatgagcatcttgtctggaaagaaattgccgagtgttctgtacgttttgcatggcagttgcctgtagtcgaagctgatggtcaatggccaagtacttttgaagactctctaattctgagaaatatcccttggtttaagcaacttattgatgaaaaagtcgatggcgatgggaagcaaatcaaaccgccgaagggagcactgggctcagtagcaagacaggtcgctgaaaatgataatattccagaactgctcgcagctctgcataaattaatgcatggatcttttaataaaggagactttgccgcaagtatctttgaaatggttgctgcggatgagccgatagtctgtcctaaatatatcgaggatgcattggaatggctccagacacagcttgagccaagcaaggaggtgatgccatga

SEQ ID NO: 80013 - DNA, 1950 bp, Enterobacter cloacae
atgactaactcatcagcccttgacgacaatgatcgcgatgcaggggtagttgaagagatttgcggctaccttacagacataccaccccgtaactacttcctttttgcaggggctggttctggtaaaacacgaactttggtagaagttttgcgtcgccttactggtgtgactgagcatgagaaggggggacaattagcacggtccctgaagatgtatgggcgttcgattagagttgtgacctacaccaagaatgctgtctctgtaatcaacagacgtcttggggacaataatttagtcagtgtgtctaccatccattcgttttgctgggagttaattaatgggttcaacgatgacattcgggagtcccttatagcagtaaaagaagctcaactcgctaaagagactgcagaggcacaagcgaaaccgaggggtattactgcagcaaaacagcgtgaccttgacgaaatcacgaatgaaatcgaggttcttcggacaactgaagtattcaaataccatcccgatcgcaatacatatggacctggtgcactaccacacaattacgtactcgatgcgacagcttggttgcttcaaaataagccaacactccaatccattctcaaagatcgacatccaatcatattgattgatgagtcgcaggacacgatgaaaggtgtactggactccttgatggtgcttgccaaaaaaagtgagagagatttgactcttggtctgctgggagatcatcgacaacgaatttatatggatggtcatgccgatcttccaagcattgttccggaaagctgggcaacgcctgagttacaaatgaatcatcgcagtcaacgacggatagtcacactgattaataaaatctgggaaacagaacttgaaggcaggacacaaccaacaaagggttcagcacaacatccccgaacggaaaaagctggtggaacggttcggctcttcttgggggatacatcacgaagtccagaagataaagtgcttagtgaacgctggtgcgctgagcgaatgtttgaaattagtggtttagcagattggaatcaagggcaatatcagttgcttgcgcttgagcataagcttgtcgccactcgtggctcgtttcttgatgtctatgaggcaatggttctgttagatcccaacgctgcagcaccatctggcagtggggacaataaggggccttcaacagtacaaattttgcttaatgagctggcgcatttagaagcctgcgtcagtgatgaaggaatcgttaatgagtttaaggccaccgaggtttttcgacgttatggcggtttagacaatatgcctgaggactcagaatcaagagttgaacgtactgatgaaatgctcgaggcgatagcgatatttgcaatggcttgcgccaactctgagtcaacgatcgctgaggtgttagcgccagtcttgagtgcaaacttattcgaggttgatcatcgactcctagaggcttatgtcgacaagtcaccagccccgcaagctcctggacgtggtgaggatgagtcaaagcaaaccagaatgcgccgtggatggtgtgcactgtttgcgtctccatggaaacaacttaagtgctatcggaattaccttgctgggatttcagagctcgcaacacatcaggtagttaaaggctctgagttcaatcacgtcatggttgtaatggatgatgctcttgctggtgggactctcatcaagtacgacaaaatttttggtggtacgcagttaagtccaacagataaaaagaatgcagaggctggtaaggagacaacaattgaccggactttacgtttgctgtacgtgacttgtagcagggcgcaagaatcgctagctttagtgctttggtcgtccgatcctgctgcagcaatggctcgaatcgaggagagcatgtggtttactaaagatgaaatacaggtcattccatag

SEQ ID NO: 80014 - DNA, 1785 bp, Enterobacter cloacae; identical to SEQ ID NO: 75876

SEQ ID NO: 80015 - DNA, 1782 bp, Enterobacter cloacae; identical to SEQ ID NO: 73853

SEQ ID NO: 80016 - DNA, 1698 bp, Vibrio harveyi
atgtacatcaaaaaggtaacgatcaacaactaccgcagcttccgctttttcgaagcacagcttcaacagctaacagttgtcattggtgaaaacgatactggtaagacgaactttttcaccgcactttcgttaccgttgagcggcaaccaaatagacttcaaccagaagcgtttgagtgtgtctgatatcaacaaagatgccgttattgattttctcaagtctgttgtcgatgatgaagctgaagagaatcagcttacaaagatccctaaagtatccgtaaccgtagagttcgcagatccgaaagatgcttatgaaacagctctgttggctaagtggattgttgctgatggagacgaagaaacatacaaaatcagatacgactttaagcctaaagacgacaaagacttgcttgaggttgtaaagaaatcgctcgctggtaagactgtagatgatattaactggtttactctacccgttgagctttacgactaccaagtcgtatctgtgaacaacgaaaagcctatcgcatacagtgacttaaaacacgtcagtatccatagtatcaatgcagagcgagatgacttctcagaaagcagttcaatgaagtccaatagcattttcaccaagctgcttatgaacacattagacgatgacgacaaaggtcagatcaatacagcctactctgagttctttagtgctattgaaaagactgaaacattcgacaaagtcattgggactaatgacgattttaagaattacgacagtattatcaaacagcttgagtgcactcctaacctgcctaatttgaagaacatcttatcgaacatcactttgaaatacggtaatgaatttctgtaccaaaaaggcttaggacaacgaaatcttatctacatactcatcctgtttgcttactacaagtcatgtggtgatacattcaacttgtgctgtatagaagaaccagaagcacacttgagcgttaacaaccttcgtttagtaagagacttcattgagaaaagctcaagtaacagcggctcgcttgtacaaactatcatttctacccataacccatcgatcatcaacaagttgaagatctctaatgtgttggcgtttactggcgagaaagcaattagtctgtcagatactccacctaagctagttgactacctaagaaagagacctaacttcgacatcctaaagttgctgtttgcgaacaaagtcattctcgtcgagggtccaactgaagaaatgctgatcagcacttatttgtctaaacaaccagccctcaacgacattgatattattccaattggtcaacgtggttacgccactttcttagatatatggctcaacttgaacaaagataaccagaacaagaaaattggtgttgtccgtgattatgacaattctgatgccgcaaaagccaaacatgatgcttatgacacagcaaatacgaatgtcactgtaagaacaacaacgaactacacacttgagattgatttagtagaagcagaagacaaccttgctttgctaaatggtttattcggaatggaaggcgacctcgccgcagtatccgatcacatgatcaatggtaagactgcaagaatgcttgatgtatgtgatgcgatggttgatgaagagaacccactggatatcaaattaccggctcacatcgctgaggtcatcgaggcggtatcatga

SEQ ID NO: 80017 - DNA, 1371 bp, Vibrio harveyi
atgatagaagtacaaatcgctggtgcaggtgctgggaaaacttatggcttagcaaagactttgatagatcacatcaaagcttgtactagtcacaaaaagacatttgcactgacatacacaaactcagcaacaacaaagatagagcaagagataatcaaacaacatggctttattccgtcgaacctctgtatacagacagtacatagcttcttgttgaacgaaatcatctacccgttctcgtcattcactctcggtgatgtgtataacgacacatcaattatgatatcgaatcctaagtacaagaatgctctttttgcacgacttaaaaagattaatgtcattcatacagataatgtatacaacatcgctaaacaaattgttgatgaaaccaccagcaagcacaacaacagagcgaagaaagcaaaagtccgcagacttttggctattctaggaagctgctttgacaagatattcatcgacgaagtacaagacttagacaaagatgcactccgctttttcgacgttctaggatgcaacgatattgatgtgtacatgatcggagatccaaaacaagcaatcaagtttccccaagaccttgatgctttcgttcaaaaagtagctccaaaagaatacgcgaccatactacccatcaacaatcaaaccagacgagtacccacagagatactagcggtctcaaacagcttctgttatgaagatcagcaacaagagtcactatcagaaatggttggtgaactcatgtacattgaatcgacggacggacgatatgacgagctactaacaaactacttagatacaaaacaacttgtttgtatcgacaaaaagaatggtcgctatacaacttcgtctaaacacaaacacgcattcccacgagagatcgaggaaatgattcgtgattctaaccataagaaagacaaagctttgtttgttaaagcagctttttctgactttatggacgatgttgccgaagtcggtgcaagaactgcaatcaataggctaaaagccagtcatggcttgacacttaatggtcagcacttcgcccaactgtatgagctgtgtaattcttgcacgggaaatgacgttcaattcaaagtccaaagtatcgagtctatcaagggattggatgctgatgtgtgtgtaatcatacttagctctaataccctgaagtacctgacccaaaatggtattagcgaagcgagtcggtttaataaagaatggaaaaaagtttatgtcgctcttactcgtgctaagaagaggctggtgttggctttagatcacgagttactcgctaaagaagatatggcggctgttagagattctgtgggagcactaggattcataccccacgattag

SEQ ID NO: 80018 - DNA, 2112 bp, Vibrio alginolyticus
atgcatatcaaaagtttagaaatcaccaactttagaaaatttagagataaatctaatacaataacgtttgttgagccaactagtaaaaccgacgatgagtcaatgatttcatcttctactacactggttgttggtaaaaataactcgggaaaaacgacggttactcaagccttaaatatggttgtttcagagcaaggaaagatcaatggtcacgattttaactactcatatattgatggcttactcaatgactacctagaaggaaggtttaatcgatttcctaatattagttttaaaataacatttataacaaacccgaaagaagcatccttagtaaactctaaaaaagcaatatcactaggtcaaactacaaataaaaataaagatgtagatagtgttagtgaattttctttggtagtagattttcaattaaataataagataaagtttgaagaagatgtcaaagaacttttagataaatttcttactaaggacaggagttttaagtttagaaaattgttggatctgatttcagagtttaaatttgaaaaatttgtaaggtcagatgaaggagttgcaaagtcaataaatatttctagtcttattgagttgaaagtaatatctgcggctaataatattcatgataatagactcttgtccaaagcattcaataaaataataaaatataaatatcaaactgataagaatgattttgaagaggtaaatgatttaatagaaaataataataatggaattactacaaatatcagagagactcatgagtctgtcattcaaaacgtattacaaggtattgtaggtaccgatagtctagggatagatcttagggcagacctgacattcgacaaattaatggatggcttaattacatacgaacataaggatgcaggtttcctagttccagaaggtcagtttggattgggatatgcaaacttgattagtatcgtaagcgaaattattgactatatagaacgaaacccaagcggagaaaaaaccacaaaagttaggttgatctgcatagaagaacccgaaacgtttatgcatcctcaaatgcaggtgaattttattcgtcacattgataatgctgttagaaaaattataggcgaaggggaaaaaataaagagtcagttattaataacaactcactcttcacatatattaaatagtaaaatccattcaagtagtagtcttgataatataaattacatctatccacataaaagtttttgtgaaagtatttctattaaggacgaggatattagtattaagtcaggaaataaagatgaattttattttgttaagaagcacataaaacaccaagtcccagaactttttttcgcggatggtgttgtttttgtggaaggtattactgaagaaaggcttttaaatttttatattgaaagggatgagaagttatcaaaaaaactaatttctgtttttagagttgatggtgcacatgctaaagtttatgacaagcttatgaaacagcttaaaattccttctttgattataactgatattgactttaagagaagtaaagaagaattaactcaatcggctgaaacgaaagatggtaatcttgttagttggaatatatatcctcaaatgacagaaatattagacagtagaatgtcaacaaacaaaactctgtcatattattatgactctagcaaagttaaagactataaccattattatgagagcagcaatattaaggtggtatttcagaaagatccagtaaaaataaaattagacgaagaacatacagcggcttactatgcgactagcttagaagaagctttagttctcgaaaactatgacaacgaaatattcagaggtgttataaatagtactgtaccttctgtttattctgatgttgttcttgaagatacatgtgagtatttagatttagcacataactctttcagaatacaaaaggagctctcttctgcaaaatcaaagtttgctaataatataatatatgagcttgttgttaatgaggactcgacttcgctaccagtattgccttcttatataaatgatggtctccaatggttatcattaaggcttgatggccagccagagggagtctag

SEQ ID NO: 80019 - DNA, 2082 bp, Vibrio alginolyticus
atggttgatagagttctgttagaaaaagaggcaaaaatccaacaactaatctttgaccagttggatgaaaaaaaatcattttactttcttgctggagccggctcaggaaaaacatacgctcttgttgaaactctaaaatatagcattaaaaaaaatatgcgtgattttgacaaaaatggtagtcatctagcgtgtattacatatactaatgctgcaaaagacgaaataatagagcgtctatataatagtaattatatagatgttagtactatacactcatttttgtgggatattatagagtcatatcaagtagagctaattaaagtgcatagaaaaaatattattaatataattaataagttgcactacgagctatatgtttgtgatgaattcggaaagaaaaatgcgttcaaaaaaattagagctttaaactatgaagaaaccttagatcttgaaacaattgtagtggatagaattgatgacatctacaattgttttagggctgaaggagcttctaaattttggagtgagcttgaaggtgttataggtagtgaacttctatctaaaatacagtcctctagaggggatgtggaaaaaataatgagaaatataatcaagatttctagattgaaatattgcactagaatgattgatattgatcatcctgattattcttatatttcctataatgagaaaggaagcagagaaattcttcacaagaatttgattggtcatgatactctaatacaatattcattaagtatggtaaaagagtattcactgcttctaagagttatcatcgatacgtttccacagatctatattgatgaatatcaagatactcactctcaggtgataaaaattatggatatgttaatttcttatggaaaggacaataacatgccattttttgttggtttatttggggatccagttcaatctatatactctaataacgaatcttataattctattaacaatgaaattgatattatacataaagatatcaataggcgttcttgtcaaaatgtcgtggatatcataaataaaatacgagggaatcaccaagaaatacatcaggagccatttaatagcaatattaatggtgatgtatctttatcatactatggcaaagatagtgtagatgaaattccttttatttataatgaaattgaacaggttaaaacaagttgggggataacagaggacaataagttgacctgtatggttttgcgaaataaaactatagctcagctgtgtggatttggtaatctgtatgacttatatagtgaaatatacagtgataaatcgagttatctttcctataaccaaataaatgatgaagccttaaataaggatgttaataagttaggtatatttccactgtcagtcctaaatatagcagaacctttatttaagataaattatgatagttcggctcctctctccgatgttttcagtgatgagtctttagataatcattcattggatgaggtggcgacttgcttggattatatccgagataaggattatgtatcattaggtgacgctttgtcagacttgcttgtacagacttttgagaatacgagtttaacgagtttatactccgatttatcgaaaggatggatgaataacaaaagagataaaagagatataggttcaatcgacgatttaattacatacttatgcagttcaatctctagttctcctagtgatagcttacgagataatgttaaagctcttttatccatggacttgaaagaagtatttaactggattcgttttgtttcaggaattgagattgatagcaaagtcaactacataacatgtcatggctcgaaaggtttagagttcgataatgtccttgcagttatcgacgataagtttggaaaagatctaaaaaataagcctgagaagaataaattcagtaggctcctctcgtctggattacacgagaagcatgaagcagatttagaaaatacaaggaatctcctatatgtaatctgttcgagagcaatagagaacctaaaagtgatacttcttaaagagggggacggtcaaggagctatttctatagaatag

SEQ ID NO: 80020 - DNA, 1776 bp, Enterobacter cloacae; identical to SEQ ID NO: 79718

SEQ ID NO: 80021 - DNA, 1899 bp, Enterobacter cloacae; identical to SEQ ID NO: 79719

SEQ ID NO: 80022 - DNA, 2397 bp, Enterobacter cloacae; identical to SEQ ID NO: 75404

SEQ ID NO: 80023 - DNA, 1869 bp, Enterobacter cloacae; identical to SEQ ID NO: 75013

SEQ ID NO: 80024 - DNA, 2070 bp, Burkholderia cepacia
atgaagttgcgccatattaagatcaaaaattttcgtcttctctcggacgtcgaccttgcgttggaagatctcacgacagtcgttgtgggtcgcaacaacagcggcaagacctcgctctctgaagttatccgacggctactcgccgacggcaacgcgcagtttcaacttgaagacttctccagcgcctgctacgagggctttcgtctagcttgggaggctcggagcaatgacgaacacgacgatatcgtccgggcgctgatcccctacatcgaactgcgactgactttcctttacgatccgaatcagccgcaattgggaccgttgagtccttttgtcatcgacctcgaccctgactgcaccgaggcgcttgtggtcgtccgctacgagctgaaagacggtcagctttcccagctttttgatggtttgccgccgacgccgttgtctgccgaagctcgattaacgttctttcgcactttgcacgatcgaataccagccaattatgcgacgcgcatatgggcagaagaccccaatgacgctggaaaccagcgccagctccctcccaacgcagtgaagggcctggtcaaaacgggtttcatcaacgcgcaacgtggccttgacgacgtcacgtcacgagagtcagacgtccttgccaagactgtcgaacttcttttcgcaacggcgtcatcggcgtccgcagatgcggctgacaagcagatagcagattccctgactgaagccgtccaaggcattcaatcgcagattgatacaaacttcggtggacagctaaagggattgatccctgccttgaagagctttggctaccctggactaggtaatcaggagctgcataccgagacccttcttgatgtgcgaaagctgttgtccaatttcacgaaagtccgttacgccggctacagcggtgtcgcgttgcctgaatcgtacaatggcctcggtgcacgcaatctgatcttcatcctcttgcagttggccgggttctacaaagcctatcgcgccgaagcgacggccccaggcgtccacctcgttttcatcgaggagcccgaggcgcatttgcatccccagatgcaggaggtattcatccggcaactcgccaaaacggcccaattgctagtggacagtacggaagacaaaaccccctggccggttcagttcgtcgtttccacgcattcgtcacacgtcgcaaacgaagcgggtttcgaaagtatccgttacttcctcggacgagatgtgcctggagcgcaacccggcgtccggcaaacgatgatcaaggatctgcgcagagggctgggtggcgtttctgagcctgacaagaagttccttcaccagtacatgacactgacgcgttgtgatctcttttttgcggacaaggccattctggttgaaggcttgagcgaacgtcttctgttgccggtcctcgtcggaaaactcgaagaggctgagtccaacttcccaaagctgtccagccagtacgtcaccacgattgaagtgggtggcgcatacgcgcatttgttcttcaagcttctacacttcctcgagcttcgcagtttgataattaccgaccttgacgccgtagaaaaatcgggcggtttggcgtgcgaggtccacaaaggaacgtattcaagcaacgcttgtctgaaggcgtggttctcggatgacgacccgttcactctcgcaggacttttggcaaagggcgaggccgagaaaataagagagggcaatcgcgtcgcctatcaatgtgcggaagcggaaggcggtccatgcggacggacgttcgaggacgccttcatcctcgcaaatcgtgcgctgtttgggctgacgggcaataccaaggaagagttggaggttgccgctcgtagcaaggcaggagaattcaagaaatcggacttcgcactcaggtatgccattgaggagaaagggtggaatgctccgaagtatcttgtcgacggcgtgcgatggctggcggccggcatcgaacctgatcaggccgatcctgcgctggctttagcagcggacgctatcgttgcgaaggcggaggccgctcctcatggctga

SEQ ID NO: 80025 - DNA, 1737 bp, Burkholderia cepacia
atggctgatatccaatctccggccgaactggcgagtcaacgcgccctcgacgctatgtttcaatgcctggatgaagggcggagcttccggctcgaagcgggcgctggtgccggcaagacatattccctgatcaaggcgttgcaatatctcatcgagcgaaaccggcatggtttcccgaaaaagaatcagcagattgcgtgcattacattcacgaacgttgccagggacgagattgccgctcgtaccgacaagagcccattggtgtactgcgagaccaaccacgccttctgctggtccctaatcagcggtttccagaagcagctaaggtccctggtggaggcaatgccgcactggcaagagcgactagcagaagtcggcggcacgctcggcgcccgcatggtcgagtacaacctggggcaccgctcaattcgcgaggaccgtgtatcgatccaccatgatgatgtgctgcccctcacgatttccctgatggagcacctgaagttccgccggatggttgcagatcgctttcccatcattctggtggacgaatatcaggacactgacagtgattgggtcgaggcgatcaagcggctctttttaagcaattcggatggaccgatgttcggcttcttcggagatcactggcagaagatctatggcgatgggtgcggccggcttgagcacgagtccgtaacggaaatcggaaaggaggctaacttccgctcggtgaagacgatcgtggattgtcttaaccggatgcggcctgagttgcgccaggaagtcagggacccggattccgtaggccaagtgagcgtttttcataccaacggctgggaggggcaacgccgagccggtggacattgggccggcgaccttccggccgatgtcggtcaccaggcgcttgagcaggtcaaggagctactggcacagcaaggatgggatcttgcgccggggagcacgaagatcctgatgttgacgcacaggctgctcgcaacagagcagggctacacgaacctgccaaccgtttttcgctacaacgacgccttcaccaagaaagagcatccgcatattgcctatctcgtcgatgaactcgaaccggcctgcgacgcgtttgcggcaaaccggttcggagtgatgttcgaggcgctcggcggaacgacgccacttcttcgcagccacgcggacaaggcggcctggcacattgcaatgacccgcgtcctggaacttcgcgcgacgggcacggttggagacgtaatcgattatcttcttgatcaacgtaagccccggcttcctgaagcgatcgaaaagcgcgaacgcgaactacgcgacttcgatcggactgccggcgaagaaatgccggaaaggcttgccgaagttgaaagactgcgcgctgttccctacgcggagatttcagcattgcgggcgtacctggacggtcattcaccctttgagaccaagcacggagtgaagggtgccgaattcgataacgtcctggttgttatcggtcggggatggaaccaatataacttcggagaaatgctcgggttggctgctggtcaagcgattccggccgagagagaggagtctttcgagcgaaaccgcaatctgttctatgtcgcgtgttctcgccccaaacgacgccttgcattgctattcacccagctactgtcgccagtggcgatgggcacgctggaacaatggttctcgcccgaaagcattcacgccatcgtgctctga

SEQ ID NO: 80026 - DNA, 2226 bp, Agrobacterium sp. D14
gtgaaactaaaaaagctccagatcgaaaatttccgatccctcaagaaccttgaggtcgatctcgaagagtatctttcgataattgttggcaagaacaatgttgggaagacctcgcttctagtcgcattggaacgctttctaggtagctctcaatccagtttcgattttgaggatttcaatctggattttcggcagcatgtcgcagcattggccgagagcaagattcagcctgacgacccatatccgttttgtggcatcaggcttcgcgtcttcatcgaatattctgacgatgacgatctgggcaacgtcggtaacaaggtgatcatggacctcgatcccgataacaagtggatcgtgttggacttcctgtaccacctctcatcggagtatctcgaaatcttgcggcgggacttcaaggctcaccaagacaggaagaaagataaagcgcaggacgttctcaaattccttcgcgaaaaccacagagagtatttcaaggtcgccaggcgaagcgtgcaatttgatcacctcgatcagaaggttcaggaagatattttcgttgatctcatcaaggaatctatccgtatcgacgatatcatttcattcaagcgcatcgcggcgcgtcgttcggtttcaaacaaagagactgacaagacgctatcaacgatgtcgtcgagaatttactcagcaatgtcatccgacgcgggagatgaggaggttttcgacacgttcaaggaggcgctcagccatacggacgtccagttagacaccatctatggtaaactcttcaaagaggtcatcgatgatgtgagacgatttggcgggattaaggagggcgatacacagctgcaaattaggtcgacgttgcagcatcgtgaactgcttgaagacaacacaaccgtcatgtacgggcagggagcagaactgcacgtcctgcccgaaagctacaatggcttgggctacctaaacctgatcagcatgatcttcgatatcaagatcatccttaatgagttcaagcgaggaaataagccgaaacccgctgatatcaatctcctattcattgaagagcctgaagcccatactcatccgcagatgcaggcggttttcatcaagaatatcaagaacctcgtcggacggtccgtttcaaacgcggatggtattaagtgtcctctccagacaattctctcgacgcattcggcacacattgtggccgagtctgatttcgacgacatcaagtatttcaagaagtccggtggaaccactgtggccaagggcctgcgcgacttgcacgccatgtacaaggttgccgggaaagacggccattacaccttcctaagacagtatctgactctccatcgttcgcagctttttttcgccgacaaggcgattctagttgagggcgacacagagcgaatccttcttcccgcgatgatgcgcaaaattgaccaactcgacgaagcgaccgctttcgcagacactgaaatcgccccgctgcctttgatgtcgcagaacatctcggtaatagaggtcggtgcacactctcagatttttgaaatattcctcgacttcatcggcgtgaagacgctcatcatcactgacttggattcggccgtagagcggcagcgcatgaaagacggcaaccttgtaaccaacaagaaagggcagccagttattgatatcgttgcccacccggtggaaggcggaacccacacgaccaatgctgccctaagatttttcttcggagtcggctccgcgctcacatatttcctggagctggcgcttgaacacaagaccgtcaagaagaagccagatgccgtctgggctgcggaccccgctggcgaaatcatgtgcgcttaccaggttaccgagaccaacgcagagaacgaaacatactgcgctcggagctttgaggatgcgtttttccacgtcaatcgagcattcatgacatcggccagcgcggtggccgatgatgacgacccgccgaagtttccaagtctcaaacaaggggcactggccgaattcatcggtggcggcaagcccgatgtaatggctgataacggaattgataagaagccctccttcgccatcgagatactgctcaacagcgaaacgactaagctgacaaagacagataagggcggccaagcacgagatttcactcttgaatttagcaactggaacattccgaaatacattcacgaaggtctaagatggatcaaggcgggttga

SEQ ID NO: 80027 - DNA, 1872 bp, Agrobacterium sp. D14
atggatcaaggcgggttgaagctggagcctgaggtcgagcgtgttctcaaacatgtcgccgacggcaagaatttcctgctaagcggtggagctgggagcgggaaaacgtactccttggtccaggtcattggagagctgctgcggacccagccaagcgcgtccattgcttgtatcacctatacgaacgctgcggttcgtgaaatcgagtcacgcgtcgcggacgagagactggccgtcagcaccatccatgattttctctgggcagctatcggcccgttccaagccgagctgcgccttgttctgatcgatttgatgactggagatagccctcgcattaagcccgggagtatcgctgtttccgatgggatgtatgacggaaaaccgattgaatacaaggagttcagaatactagcagaagggatcatttcccatgacgaggttatcactctcgctcacggtgtgtttgaaaaatacccgaagatacgagaaatcctccgagatcgttatcggtacattctcgtcgatgaataccaggacacctcacccgacgtcgtcaaaatcctcctcgattttttgcccttggctcacaggaaaggcgtctgcggcttcttcggtgacagcatgcaatcgatctatgatgaaggtgttggatcgataaaggattatgtggcagttgcctctgtgatggaggttcaaaaggtccagaatcgccgaaatcctcgcctcgtgttcgagcttgcgaaccgcttgagatcagacgggatcgtgcagaaagaatctgatgacgaaaatgctccgaatatgcatgacggtgccgtgaaggatggatcaatccgcttttattacgcggcggacggaggcgacaaactcgatgccgtgcggaaaaccctcggatgggacttcaatgaggtcgctgggaccaaagagctgaacctgacgcacaatttgatcgcgccgcaggcggggtttggcgatctcatggaaatctacgacaaagacggggtgctcaaattccgtgacaggctcctcgatcatatcaaaggcaacgatgaccttaccaagtacgacgccgacacattcggcgaagtcatggccaagttcccgggagtggctccgacgcccgggatgagggattttatcgacgcccatccagactggctgacagatgcaaaaagctgtaacttcctggtattcaggcgcatgtatgtcgataaggaccaactcgtcgacgacaaaaagcaaaccgaggaagaggccgcacgcaagggctcacaacgatgcccgtttatcaagcacatcttcaaaatcctagacgtcgttcacctctataatcagcggaaattcaatgaatttctgaggcgtaccgagttcaagcttgggtcagcaaaagacaaggtgcagcttagggaatgtattaacgaaatcggggcgatgagcgaccgtccgattatcgaagtcatagattacgctgagaaacatggactggtccgcaaggatgacgctctcaccaattttgtgacccgcaagccctacctattcaatcgcgtgtcgccaataaagtgctcatcgtacctggcgctctatgagtatctcgaaggccgaacgacctactcaacgcagcataagatcaaaggacgagaatttgatcgcgttctcgtcgttctcgattctggggggtggaacaagtacaatttcacctatctgttcgagggtggcgggacagcctccgtccgcgagcgcacggaaaagctgttctatgtctgctgcacgcggtcaaaagactcgctcgcagtgtattttcgggacccttccttgaaggtcatagcaagagcgaaagagtggttcggtgacggaaatgtcatcgccgtttga

SEQ ID NO: 80028 - DNA, 2070 bp, Burkholderia territorii
atgaagttgcgccatattaagattaaaaactttcgtcttctctcggacgtcgaccttgctttggaagatctcacgacagtcgttgtgggtcgcaacaacagcggcaagacctcgctctctgaagttatccgacggctactcgccgacggcaccgcgcagtttcagcttgaagacttctccagcgcctgctacgagggctttcgtctagcttgggaggcgcggagcaacgacgaacacgacgatatcgtccgggtgctgatcccctacatcgaactgcgactgactttcctgtacgatccgaatcagccgcaattgggaccgctgagtccttttgtcatcgacctcgaccctgactgcaccgaggcgcttgtggttgtccgctacgagctgaaagacggtcagctttcccagctttttgatggtttgccaccgacgccgttgtctgccgaagctcgattgacgttctttcgcacgttgcgcgatcgaataccagccaattatgcgacgcgcatatgggcagaagaccccaatgacgctggaaatcagcgccagctccctcccaacgcggtgaagggtctggtcaaaacgggtttcatcaacgcgcaacgtggccttgacgacgtcacgtcacgagagtcagacgtccttgccaagactgtcgaacttcttttcgcaacggcgtcatcggcgtccgcagatgcggctgacaagcagatagcagattccctgactgaagccgtccaaggcattcaatcgcagattgatacaaacttcggcggacagctaaagggattgatccctgccttgaagagctttggctaccctggactaggtaatcaggagctgcataccgagacccttcttgatgtgcgaaagctgttgtccaatttcacgaaagtccgttacgccggctacagcggtgtcgcgttgcctgaatcgtacaatggcctcggtgcacgcaatttgatcttcattctcttgcagttagccgggttctacaaagcctatcgcgccgaagcgacggccccaggcgtccacctcgttttcatcgaggagcccgaggcgcatttgcatccccagatgcaggaggtattcatccggcaactcgccaaaacggcccaattgctggtggacagtacagaagacaagaccccctggccggttcagttcgtcgtttctacgcattcgtcacacgtcgcaaacgaagcgggtttcgaaagtatccgttacttcctcggacgagatgtgcctggagcgcaacccggcgtccggcaaacgatgatcaaggatctgcgcagagggctgggtggcgtttctgagcctgacaagaagttccttcaccagtacatgacactgacgcgttgtgatctcttttttgcagacaaggccattctggttgaaggcttgagcgaacgtcttctgttgccggttctcgtcggaaaactcgaagaggctgagcccaacttcccgaagctgtccagccagtacgtcaccacgattgaagtgggtggcgcgtacgcgcatttgttcttcaagcttctacacttcctcgagcttcgcagtttgataattaccgaccttgacgccgtggaaaaatcgggtggttcggcgtgcgaggtccacaaaggaacgtattcaagcaacgcttgcctgaaggcgtggttctcggacgacgacccgttcactctcgccggacttttggaaaagggcgaggccgagaaaataaaagagggcaatcgcgtcgcctatcaatgtgcggaagcggaaggcggtccatgtggacggacgttcgaggacgccttcatcctcgcaaatcgtgcgctgtttgggctgatgggcaataccaaggaagagttggaggttgccgctcgtagcaaggcaggagaattcaagaaatcggacttcgcactcaggtatgccattgaggagaaagggtggaatgctccgaagtatcttgtcgacggcgtgcgatggctggcggccggcatcgaacctgatcaagccgatcctgccctggctttagccgcggatgctatcgttgcgaaggcggaggccgctcctcatggctga

SEQ ID NO: 80029 - DNA, 1737 bp, Burkholderia territorii
atggctgatatccaatctccggccgagctggcgagtcaacgtgccctcgacgctatgtttcaatgcctggatgaagggcggagcttccggctcgaagccggcgctggtgctggcaagacatattccctgatcaaggcgttgcaatatctcatcgagcgaaaccggcatggtttccccaaaaagaatcagcagattgcgtgcattacattcacgaacgttgccagggacgagattgccgctcgtactgacaagagcccattggtgtactgcgagactaaccacgccttctgctggtccctaatcagcggcttccagaagcagctaaggtccctggtggaagcaatgccgcactggcaagagcgactagcagaagtcggcggcacgctcggcgcccgtatggtcgagtacaacctggggcaccgctcaattcgcgaggaccgtgtatcgatccaccatgatgatgtgctgcccctcacgatttccctaatggaacacctgaagttccgccggatggttgcagatcgctttcccatcatcctggtggacgaatatcaggacactgacagtgattgggtcgaggcgatcaagcggcttttcttaagcaattcggatggaccgctgtttggcttcttcggagatcactggcagaagatctatggcgatgggtgcggccggctggagcacgagtccgtaacggaaatcggaaaggagaccaacttccgctcggtgaagacgatcgtggattgtcttaaccggatgcggcctgagttgcgccaagaagtcagggacccggattccgtgggccacgtaagcgtttttcataccaacgactgggaggggcaacgccgagccggtggacattgggccggcgaccttccggccgatgtcggtcaccaggcgcttgagcacgtcaaggagctactggcacagcaaggatgggatcttgcgccggggagcacgaagatcctgatgttgacgcacaggctgctcgcaacagagcagggctacacaagcctgccaaccgtttttcgctacaacgacgccttcaccaagaaagagcatccgcatattgcctatctcgtcgatgaactcgaaccggcctgcgacgcgttcgcggcaaaccggttcggactgatgttcgatgcgctcggcgggatgacgccacttcttcgcagccatgcggacaaggcggcctggcacaatgcaatgacccgcgtcctggaacttcgcgcgacgggcacggttggagacgtaatcgatcatcttcttgatcaacgtaagccccggcttcctgaagcgatcgaaaagcgcgaacgcgaactacgcgacttcgatcggactgccggcgaagagatgccggaaaggcttgccgaagttgaaagactgcgcgctgttccctacgcggagatttcagcattgcgggcgtacctggacggtcattcaccctttgagaccaagcacggagtgaagggtgccgaattcgataacgtcctggttgttatcggtcggggatggaaccaatataacttcggagaaatgctcgggttggctgctggtcaagcaattccggccgcgagagaggagtctttcgagcgaaaccgcaatctgttctatgtcgcgtgttctcgccccaaacgacgccttgcattgctattcacccagttactttcgccagtggcgatgggcacgctggaacaatggttcttgcccgaaagcattcacgccatcgtgctctga

SEQ ID NO: 80030 - DNA, 2070 bp, Burkholderia ubonensis
atgaagttgcgccatattcagattaaaaactttcgtcttctctcggacgtcgaccttgctttggaagatctcacgacagtcgttgtgggtcgcaacaacagcggcaagacctcgctctctgaagttatccgacggctactcgccgacggcaccgcgcagtttcagcttgaagacttctccagcgcctgctacgagcgctttcgtctagcttgggaggctcggagcaacgacgagcacgacgatatcgtccgggcgctgatcccctacatcgaactgcgactgactttcctgtacgatccgaatcagccgcaattgggaccgctgagtccttttgtcatcgacctcgaccctgactgcaccgaggcgcttgtggttgtccgctacgagctgaaagacggtcagctttcccagctttttgatggtttgccgccgacgccgttgtctgcggaagctcgattaacgttctttcgcacgttgcgcgatcgaataccagccaattatgcgacgcgcatatgggcggaagaccccaatgacgctggaaaccagcgccagctccctcccaacgcagtgaagggtctggtcaaaacgggtttcatcaacgcgcaacgtggccttgacgacgtcacgtcacgagagtccgacgtccttgccaagactgtcgaacttcttttcgcaacggcgtcatcggcgtccgcagatgcggctgacaagcagatagcagattccctgactgaagccgtccaaggcattcaatcgcagattgatacaaacttcggcggacagctaaagggattgatccctgccttgaagagctttggctaccctggactaggtaatcaggagctgcataccgagacccttcttgatgtgcgaaagctgttgtccaatttcacgaaagtccgttacgccggctacagcggtgtcgcgttgcctgaatcgtacaatggcctcggtgcgcgcaatctgatcttcattctcttgcagttagccgggttctacaaagcctatcgcgccgaagcgacggccccaggcgtccacctcgttttcatcgaggagcccgaggcgcatttgcatccccagatgcaggaggtattcatccggcaactcgccaaaacggcccaattgctggtggacagtacagaagacaagaccccctggcctgttcagttcgtcgtttctacgcattcgtcacacgtcgcaaacgaagcgggtttcgaaagtatccgttacttcctcggacgagatgtgcctggagcacaacccggcgtccggcaaacgatgatcaaggatctgcgcagagggctgggtggcgtttctgagcctgacaagaagttccttcaccagtacatgacactgacgcgttgtgatctcttttttgcagacaaggccattctggttgaaggcttgagcgaacgtcttctgctgcctgtcctcgtcggaaaactcgaagaggctgagcccaacttcccgaagctctccagccagtacgtcaccacgattgaagtgggtggcgcatacgcgcatttgttcttcaagcttctacatttcctcgagcttcgcagtttgataattaccgaccttgacgccgtggaaaaagcgggcggttcggcgtgcgaggtccacaaaggaacgtattcaagcaacgcttgcctgaaggcgtggttctcggatgacgacccgttcactctcgcaggacttttggccaagggcgaggccgagaaaataagagagggcaatcgcgtcgcctatcaatgtgcggaagcggaaggcggtccatgtggacggacgttcgaggacgccttcatcctcgcaaatcgtgcgctgtttgggctgaccggcaataccaaggaagagctggaggttgccgctcgcagcaaggcaggagaattcaagaaatcggacttcgcactcaggtatgccattgaggagaaagggtggaatgctccgaagtatcttgtcgacggtgtgcgatggctggcggccggcatcgaacctgatcaggccgatcctgcgctggctttagcagcggacgctatcgttgcgaaggcggaggccgctcctcatggctga

SEQ ID NO: 80031 - DNA, 1737 bp, Burkholderia ubonensis
atggctgatatccaatctccggccgagctggcgagtcaacgtgccctcgacgctatgtttcaatgcctggatgaaggacggagcttccggctcgaagccggcgctggtgccggcaagacatattccctgatcaaggcgttgcaatatctcatcgagcgaaaccggcattgtttcccgaaaaagaatcagcagattgcctgcattacattcacgaacgttgccaaggacgagatagccgctcgtactgacaagagcccattggtgtactgcgacaccaaccacgccttctgctggtccctaatcagcggtttccagaagcagctaaggtccctggtggaggcaatgccgcactggcaagagcgactagcagaagtcggcggcacgctcggcgcccgcatggtcgagtacaacctggggcaccgcgcaattcgcgaggactgtgtatcgatccaccatgatgatgtgctgcccctcacgatttccctgatggagcacctgaagttccgccggatggttgcagatcgctttcccatcatcctggtggacgaatatcaggacactgacagtgattgggtcgatgcgatcaagcggctttttttaagcaattcggatggaccgctgttcggcttcttcggagatcactggcagaaaatctatggcgatgggtgcggccggcttgagcacgagtccgtaacgggaatcggaaaggaggccaacttccgctcggtgaagacgatcgtggattgtcttaaccggatgcggcctgagttgcgccaggaagtcagggacccggattccgtgggccacgtgagcgtttttcataccaacgactgggagggtcaacgccgagccggtggacattgggccggcgaccttccggccgatgtcggtcaccaggcgcttgagcacgtcaaggagctactggcacagcaaggatgggatcttgcgccagggagcacgaagatcctgatgttgacgcacaggctgctcgcaaccgagcagggctacacgagcctgccaaccgtctttcgctacaacgacgccttcaccaagaaagagcatccgcatattgcctatctcgtcgatgaactcgaaccggcctgcgacgcatttgtggcaaaccggttcggagtgatgttcgaggcgctcggcgggacgacgccacttcttcgcagccatgcggacaaggcggcctggcacaatgcaatgacccgcgtcctggaacttcgcgcgacgggcacggttggagacgtgatcgatcatcttcttgatcaacgtaagccccggcttcctgaagcgatcgaaaagcgcgaacgcgaactacgcgacttcgatcgaactgccggcgaagagatgccggaaaggcttgccgaagttgaaagactgcgcgctgttccctacgcggagatttcagcattgcgggcgtacctggacggtcattcaccctttgagaccaagcacggagtgaagggtgccgaattcgataacgtcctggttgttatcggtcggggatggaaccaatataactttggcgaaatgctcgggttggctgctagtcaagcgattccggccgcgagagtggagtctttcgagcgaaaccgcaatctgttctatgtcgcgtgttctcgccccaaacgacgccttgcattgctattcacccagttactgtcgccagtggcaatgggcacgctggaacaatggttctcgcccgaaagcattcacgccatcgtactctga

SEQ ID NO: 80032 - DNA, 2142 bp, Burkholderia ubonensis
gtgcacatttccaagctaacactcgtaaattatcgaaatttcgctaatgccacgctgcgattcagcaaaggcgtcaacacgattattggcgaaaatggcgcgggaaagaccaacgtactaagagcgatcagactcatgttggatgacaacatggtccgagcctcatacaagctcaatgagttggacttccatcggggacttggttcctggcgcggtcactggatcatcatcagcgtcgaattcgaggagatcagcgcagatgaggcgatacaggcgctcttcatacatggcacgggagttggacaggcgggcggggcggtaaggcgtgcaacgtataacctgatattccgcccaaataagcagatcagaatgaatctggcagcactcgcggactttgatgctgccggaatgaacgcgattcttgatcggataacgattgacgactacgaaactctatttacggggaagagcgttgccgattttgcggatccagcagtctaccggcgcattgtaggagactttggcaacgctgtatttagcaatgaagttgagtttccggagctgggttctcgcattccgggcacgctatcagtcaccaaggaggtgtcattcaccttcattcaggcattgcgtgatgtggtatccgagttccataacaaccggaccaaccctcttctcacactgctaaagagcaagagcggacagattgaccctgtgcagtttcagccgatcgtagatcgcgcgcggcaactgaacagagaaattgagaatctgaacgatgtgcgaactgttcgctccgacatcgcggagacgatccatggagctgccgggcagacctactctccatccttgctggcaatcaagtccgatcttccggatgaagcggatttgctgttccagtccctcaagctcttcgtcggtgagttcgatgcggcccatgagggcaacatccaggagctcagccttgggggcgccaatctgattttcctgacgctgaagcttctggagttcaagtaccagcacgaacgtcaggtgcttgcgaactttctgcttatcgaggagccagaggcgcacttgcatacgcacgtccagaagacgttgttcgatcgaatcggatacgccggggcgcagattatctactcgacgcactcgacgcacatctctgaggtgagcaacgtccagagtgtcaacatcttggggcgcaacgggattgcttgtgaggcgtaccagccgtctgccgggcttgctcctgaccaagtgggcaacctccagcgttacctcgatgctgttcgcagcaacttgctcttcgcaaagagcgtgctcctggtggagggcgacgccgaagagatcctcattccattgatggtaaagaaggctcttggcgtaagcctagacgagcttggagtcagtttggtcaatatcggcagcactggcttcgccaatgtctctgtgctgttccatgagaccagagtccgccgacgttgttcgatcatcacggaccttgacgcggcatttatgaacccgtaccccctaccgggcgacgatcctgagacattgaagttcaagagcaaactgctcgcatcccagacgtcaggagcggcacgcaaggtcgtactcgatgcgcaggctgctggtaacgcatggcttcggcctttctatgccgccaatacgttcgaagttgacttcgtggcatgcggcaatacggagacggtggttgcgtcagtcaacgatgtctatacgcagcccgcaacgcgtgctcagtccatagctgagttgaactcgggcgatcccgctcagttcggaaggcgagtgctcaccatggccgactatgaaggcaagggttggttcgccattcttctaggcaagcggatagatcacaggatcgtcgttccgccctacatccgccaggcgatcatctttgcgcacggcacgttctctaccgagctgctcttcagcatactgaagtacagagtgaccgtgaacaatccgggcggaggcaccacaccgccagcgctgcaacgctattgggaacgcctgcttgagtatcgcgcgggcctagttgacttcaacactatcaaggcggaggcagctgtagggcttcccggcgatcagatacttgcatttctgggagatctgccgtga

SEQ ID NO: 80033 - DNA, 1803 bp, Burkholderia ubonensis
gtgacgttcgcctggactcggaccgagctgaacgatgaacagtcggaggctgtacgcgaggagagcagcgtgtttctggttgcctgcccgggaagtggaaagaccagaacacttacctacaagatcgcctatgagctttcacgcctgcagagcaaacggcagttcatcgtcgctctcacctatacgcaccgagcggctgacgaaattcatgagcgtatcgaaggacttggtgtcgacacgtcgcagctatggataggaacgattcactccttctgcatggagtggattctgaagccctacagcatctacgagcctgcgttagcgcgtggtttccggatcatggacagccatgaacaagagaagctactagaagagctgtgccgaatgcagccgggaatcacccactgggactgcgaatactatttcaccgaccaggggtacgttctggcgtgcagggatcaaagtaaacacgaacgtcttcatgccatctttgcgctgtatttccgccatctcgcggacaacaggcaaattgattttgagcagatccttttctatgcatcgcgcctgatccaaagtcaacctcagatcgcgagggtccttgctaacattttctcgtggatgctgattgacgagtaccaagacacgaagcggattcaatatgcggtcgttgccgccatcgtgagggctggagctgagcgaacaaaactgtttgttgtgggcgatcccaaccaggcgatctttggctcacttggtggcttcgcgatgccagttgccgaacttcggcagctctgtggtattcggctggaagagcgtgcactgtctgaaaactatcggtccaccgatcggctgatcaggtacttctcgaacttcgctgttcaggcaactggcattcgcggagccgcgtccgaccgagcgtttcccagcagcatcagctacaacacttatgtggagcgagaccagttggaggccgagcttgtgaggctgattaggctcagcaccgcccaagggtttgccgcggaccagatctgtgtgcttgccccgtggtggattctgttggcgggagtgacgcgtcgacttgcaggtgctttgccagagtaccagttcgacggcccaggaatggtccccttcagccgtgatcaggagaacttctggtatcggttgtcgcggatcgcactgacggaggcatcccccgcgcagcatgtgcggcggctgcgttgggcggcagaggtgatcagagacctaggcaatgcaggcatcgacactcgagagctgtccgctaagcggcttctgcgggagagcaattccatcctgctgaatcagcctgatgggctgctgtatctcaaggagttcttcacttcgttgatggcttgccttaggattgactgggaatcacaccctttgcttttggagcaccatcaagccttctttgtcagttcggccgcgaggattgatcggctccgcagggagggtgccgcgtacatcggcggaattgacttcttccgcaaagtgttccaacaccgaagcggtatcaccgtcaacaccatccatggagtcaagggtgcggagttcgacgtagtgatagcgtttggcctgctgcaggggatggtcccacatttcagcgaagaagcagaggcagatggaggcatcaacagcgccaaaaagctgctctacgttgttggctctcgggcgcgcaaacatcttcatctgatctcggagcggcaacgcatcagggggggagggcgcggcccgtacgcggcaacggacacgcttgctgcatgcgtgttcgattacgacgtcgtgtag

SEQ ID NO: 80034 - DNA, 1764 bp, Burkholderia ubonensis
atgtacctaaagacacttcgcatccagggctttcgtcgctttgacgatttatcgctcaatttcagggatggtctaaatatcattgtcggtcccaataacgctggtaaaactgcggttgttgacgcactgagagtgctcctggctgcaagcgacgagggcaatcttcgtctcaccgaactcgatctgcacgaaaagccgggtggtctaactagttcaaatgcgaccttcacgttcctgtttagcgacttgtccgagcaaaacgaagccgatttcatgaccgctctcatccctgtcaaagacgacgaaggcaagatcacgggctatgacgcgcggttttcggtgcaatacacccaagcagagcccggcggccggttgcgcctacggcgctgggtcgggttgcatgaagagaacgtgatgacgacggagatgctcgaggagttgcgggcaatctacctccagccgttacgtgatccagagcaggggctgaaaccgggtcgcttgagtcagctttcaaagcttgtccaaaacatgatgccggagaaaggcgcgcgggaagcgctggtgcagaagctggttgaaatcgacgaagagctagctaagaatgagcccatcttgtcgaccaactcggccatcacgaacaagcacaaggcgatgctcggtgcagtgcttgcacagaccctcagtctcgatctgaccgcaagcgatttcaacaggtttgcggcccgcgtgggcatggtggtgggcggccgcgacgtcgagcagaatggtcttggattcaacaaccttatctacatggcggtggtgctcagcgagctagccttcaataagaaggcgtctttttgcgggcttctcgtagaggaacccgaagcgcacctgcatccgcaacttcaagctgttcttctggactacctcaagaccgtcgagaagccagccgaaggcgagcggccggtccaggtctttgttaccagccattcgccgaacttcgcggcacttgccgacatcgattcgatttgctgcgtctacgatagccctaccggtcccgtcgcattcactcctcgcgacgttgcgttcgggaagggaaagaaggagaagctgcaacagtacctcaacgtgacgcgtgcagaactgttttttgcccgccgcatcgttttcgttgaaggctcggcggagctgtttctcgtcgacgcgcttgcgaggagggcgggatatgatctgcgtaagcattccataagtctcatcagcacggacggcctcaacttcgacgcatttctgcctctgttcggcgagaaggcgatgcagattccggttgcagtcgttacggatgcagacccacccgcgccagagcactacccggcagcaaaggacgcattgtcactgtccgccgccgccacggtcatctctgcgtcgcaggacaactacgtgaagtgcttcttcgcgcagaagaccctcgagtacgatctggcgttcgacgcaggacgtcgtaccctcatgattgacgccctcactgaaatgcatcctgaaattggggcggatctcaaggttgatgtcaacgcggctgtcagcgaccacgagaaggccagggtccttttcgccggcatgttcgatcggccaacagggaaggccaacgtgatgaagggccgatttgctcaaacgctcgcctatagaatctcgcagtcgaacgacacgatcgagctgccagcgtacctgaggtcggcactggacttcgtaaccgatgccgctgcgaaggggccacgtcatgtctaa

SEQ ID NO: 80035 - DNA, 1797 bp, Burkholderia ubonensis
atgccgctgcgaaggggccacgtcatgtctaattttgaacccaccttggagcagcaagcaatcatcgctgctgaactcaagtcgctggcggttattgcatgccccggaagcgggaagacggccacggcagtgcgccgccttgcagaggtgcgccgtcggttggacgagacaggctcgcgcagccatgtcgcactactgtccttttccaacgtcgccgtcgacactttccgcaacgaatatcgacaacttcggggacacgatggtgatttcgatcgcgtcgttattcagaccatggattccttcatcactagtttcattttgcgcccccatggcacgcgcgcgatgggttgctcgcgcacgccttaccttgtgctgggcggtgagccgtttctcgccagctatcgcttcggcacggaccctcagaagcttattggaatcgacgagcttgcactggatctggcggatgggaaggtcactatccatcgccgtttcaagagcggcggctccaagcgtcttgaggtgaaagacaccgagcttgccaaagacgtgattcggaagctcggcgtcactggcggctatacctacgcaacggggcgtttgtgggcgaggcaccttctcaagaaggaacctcgtttgacacgggcactcgcccgcaggttttcgcacatcctagttgacgaggcccaagacattggtagattcgagggtgccttgctcgatctgctgagtgaggcaggctgcaccatctcactgatcggcgactaccatcagagcatatatggcttcaacttcgcgactggagagtatcttagaactttcgcggcaagagttgacgtgcttgagttacccctgactcaaaacaggcgctcactggagagcatcgtgcaggcggcgaactcgcttgctggaaccgtatcaaaaccgtttcgaacgccacctgagaggccaaacgggacatttttctggaagtatgacccgcaggaactgccgctcctaatgtcggcgtgggtgacagccctaaacgcctcgcggtactccatcgatgaagctgccgttctgtgccgtggtaacgggctactcgcaaagctcgcggcggcatcaagcgaggtagggcagtccgcggtgaagcattttgcgacagccgcgattgaacgcgagcaagctaccgacatctcgaaagttctcgaccattgcgcaaaaggcgtcatgaccatcttgtcgggcttgccacacagtttcattgccgacctgaagagcatgcgtggcgatacccatgttcagacacttcgtaggctcgtctggacgttgattcgtaagcccactacaggcatcccccttgctacgctacctgcgagaactgggtggctcaagcagttgaaggtgaatttagaagtctggctgaacctggtcgagcagacgacaccgtttcggcgccagccgacttggacgtctcgagttaccgcgaaagagctacctcagaccggcccgctcatcgcggccgacattgggcagaacgactggtctgcattgagatgcggaacggttcactcagcaaaaggggaagggctttccgctgtcatgtacctgaccgactgggacgacttaaaggctctggtcaatggtaccggaggcgaggaaggacgcattggctttgttgccgtgacacgtgctcgcgacctgttcgtcgtggccatccccgagagcacttctatcgatatgattgaaagaataaaagcacacgggtttgctgaatcggaccctgcgaagctgactgtggccgggacacagtcaatctga

SEQ ID NO: 80036 - DNA, 2142 bp, Burkholderia ubonensis; identical to SEQ ID NO: 80032

SEQ ID NO: 80037 - DNA, 1803 bp, Burkholderia ubonensis; identical to SEQ ID NO: 80033

SEQ ID NO: 80038 - DNA, 1764 bp, Burkholderia ubonensis; identical to SEQ ID NO: 80034

SEQ ID NO: 80039 - DNA, 1797 bp, Burkholderia ubonensis; identical to SEQ ID NO: 80035

SEQ ID NO: 80040 - DNA, 2142 bp, Burkholderia ubonensis; identical to SEQ ID NO: 80032

SEQ ID NO: 80041 - DNA, 1803 bp, Burkholderia ubonensis; identical to SEQ ID NO: 80033

SEQ ID NO: 80042 - DNA, 1764 bp, Burkholderia ubonensis; identical to SEQ ID NO: 80034

SEQ ID NO: 80043 - DNA, 1797 bp, Burkholderia ubonensis; identical to SEQ ID NO: 80035

SEQ ID NO: 80044 - DNA, 2334 bp, Burkholderia anthina; identical to SEQ ID NO: 78280

SEQ ID NO: 80045 - DNA, 1956 bp, Burkholderia anthina; identical to SEQ ID NO: 78281

SEQ ID NO: 80046 - DNA, 1800 bp, Burkholderia ubonensis
atgcggattagtcgaatcacggtcgagaactacgccaacttcgagaacgtcgacttcgccactgacgacagcctggtgattgtcggagagaacaaggcaggcaagagcaacctgctcagggctttgcgactagtgctcgaccccatgctccctgaccgtgaccggcagctgggcctcgagcacttttgggacggcttaggcgacgcgaagctcggcgctaccgtcagagtggtcgtggagttcaccgacttcgaggacaatgacaacctgctcaccgtcctgggcggcagcctggtggacaccaagaccccagtcgtcgctcggctgacctacctgtatcgccccaaggccgcgctcgagggcgcggcgccgcaaaccttggcggactacgagtttctggtgttcggcggcaccaacgaggacaacgtttttacggccgcccgcaggcgcgagctgccaatggattacctgtttgctttgcgtgacgcagaaggcgacctgctgaactggaggcgttcacctcttcggcccatcatcgaggagttgactgctagtctggatgagaaggcccgcgaggagctccagcagcttgtcagcaatgcccagagcacccttgcgcagcgtcctgaggtctctgctgccgcaggcaaggtgtatgaccggcttgtggagatggtcggcgacgaacacgccgtgtctttgacgctgggcgcgaccccgaccaatgtggacgtactgctgcggggcttgcggcttctaatcgacgggggcgcccgcggtattggcgacgcaagcctaggaacggccaacctgctgttcttgaccctgaaggggctggagcttgagcgagcggtcgaggcaggggaacgcagtcacacgtttcttgctatcgaggagcccgaggcgcacctgcatccgcatgttcagcggttagtgtacaggcactaccttggtgaggaggacgatgcgcctcagaacgtcaccaccatcttgacgacccattccccgcacatcgcgagcgtcgcgcccctgcgctccatcattctgctgcgtgaggacgctgaaggtgggtcgacgtcgattacctccgcggccgaggtggagctgctgcccgacgaagaagacgacctgcagcggtatatcgacgtcacccggggcgagctcttcttcgcgcgcggcatcatcttcgtcgaaggcgacgcggagcggttcttaatccccgagtttgccgctgcgctcgacgtcgacctcgacacacttggggtgacggtgtgctccgtggccagcgccaactttctgccttacgtgaagctagtggggcctgacgccttgaacgtcccttttgtcatcttgacggaccttgacccgccggacgatgggggcgcgccgctagcctttgccagagtccgcgacatcttggccctgtggatggagcaggaggacatcgaccagtacgaggagttcgacgacctccgggaagacggcgagatgaacggcattttcgtcaacgacaagacgctggaagtcgagctgttccaggctgggatggggcctgcaatggcgcccatcctgcagaagcacgcgaactcttggggcccccagcgaagggcggtgatgaaaggctggatagacgatccgaccacgctggatgagggcaagctcctgggctgggtcggcgaggtcggcaaaggccgtttcgcgcaggcactggccggctccgccaccgaggcggtttgtcctgagtacatcaagaaggcgctgacctacgtgaaaaatggcttctccccagtcgagtcctaa

SEQ ID NO: 80047 - DNA, 1800 bp, Burkholderia ubonensis
atggcttctccccagtcgagtcctaagtacctgcaagctgcgctgcagctgcgggacgaccccggacagtgggcggcttacgagtccaccgggaactgctgtgtgctggccggaccgggcagcgggaagactaagacgctcgtcacgaagctggcgcgtgtcatggcagaagacgtgcagtcgcctcgaggggtggcctgcatcaccttcagcaatgaagcagcgcgtgagctcattcgccgccttcggcaacttggtctcgagcagtccccgcggctgttcgtcggcacagttcactcgttttgcctgctgcatctgctgctgccctttgcgcagctcgccggcctggagctgccttacccactaaaggtcgccacagagtccgaagccgcgagcatctatcgggcggtggcagacaagcttcgcggcattgggcagccagtgcgcaaagaggatgtagaccgccaccgccgagtgaacctggaccgcgacagcaaggcttggacttggaacgaggagatgactggcctggcagaggcgtacgagcaggagttgcgcaagcaggggctcatcgacttcgaggatatcgtgcactacggtcagcgcctcgtgaacgagcatgactgggtcctgaaggtcatccgagccaagttcccggtactggccgtcgacgaataccaggacttgggagctgcactggaccgcatcgtgcggcggcttacctttgacgcaggcgtgcgacttatcgctgtaggcgatgtggaccagtcggtctatggcttcacgggagcaaacagcgagctgcttgaggagctgtccaaggagaacgacgtcgagaccatccggctgaaaatcaattacagaagcggcaccggcatcatcgaggtcgcgcagcgggccttgggaaaagacaggggctacgagtcttcagaacctgagaggcaagcctccgtccaggcgcacaagtgcgacaagggcctgcagcaccaggccgagtacgccgtgcagacgctggttcccgcagcattggctgccaaggaggggcggcagctcggtgacatcgcagtgctgtaccgaaaccggaatgtgggcgacgcagcggcagttgaagccgtgagggccaagtacccgttcgtgcgcatcgacaacgccgccccgtaccgcaaggtgcctctcacgagctgggtggaggattgcgccatctggtgtgcaggaggttggaagatttcgtcaccaccgctgcatgacttgcaaggcagatggatttccttccatggtggcttgtcggacaagcaggcgcgggacggggccgcgcggcttacgcgttttctgtggaaccaccgcggcgatggtgcggcgctcgactttgtcgcggccctacgcgccgaactgctcaacgtgttgattgccgtcagaccggagcttgccgaccagactgcgcacgtggaagacatgcataaggcactcgagaaaggcggagttcttgtcggcacgacaaaggcgcagcttggtcgccgtgatggagcgcccaagcagctcaatctgctgacgctccactccgcgaagggcacggagtacgacgtcgtcatcatcctgggcctggaccaaggcgagttcccctcgccaaattgggctgacaacactcccgagaggatggaggaagcgcgtcgcttgttctacgtcggtatcacgagagcgcgcaacgaggttcacctgatgtatagcggtttcaggcgggaccggttcggcaggacatggcgcgaagggccgtcgcagttcctggatggcctgctgccgtag

SEQ ID NO: 80048 - DNA, 2301 bp, Burkholderia vietnamiensis; identical to SEQ ID NO: 79994

SEQ ID NO: 80049 - DNA, 1956 bp, Burkholderia vietnamiensis; identical to SEQ ID NO: 79995

SEQ ID NO: 80050 - DNA, 2070 bp, Burkholderia ubonensis
atgaagttgcgccatattcagattaaaaactttcgtcttctctcggacgtcgaccttgctttggaagatctcacgacagtcgttgtgggtcgcaacaacagcggcaagacctcgctctctgaagttatccgacggctactcgccgacggcaccgcgcagtttcagcttgaagacttctccagcgcctgctacgagcgctttcgtctagcttgggaggctcggagcaacgacgagcacgacgatatcgtccgggcgctgatcccctacatcgaactgcgactgactttcctgtacgatccgaatcagccgcaattgggaccgctgagtccttttgtcatcgacctcgaccctgactgcaccgaggcgcttgtggttgtccgctacgagctgaaagacggtcagctttcccagctttttgatggtttgccgccgacgccgttgtctgcggaagctcgattaacgttctttcgcacgttgcgcgatcgaataccagccaattatgcgacgcgcatatgggcggaagaccccaatgacgctggaaaccagcgccagctccctcccaacgcagtgaagggtctggtcaaaacgggtttcatcaacgcgcaacgtggccttgacgacgtcacgtcacgagagtccgacgtccttgccaagactgtcgaacttcttttcgcaacggcgtcatcggcgtccgcagatgcggctgacaagcagatagcagattccctgactgaagccgtccaaggcattcaatcgcagattgatacaaacttcggcggacagctaaagggattgatccctgccttgaagagctttggctaccctggactaggtaatcaggagctgcataccgagacccttcttgatgtgcgaaagctgttgtccaatttcacgaaagtccgttacgccggctacagcggtgtcgcgttgcctgaatcgtacaatggcctcggtgcgcgcaatctgatcttcattctcttgcagttagccgggttctacaaagcctatcgcgccgaagcgacggccccaggtgtccacctcgttttcatcgaggagcccgaggcgcatttgcatccccagatgcaggaggtattcatccggcaactcgccaaaacggcccaattgctggtggatagtacagaagacaagaccccctggcctgttcagttcgtcgtttctacgcattcgtcacacgtcgcaaacgaagcgggtttcgaaagtatccgttacttcctcggacgagatgtgcctggagcacaacccggcgtccggcaaacgatgatcaaggatctgcgcagagggctgggtggcgtttctgagcctgacaagaagttccttcaccagtacatgacactgacgcgttgtgatctcttttttgcagacaaggccattctggttgaaggcttgagcgaacgtcttctgctgcctgtcctcgtcggaaaactcgaagaggctgagcccaacttcccgaagctgtccagccagtacgtcaccacgattgaagtgggtggcgcatacgcgcatttgttcttcaagcttctacatttcctcgagcttcgcagtttgataattaccgaccttgacgccgtggaaaaagcgggcggttcggcgtgcgaggtccacaaaggaacgtattcaagcaacgcttgcctgaaggcgtggttctcggatgacgacccgttcactctcgcaggacttttggccaagggcgaggccgagaaaataagagagggcaatcgcgtcgcctatcaatgtgcggaagcggaaggcggtccatgtggacggacgttcgaggacgccttcatcctcgcaaatcgtgcgctgtttgggctgaccggcaataccaaggaagaattggaggttgccgctcgcagcaaggcaggagaattcaagaaatcggacttcgcactcaggtatgccattgaggagaaagggtggaatgctccgaagtatcttgtcgacggcgtgcgatggctggcggccggcatcgaacctgatcaggccgatcctgcgctggctttagcagcggacgctatcgttgcgaaggcggaggccgctcctcatggctga

SEQ ID NO: 80051 - DNA, 1737 bp, Burkholderia ubonensis
atggctgatatccaatctccggccgagctggcgagtcaacgtgccctcgacgctatgtttcaatgcctggatgaaggacggagcttccggctcgaagccggcgctggtgctggcaagacatattccctgatcaaggcgttgcaatatctcatcgagcgaaaccggcattgtttcccgaaaaagaatcagcagattgcctgcattacattcacgaacgttgccaaggacgagatagccgctcgtactgacaagagcccattggtgtactgcgacaccaaccacgccttctgctggtccctaatcagcggtttccagaagcagctaaggtccctggtggaggcaatgccgcactggcaagagcgactagcagaagtcggcggcacgctcggcgcccgcatggtcgagtacaacctggggcaccgcgcaattcgcgaggactgtgtatcgatccaccatgatgatgtgctgcccctcacgatttccctgatggagcacctgaagttccgccggatggttgcagatcgctttcccatcatcctggtggacgaatatcaggacactgacagtgattgggtcgatgcgatcaagcggctttttttaagcaattcggacggaccgctgttcggcttcttcggagatcactggcagaaaatctatggcgatgggtgcggccggcttgagcacgagtccgtaacgggaatcggaaaggaggccaacttccgctcggtgaagacgatcgtggattgtcttaaccggatgcggcctgagttgcgccaggaagtcagggacccggattccgtgggccacgtgagcgtttttcataccaacgactgggagggtcaacgccgagccggtggacattgggccggcgaccttccggccgatgtcggtcaccaggcgcttgagcacgtcaaggagctactggcacagcaaggatgggatcttgcgccagggagcacgaagatcctgatgttgacgcacaggctgctcgcaaccgagcagggctacacgagcctgccaaccgtctttcgctacaacgacgccttcaccaagaaagagcatccgcatattgcctatctcgtcgatgaactcgaaccggcctgcgacgcatttgtggcaaaccggttcggagtgatgttcgaggcgctcggcgggacgacgccacttcttcgcagccatgcggacaaggcggcctggcacaatgcaatgacccgcgtcctggaacttcgcgcgacgggcacggttggagacgtgatcgatcatcttcttgatcaacgtaagccccggcttcctgaagcgatcgaaaagcgcgaacgcgaactacgcgacttcgatcgaactgccggcgaagagatgccggaaaggcttgccgaagttgaaagactgcgcgctgttccctacgcggagatttcagcattgcgggcgtacctggacggtcattcaccctttgagaccaagcacggagtgaagggtgccgaattcgataacgtcctggttgttatcggtcggggatggaaccaatataactttggcgaaatgctcgggttggctgctagtcaagcgattccggccgcgagagtggagtctttcgagcgaaaccgcaatctgttctatgtcgcgtgttctcgccccaaacgacgccttgcattgctattcacccagttactgtcgccagtggcaatgggcacgctggaacaatggttctcgcccgaaagcattcacgccatcgtactctga

SEQ ID NO: 80052 - DNA, 1821 bp, Burkholderia cepacia
gtgagaatcagccgtgtcgtaattcgcaactttcgagccttccagcacctcgatatatccttggacaacaatatcagttgcgtcatcggggagaacaacaccggcaagtccgcatttctccatgcaattcggctttgcatagacgcaaatctcccatcgacgtatcgtagtttgtcgatgcgcgatatatcaaccgctattgatattggcaagccttccgaggtattaattggcctcgaaataactgactatgcggggaaggttaacgaggaagctctcgctggagcgtggagtgttgaatcgaaccgagctcgtctgatttatcgttttcggcctcggccgagcatccgcgaacgactggcggccgcggacccaaccctcgggaagcttgtactttctgactatcagtgggaactgcaagggggaggtgacgccgagataaacctcgcaaaaattgaatgggacgaagatgttgggttcgggatccggttctctgacctccaggccttccaggttgtatttctcccggcactccgtgatgtggagagcgatctccggcaacctcggtcgtcgcccttcgtgaaactcattgaggcgtctgctatcacggatgcagagaagcagaagcttgtcactgcactggaaaaggcgaacggtacgatatcgtcgtcggacactatcacgaagctcgcccgcgccgttgataagtcgttcaatgaggtcgccggccctgcgttcgaaatgaccattgatgtcggcttggcagagcctacatttcagtcagtggtgcgggcgctccggcttctgctctccaatgatgcagtcactgatgcagatccaagctcgaatggccttggagttaacaatgttctctacatcgccatcctcatcgagtactttaagcgacgactccagcaagaaaactcagcagggcaactcatactgttcgaagaaccggaagcccatctgcaccctcaattgcaactctccctctacgccgcgctggaagggttgccattccagactattctgaccacacacagcactcacatcacggcacaggcggggttaaacaaattcgtcgcgttaacgaatgttggcactggatgctcacactcttcggtaccgtctgcctgcgacaacctgtccgacgatgatgttgctgacttagaacgctatttggatgcaaccaaatcgggcctgcttttcgcaagaaaggtgatcttggtcgaggggcctgctgaactgctcttgattcccgccctagtgaaccaggtactggggcgcgacctagaccgtgaaggcattaccgtcattcccatctacggggttcacttcgacgtctacgcaaagctcttctcaaagtatgggctaccgaagaaatgtgcaatcatcgccgatggtgacctaacgccttcagacgccgccgagtcggggctcagtgaagaggaggcaccgtttaacgcgccggacctctctagactcgaaagcaagtacgtaaaggtgttcgcgaatgtcacaacgtttgagcgtgccgttacgatgtatggaaatatcgagatgttcgcacggacggcttcatcgctcggtgcagtcgcggtggcggcacaactgcgacgctggcgcgaggaatggaaaatgctcgaacctggaagtgacggtgcgaaagagcttgccgaaagatgcaggggcaaggtcctcagcacggcgaagcggtatgggaaggctcgcttcgcgcaagttgcagcgcgaaacatcgcgacagcaacatccattcccccgtatatccgggaagctgttgaatggttgtctcaaccatga

SEQ ID NO: 80053 - DNA, 1254 bp, Burkholderia cepacia
atgtatgagcgtcgacaggtcgacttcgcgagtctgttgtatcactctctgactctctgcctaacttatccggaaatctgtgaccacctttcggcccgctttgcctggatcctggtggacgagtttcaagacacaacggacctccaggttgccatcttcgaagaggttcacaggcgagggaacaccaagttctttttggtgggagacctttatcagtccatttttggttttgcgggcgccgcaccggagctggcggaaagctttgctgagcgcatcggcgcgcttcgcgacttcgcactgtcgggaaacttccggtctgctcccgcaatcattgacgatgccaatgcgattttccccagggtcccagcgatgacggcggagggccgacataaaggacttgatctccagacggatttagtaatcgctagtaacccaacccatgccgtgaccgattttttcttgccgcgaattgcggaattgggtatcccacctggtgagtcggtggttctggccaactcctggttcaagttgatgccaatcgcgaaagagcttcgaatccggggcatacctgttctcggaccgggcgctcgaccctacaggcgacagaggttattcgcaacggtcgcagagagaatctgcggccacctgtgcgagccagattttgaagcactggtgggcgtcgaacggtccctctacgacatgatattagaggtcgcaaatcgggcacctcaccgactcttcacatatgacggccgaaggctaatctaccaaattttgtctgatgccgccaatgctcgagatcgttctactggtggaatggagtttttgtatttacttgctgaacgcgtatcagcacaccttgtggccgaaggttacatctgcacacacgaggccgaggcgcttcgcgagtcggtggaggaaatggaacgcgatgtccgcaaaaacaatattgatccagaatctctctctattgaggaaatgggaattctcgcgcgaccaaagcgcgcagtaaagctgttgacgttccacgccgcaaaaggccgagagttcagtgcagttgcgatggttgatctgaacgaagggagcattcccttctatcaactcaggaccgaagaggagtttgctgaagctcagcgactgttctatgtagggctgactcgagctcaaaaatacctgatgtacgccccagacatgcgcgattacaggaaccgtccaagtcggtttgttggggccggctttttaggtaaacaatga

SEQ ID NO: 80054 - DNA, 2085 bp, Burkholderia cepacia
atgcgagtcgaaaaggttagggtcgaggggtttcgactccttcaggatgttgagatcatgctggaggacaattccacagtgatcgtggggcgcaacaacagtggaaaaacatcattcaccgacatttttgatcgtttcaccggagagactggggcacggtttcgtctggaagacttctcggctgcacaacgcgagcgtttcttcactgcaaagacgctaagagagcaggcagccaagccagaagacgtactcgctgcactcccgacgctctctcttacgctcaccttccgctatgacggcaccgcaccaaatttggggcctcttgcgcctttcgtcattgacctggacgtagactccaccacggccattgttcgcgttgagtaccgccccgtgttggcagcactccacacgctgctcgacataccgcctgcgcccaaaggcgttgaaccaagaacgcatttcttccgctcgttgcgcgacacgttgcccaaggcatacagcatccatgtgtccgccatcgaccccaccgacgataccaatcggcgtgattttgacggcacggccgcactatcggctttgctgcagtgcaatttcgttcgtgcacaaagaacgctcgaccatgcgaagcatggcgatgccgatgtcattggcaaattgctcagtgcgctattcaagactgcttccgcgccaactgcagcaaccacagatcaggaactggcggcgaagctaaaggcatccgtcgaagacatcgagcgcaatgtgcaaagcgacttcgatgagatgctgaagaagctgctgccggccatggaggtactgggctttccgagcctcaacgataccgaacttcggcccgagacctcattgaatgtggaggccctgctttcagaccatacaaaggtggtctacacaggcacggacggggtacacctcccggagggatacaacggcctcggcactcgcaacctgatctacatgttgctgcagcttgagagctaccacaaggcctaccgggccaaggcaacccgccctgccagccatctaatcttcatcgaagagcccgaagcgcacttgcatccgcagatgcaagaggtcttcatcaaccaactgaatgcagccattggaaagctgtcagcgagctaccccgaagaggctgcgtggaacgttcagttcgtcatcacgacgcactctcctcatgtcgcaaatgcggcttcgttcgaggcagtgaggtacttcctcaatgagccgccgacccaggttaatgctcgccagaccaaggtcaaggatttcaaaaagggcatgagcagcatctcttccgatgaccaggatttcttgcatcagtacatgacgttgaccaagtgcgacctgtactttgccgacaaggccatcatggtcgagggtacgacggagcggctgttgatgcctcgtctgtgcgaattggttgacaagtcactcgacgacaaacacaagctggccagacagtatgtgacctgcgtcgaggtcggcggcgcttacgcccatatcttctatccgctcctcgacttcctcgaactcaagaccctggtcgtcaccgacttggattcaaccaaaccggtagaaaagcagaacaagaagggaaccacgattaccacatgggataaatgtccggtggctgatggccagcggacatctaacgcagcgatcaaggaatggttccgccccaaggacacacaagacaaggacgattggcagatcacacctgccgagcttgttaccaagacggccgcgaagaagcagagcggctaccgtcgcattgcctttcagatcccagagaagcctgacacgaacgtgtgcgcgcgcagctatgaagatgcgctcgtcctagccaacccagatcggtttgagtggccaaaggaacaggacgaagccactgaggcatgggagatcgcgaagggactcgcgaaggcggatacggctttgcgctttgcgattcgcgagaaggcgtggacggttccccgttatatccaggaaggcctcgcctggctttccgagcctcctccacctcccatgcagaacgtggaagcgccagccaagggagctgcggtatga

SEQ ID NO: 80055 - DNA, 1734 bp, Burkholderia cepacia
atgaccgagcccaccgagaatccagcactcatcgctgcgcaagaagcccaaaaaaagatcaatgaggctcttgatgcagggcgaagctttcgacttgaagccggtgcaggcgcgggtaagacgtactcgttggtcgctgcactgaaacggctcatcgcagagcgtggcccggccttggtgcaagccggacagaaggttgcctgcatcacctacaccgaagttgccagaaatgagatcgcccaggagattgaggatcaccctgccattctggtggataccatccacggtttctcctgggccttcctacgccaatttcaaaaggcgctacgcgacctcgtgggagaaatggatgacaggaaagaaaaggtcgatcaaggcggaggcattagctcaaagcccgtggattacgacttgggattctttggcgttgacaccgacagaatcacactgagccacgacgatattccggagatgatggccaagctcctgcataaggataagttccgacgtatcttgagccagcagtttccagtgatcttcatcgacgagtatcaagatacccatcgccaattcatggaggcgattaccgagcaattcttgaagcccgccacaggccccctcattgggttctttggagatcattggcagactatctaccgcagcgaatacgaactcgctgattacccgattgaagagattggcaagggctccaactttcgatcagtaccggcagttgtagatgtacttaacaggctgcgccctgagttaccccaagccgttcgcgaccctgacgcaaagggcgaggcaaggttttttcatgccaatgcctataagggggagcgaaccaatagttctcactccaaggaggatctaccacccgatttggcgcgaaacactcgggaggccttgatgcaacggctgcaagcagagggttgggatttgagcaagacgaaggtgctcatgcttacccacaacgtcttagcggctgaacagggctatcccaatatcgctgaagttttcagcggccgcaccgatcagttcgcaaagaaggaagacccagcactcaaattcttcgcggaaatcgttgaacccatgtgtgcagcctacaacacgtctcgctatggagatatgttcagggtattcggctcaggccctgcgatcaccaagcacgaagacaaagctcactggcgtcgcgatatggatacccttcaaaagctgcgtacagagggaaccatcggacaggtcatcgaccacctgaagacaacgagacgcccctctcctccagagcgcttgctgcgacgtgacgcagaacttgtcgcgctaaatggtgcgcctattcctgaagatgcttcagcacttcagcggtacagcaaactgcgggacatcccctacaaagaagtcgtcgaggtggtcaagttcgttgagaagcagactccctttgctactcagcatagcgtcaagggtgctgaattcgaaaatgttcttgttgtgcttggaggcggctggaaccactacaactggccacaacttctagaactgctgaagacaaatgcgctgaatgcaaagaacacgaagggcttctatcgtgctcgcaatctcttttatgtctccatctctcggcccatgacacgactcgccgtcctcgccacacaaaccatgcctgatgctgcgctcgcagcggtgaaccacctttttggcagcgataacgtcgaggaacttgctatcgcaccataa

SEQ ID NO: 80056 - DNA, 2301 bp, Burkholderia vietnamiensis; identical to SEQ ID NO: 79994

SEQ ID NO: 80057 - DNA, 1956 bp, Burkholderia vietnamiensis; identical to SEQ ID NO: 79995

SEQ ID NO: 80058 - DNA, 2355 bp, Burkholderia ubonensis
atgcatatcgaattcgccgagatcgcgaatttcaggaagctcttgtcggcccgcgtggatttgtcgctcaagacgacgctgttcgtcggtgcgaacaacagcggtaagacgtcagctatgttggccctacggcgcttcctaacgcctcgccgctgtccgttcgacatccacgacttcacgttgtgccacttgccggcgctcgtggacatcggcgaagcgtggcttcaggcgaacctggagggtgtcgtggctgacctcaccctggacccctgggtgcaagcgctgccggccttggatctgtggctgcaggtcaaggaggacgaggtccaccgggtccgagatttggtcccgctcatggactggacaggcgggcggctgggagtgcgactgcgctacgagcccaaagacctcaaggcactgttcaaggagttcatcaccgcggtcaccgaagccaatgccatgcgtgcagcagctgtggctgccgcagctgccaaggctgccggcgcggcgccctcacccaagttgacggtctggcccgaaaccttggtcgacttcctcaccaagcggctgacctcgatgttcacgatccgagcctatccgctggatccagcgctacttgtcaaccctgaaaagcttcgggccttgccgcagtcgcttccggcatcggcattgccgatcgagggtgatcctctcagtggcctgatcaaggtgcatgacatccctgcgcaacgtggctttggcgagatcccgaatgggggcgaagatgaaggcgagcttcaaacctcggcgggcggtacgcggctctctgaacaactcagaagctactacgccaagcatctggatccagcaaaggggccggatcccacggacctggaggctctgcaagccatggaggcggctgaggatgcatttgaccttaagctgatggaaagcttcaatgaatgctttaccgaggtggcgggcctaggctatccgggtgtcagcgacccgcgtccgcgcgtatcgacacgcttgcgtgcgatcgatggattgaaccacagcgcggcggtcaatttcgaggtcgacgtggtttcggatgcgggcgcggttacgcccatcctgctgctgccggagggcagcaacgggctgggttaccagaacctcatttcgatgatcttccggctgatgagctttcgcgacgcctggatgcgcgtcggcaaagcgtccaagagttccgaggctgcgagcattgaaccacttcacctggttctcgtggaggagcctgaagctcacttgcatgcgcaggtgcagcaagtctttatcaagaaggcgtacgaggtgctgcgtaggcgcccagagctgggggaaagcgacgcactgcgtacgcaactgatcgtcagcacgcattcgagtcacgttgcgcatgagacgcccttcgcgagcctgcggtatttccggagactgccggctggcatggtggccaaggtgccggtgtcgacggtggtcaacctgtcgcaggtcttcggggagggcacggagaccgagcgcttcgtcacccggtatttgcgtgcacagcacgccgacctgttcttcgccgacgcagcgatcctcgtcgagggaccggctgagcgcatgctcatccccaacttcattcgggcccactacaaggtgctgcatcagagctacgtcaccttgctggagattggcggtagccacgcccatcgtctgcgcccgctgattgatcatctgggcttgctgacgctgatcgtcaccgacctggacagcctgacagcgacggggggctcatcagttcaacccgctttgggcgcaggccagaaaaccaacaacgccaccctaaagacctgggtgccagccctggacgacgtcgacgcccttatcggtgcgacgccggcggccaagacgatcacggatgccggcgacacgctgttcgcagtgcgcgcggcgtaccaaacacccgttgaggtcacgatgccgggctccaccgccaaggagaccgcctacccctacacctttgaggacgctctcgtgttcgagaacgtggccttcttcgctgcgtttgccggcccgggattgaacgccaagttccgaactgccatcgccaagggtggcggtgcaactgcggttggtgccagcatgtacaccgcgctcaaagacggcaagaaggccgaattcgctctcgacgtcttgatggcggacgacttcaacaatctgaaggtgccgcagtacatcgccgagggtctggagtggctactgaaacagatgaagcagaagcaggtggaaatcttgacgacgacgccggccacggccgtttcagtcgccaccaccgcgagtcctgggccgggagcgaagccatga

SEQ ID NO: 80059 - DNA, 1920 bp, Burkholderia ubonensis
atgacggccgccgacgatcaattcgatgccgaggccgacgcaacgatcatcgcgtgtcttgacctgtgcaagcccagaagctttttcctgtacgcaggtgctggatcagggaagacgcgatcattggtcagcgccgtcagaaagacgatcaatggagagcacggccggcaacttaccctgaccggcaagaaggttggcgtcatcacctacaccaacgccgcttgcgacgaaatcaagcaacgccttgaattcgatcctcgcgtcgaggtcatgacgatccatgccttctcatggtcgctgatcgagggcttcaacgccgacatccgtcagtgggtcgccaagaaccttgaagaggagattgcagagctcgaggagcagcacaagaaggggcgccccaacacgaaagcgggcgttgaacggcttcgatccatggagagcaaacgtcgccgcctggcgcgtctggattccatcgttaagttcatctacagcccgaccagcgacaaccgaacacgcgactctctgaaccactcggaggtcatcgccatgacggcggccttcctgaccagcaaacctggactgcggcggatgttggtcagccggtgtccggtcttgctcattgatgagagccaggacacgaacaaggcgctcatggacgccttcctgcatctcgaggaagagttccatggcaggttcagcctgggacttttcggggacatgatgcagcgcatctactcggacggaaaagagcggctggacaaggccatcccggctaggtgggccatgcctcgcaagcggatgaaccaccggtgcccgtcccgcgtcgtcgaggttatcaacagcatccgccacgatgtcgatggcgtggaacaggtcccccgcagcgacgctgaaaagggtgtggtccgggtcttcatcgcgccccaagcgggcgccgaccccttcgccattgaagcggcagtacgccagcgtatggcgacgattgctggtgacccggcctggcagaactctgatacggtgaagacgctcgcccttgagcacctgatgtctgcgaggagattcggtttcgcggaattcttcgagccgctttgggcgatcgacaacctcaggacgagcctgcttcaaggcgccggagcaggtcttggattcttcatcagggacgtgttgccgctggtcaaggcgcttcgtgccaacgaccgcttcggggctactgcgatcatcaaggcgtcgtcgccccttctggatcgcgcagcgcttcaagaggctggatcgaatcaggtcgcgcagctcggcaaggctaaggcggcgtgcgacgggcttctggcgctgatcacggaacagcctgagatcaatgctcagactgtgctcgagtttgttgcgcagacgggtctgttttccatcccggacacgctggcccccttcgtttccggtgacgccaaggctgtagcggccgaggacaacgcagggcagggcgatcaggtggagcgcaccgaggacggagaagccgaagacaccagtcctgagttgagcgcatggagcaaagcgcttgaggcaccactgagccagatcgagcgctacgacttgtacgcgcgcggacagtcgcaattcgggacgcatcagggcgtcaaggggcttgagttcccacgcgtactggtcgtgatcaatgacgacgaggcgcgaggttttctttttgcctacgacaaattcttcggcaccaaggagaagtcaaaagcggaccttgaaaacgaagccgccggccgagagaccggttcggaccgtacccgccgcttgttctacgtgacctgcagccgggccgagaagagcttggccatcgtctactactcgccggatccagcactggctcgcagtgccatcctacagtacggatggttcgaacaagacgaggtcgaactgatcaactga

SEQ ID NO: 80060 - DNA, 2070 bp, Burkholderia ubonensis
atgaagttgcgccatattcagattaaaaactttcgtcttctctcggacgtcgaccttgctttggaagatctcacgacagtcgttgtgggtcgcaacaacagcggcaagacctcgctctctgaagttatccgacggctactcgccgacggcaccgcgcagtttcagcttgaagacttctccagcgcctgctacgagcgctttcgtctagcttgggaggctcggagcaacgacgagcacgacgatatcgtccgggcgctgatcccctacatcgaactgcgactgactttcctgtacgatccgaatcagccgcaattgggaccgctgagtccttttgtcatcgacctcgaccctgactgcaccgaggcgcttgtggttgtccgctacgagctgaaagacggtcagctttcccagctttttgatggtttgccgccgacgccgttgtctgcggaagctcgattaacgttctttcgcacgttgcgcgatcgaataccagccaattatgcgacgcgcatatgggcggaagaccccaatgacgctggaaaccagcgccagctccctcccaacgcagtgaagggtctggtcaaaacgggtttcatcaacgcgcaacgtggccttgacgacgtcacgtcacgagagtccgacgtccttgccaagactgtcgaacttcttttcgcaacggcgtcatcggcgtccgcagatgcggctgacaagcagatagcagattccctgactgaagccgtccaaggcattcaatcgcagattgatacaaacttcggcggacagctaaagggattgatccctgccttgaagagctttggctaccctggactaggtaatcaggagctgcataccgagacccttcttgatgtgcgaaagctgttgtccaatttcacgaaagtccgttacgccggctacagcggtgtcgcgttgcctgaatcgtacaatggcctcggtgcgcgcaatctgatcttcattctcttgcagttagccgggttctacaaagcctatcgcgccgaagcgacggccccaggtgtccacctcgttttcatcgaggagcccgaggcgcatttgcatccccagatgcaggaggtattcatccggcaactcgccaaaacggcccaattgctggtggacagtacagaagacaagaccccctggcctgttcagttcgtcgtttctacgcattcgtcacacgtcgcaaacgaagcgggtttcgaaagtatccgttacttcctcggacgagatgtgcctggagcacaacccggcgtccggcaaacgatgatcaaggatctgcgcagagggctgggtggcgtttctgagcctgacaagaagttccttcaccagtacatgacactgacgcgttgtgatctcttttttgcagacaaggccattctggttgaaggcttgagcgaacgtcttctgctgcctgtcctcgtcggaaaactcgaagaggctgagcccaacttcccgaagctgtccagccagtacgtcaccacgattgaagtgggtggcgcatacgcgcatttgttcttcaagcttctacatttcctcgagcttcgcagtttgataattaccgaccttgacgccgtggaaaaagcgggcggttcggcgtgcgaggtccacaaaggaacgtattcaagcaacgcttgcctgaaggcctggttctcggatgacgacccgttcactctcgcaggacttttggccaagggcgaggccgagaaaataagagagggcaatcgcgtcgcctatcaatgtgcggaagcggaaggcggtccatgtggacggacgttcgaggacgccttcatcctcgcaaatcgtgcgctgtttgggctgaccggcaataccaaggaagagttggaggttgccgctcgcagcaaggcaggagaattcaagaaatcggacttcgcactcaggtatgccattgaggagaaagggtggaatgctccgaagtatcttgtcgacggcgtgcgatggctggcggccggcatcgaacctgatcaggccgatcctgcgctggctttagcagcggacgctatcgttgcgaaggcggaggccgctcctcatggctga

SEQ ID NO: 80061 - DNA, 1737 bp, Burkholderia ubonensis; identical to SEQ ID NO: 80051

SEQ ID NO: 80062 - DNA, 2070 bp, Burkholderia territorii
atgaagttgcgccatattaagattaaaaactttcgtcttctctcggacgtcgaccttgctttggaagatctcacgacagtcgttgtgggtcgcaacaacagcggcaagacctcgctctctgaagttatccgacggctactcgccgacggcaccgcgcagtttcagcttgaagacttctccagcgcctgctacgagggctttcgtctagcttgggaggcgcggagcaacgacgaacacgacgatatcgtccgggcgctgatcccctacatcgaactgcgactgactttcctgtacgatccgaatcagccgcaattgggaccgctgagtccttttgtcatcgacctcgaccctgactgcaccgaggcgcttgtggttgtccgctacgagctgaaagacggtcagctttcccagctttttgatggtttgccaccgacgccgttgtctgccgaagctcgattgacgttctttcgcacgttgcgcgatcgaataccagccaattatgcgacgcgcatatgggcagaagaccccaatgacgctggaaatcagcgccagctccctcccaacgcggtgaagggtctggtcaaaacgggtttcatcaacgcgcaacgtggccttgacgacgtcacgtcacgagagtcagacgtccttgccaagactgtcgaacttcttttcgcaacggcgtcatcggcgtccgcagatgcggctgacaagcagatagcagattccctgactgaagccgtccaaggcattcaatcgcagattgatacaaacttcggcggacagctaaagggattgatccctgccttgaagagctttggctaccctggactaggtaatcaggagctgcataccgagacccttcttgatgtgcgaaagctgttgtccaatttcacgaaagtccgttacgccggctacagcggtgtcgcgttgcctgaatcgtacaatggcctcggtgcacgcaatttgatcttcattctcttgcagttagccgggttctacaaagcctatcgcgccgaagcgacggccccaggcgtccacctcgttttcatcgaggagcccgaggcgcatttgcatccccagatgcaggaggtattcatccggcaactcgccaaaacggcccaattgctggtggacagtacagaagacaagaccccctggccggttcagttcgtcgtttctacgcattcgtcacacgtcgcaaacgaagcgggtttcgaaagtatccgttacttcctcggacgagatgtgcctggagcgcaacccggcgtccggcaaacgatgatcaaggatctgcgcagagggctgggtggcgtttctgagcctgacaagaagttccttcaccagtacatgacactgacgcgttgtgatctcttttttgcagacaaggccattctggttgaaggcttgagcgaacgtcttctgttgccggttctcgtcggaaaactcgaagaggctgagcccaacttcccgaagctgtccagccagtacgtcaccacgattgaagtgggtggcgcgtacgcgcatttgttcttcaagcttctacacttcctcgagcttcgcagtttgataattaccgaccttgacgccgtggaaaaatcgggtggttcggcgtgcgaggtccacaaaggaacgtattcaagcaacgcttgcctgaaggcgtggttctcggacgacgacccgttcactctcgccggacttttggaaaagggcgaggccgagaaaataaaagagggcaatcgcgtcgcctatcaatgtgcggaagcggaaggcggtccatgtggacggacgttcgaggacgccttcatcctcgcaaatcgtgcgctgtttgggctgatgggcaataccaaggaagagttggaggttgccgctcgtagcaaggcaggagaattcaagaaatcggacttcgcactcaggtatgccattgaggagaaagggtggaatgctccgaagtatcttgtcgacggcgtgcgatggctggcggccggcatcgaacctgatcaagccgatcctgccctggctttagccgcggatgctatcgttgcgaaggcggaggccgctcctcatggctga

SEQ ID NO: 80063 - DNA, 1737 bp, Burkholderia territorii
atggctgatatccaatctccggccgagctggcgagtcaacgtgccctcgacgctatgtttcaatgcctggatgaagggcggagcttccggctcgaagccggcgctggtgctggcaagacatattccctgatcaaggcgttgcaatatctcatcgagcgaaaccggcatggtttccccaaaaagaatcagcagattgcgtgcattacattcacgaacgttgccagggacgagattgccgctcgtactgacaagagcccattggtgtactgcgagaccaaccacgccttctgctggtccctaatcagcggcttccagaagcagctaaggtccctggtggaagcaatgccgcactggcaagagcgactagcagaagtcggcggcacgctcggcgcccgtatggtcgagtacaacctggggcaccgctcaattcgcgaggaccgtgtatcgatccaccatgatgatgtgctgcccctcacgatttccctaatggaacacctgaagttccgccggatggttgcagatcgctttcccatcatcctggtggacgaatatcaggacactgacagtgattgggtcgaggcgatcaagcggcttttcttaagcaattcggatggaccgctgtttggcttcttcggagatcactggcagaagatctatggcgatgggtgcggccggctggagcacgagtccgtaacggaaatcggaaaggaggccaacttccgctcggtgaagacgatcgtggattgtcttaaccggatgcggcctgagttgcgccaagaagtcagggacccggattccgtgggccacgtaagcgtttttcataccaacgactgggcggggcaacgccgagccggtggacattgggccggcgaccttccggccgatgtcggtcaccaggcgcttgagcatgtcaaggagctactggcacagcaaggatgggatcttgcgccggggagcacgaagatcctgatgttgacgcacaggctgctcgcaacagagcagggctacacaagcctgccaaccgtttttcgctacaacgacgccttcaccaagaaagagcatccgcatattgcctatctcgtcgatgaactcgaaccggcctgcgacgcgttcgcggcaaaccggttcggactgatgttcgatgcgctcggcgggatgacgccacttcttcgcagccatgcggacaaggcggcctggcacaatgcaatgacccgcgtcctggaacttcgcgcgacgggcacggttggagacgtaatcgatcatcttcttgatcaacgtaagccccggcttcctgaagcgatcgaaaagcgcgaacgcgaactacgcgacttcgatcggactgccggcgaagagatgccggaaaggcttgccgaagttgaaagactgcgcgctgttccctacgcggagatttcagcattgcgggcgtacctggacggtcattcaccctttgagaccaagcacggagtgaagggtgccgaattcgataacgtcctggttgttatcggtcggggatggaaccaatataacttcggagaaatgctcgggttggctgctggtcaagcaattccggccgcgagagaggagtctttcgagcgaaaccgcaatctgttctatgtcgcgtgttctcgccccaaacgacgccttgcattgctattcacccagttactttcgccagtggcgatgggcacgctggaacaatggttcttgcccgaaagcattcacgccatcgtgctctga

SEQ ID NO: 80064 - DNA, 1947 bp, Burkholderia multivorans
gtgaaacttgcccgcctgcgcttgtgcaacttccgatcgttcggttcagatttcgcggagattgaactggacgacatgacatttctgctcggtcccaacgggacaggcaagactgttgttctccaggcgcttgcctgcatgttcagcctagatccaagtcaacgcaaggtcagtcgatccgatttccatattcccgtggatgaagctcccgagaacgcgccggacgagcggaaactttggatcgaggcggactttgagttcccggaattagatgaggatgatgctggagagcatgagctgcctgctgttccgggcaacttcgcccacatgcaattgttagctgaagatgggcccgttcaagtgcgctttcgtctcgaagcaacgattgaccaggacggagacattgaggaaagcttcacgtacgtgaccaaagtcggtgaagatggaagcccgctcgaagaaagccgggtctcaaagcaggatcggaatgcaattcaggtgcactaccttccagcccggcgcgatcctgcagaccatatctcctactctgccaatgcgcttctcgggcgcgctctgcgatcggcagactggagtaccgagcgggagcagatcagcgtattgacgggacaaatcagcgagtcgttgaccggaaacgctgcaatcggaggcatcgcccaagcgctgacaagtcaatggagcgatctgcacaagggtgcatactacgccagcccatccgtctcgttcgcgcgcaacgaaatcgagaacctcctccggcatctaaccgttcgtttctcgccggggcacggcgaatcgattgttgacttctccagactcagcgacgggcagcaatctcttctctacgtgtctctcgtgcttgcgatgcatagcatcggcagcaaggttctaagcggcgagcttggaaccgctttcgatatcgacaagctgcggcccgccgtattcaccttgattgcaattgaggaacccgagaacagcctatcgccccactaccttgggcgcgtcgtcagggcactgacagcattcgccggggatcagaatgctcaggcactcgtggcgacgcattcgcctgcgctcctgcggcgtgtgcccccggaatcagtacgatacttgcgccttgacgagaaccggaaaacgatcgtcaaacgcatagagcttcccgaagacgagtcggctcaaaagtttgtccgcgaaggcgtgcaggcttttcctgagctctacttttcccgtctggtcgtgctcggcgagggggacagcgaagagatcgtcctgcctcggttactggcagcccgtggcatcctcgtcgatgacgcgtccgtctccgtcgtgcctctaggcggtcggcacgtcaatcatttctggcgtctgctacatggactgggaattccacacgtcaccctgctggacctagatctggcacggtatcaaggcggatgggggcgcatccggtatgcagcgaatcaactcctgaaatacgcagatgtctcaggcaacgatctgacgcaggaggagatcgacggcatccccaaatggaatgacgaccaaggcatccttattgacgacgacgggtggatcgaacggctggagaacttcggggtcttcttctcagcaccgcttgatctcgacttcctgatgatgacgacgtacccggatgcgtacctcatcgaagccggtgatctggagaagccggatgaggagacgatcaagtccgtacttgggaaaaagcatgatgtactgggcggtcaatactcggaggaggagcagagctacttcgacgcgtaccacgcaaaattcaagctcggcagcaagcccacttggcacattcgagcgatgtcgagcatggatgaccaagagttagtggatgaaatgcccgaagtgctcgaacggatgtttgatcgcgtcgaagccgcgcttgaggacctgcccgaatga

SEQ ID NO: 80065 - DNA, 1662 bp, Burkholderia multivorans
atgatccgcgttgatagatggtcgccgtcggacggcctctcgcttgaaccgaacgcacttacggcggcgaaggagatcggtcgaagtctagccctgacagccggacccggcgcaggaaaaaccgaaatgcttgcgcagcgcgcagacttccttctccgcacggcaacctgtcggtacccgaaacgtatcttggcgatatcattcaaggtcgatgcaagccaaaacttgaaggcacgagtaagaaagcgttgcgggccggaattggcggcacggctcgacagccacacgtttcacgcgttcgcaaagcgaattatcgaccgattcagacccgtcctgacgggaagagatgctctcgattcagactattctatcggccccgtgagagtccaaagacgggccatcacgttcggcgatatggtcccgcttgctgtcacgatagtggaatcaagccaggttgcgcgcaacgcaatcaggcagacatacagtcatgtgtttctcgacgagtttcaggattgtaccgaggtgcaatacagattgatcaaggcatgcttccatggtactcaagcgaaactgacagctgtcggcgataccaagcagcgcatcatgggctgggccggtgcgcttgagggcatatttcatacctacgcgcatgactttgccgcacggccgctcaacctttatcagaactttcgctcaaagccgaggctccgtcgcatgcagaacgcgatggtgcgtgtaatggaccccccggcagcactcaacgacgaggacattgcaggggaagaaggagagattgagatccttcgctttgacgacgatgatcgcgaggcaatctacttggctgacacgtgtagagactggatcgacgaggagggcattgccccctccgaaatagccgtgctcgtcagtaagcaacagaatctgtattgtcaaaaattgcgtactgcgctggaagctcgtggagttccctttcgcgaggaagattccacacaagacctggcgtccgatcccgtggcctgcctgatcatcgacttcctgctcgttgcgagcgggagccgtcaacctgcaccatatggcagactgctcgatcttgtggtgttcaaccatggttttgatgaggaacgcgagtaccaagcgcgttcaagatgggatcgctttgttgctgatgtcagtcaaagaattgcggatggacgaacgaatcttgcggaagaagaccagcttgccggcatcgtcgacgaactcattcgtgtcgtcgggcgcgacgcagtggttgcactatcgcccgattacgcccacggagaccgattgcaacaacagattgaggcagccatcagccgggcgcaccatctgctcagggacagcgacaacgtagcaacggcgcttgcgtcgttctctggtgaccgggctgtgagaatcatgtctattcacaagagcaagggcctagaattcgacactgtggtcgtgctaggcgtcgagcgtgagacgttctggggcgacgaggtggcggagcgctcggcctacttcgtcggtatctcgagggcgaaacgccgactgtttctgactgtttgcgagcgaagggagtgccccgatggggcgagaaactggaggaccggtaggaccgaacacgacgagtttgttggatacgccgaaccctatctgtag

SEQ ID NO: 80066 - DNA, 2070 bp, Burkholderia territorii; identical to SEQ ID NO: 80028

SEQ ID NO: 80067 - DNA, 1737 bp, Burkholderia territorii; identical to SEQ ID NO: 80029

SEQ ID NO: 80068 - DNA, 1764 bp, Burkholderia ubonensis; identical to SEQ ID NO: 80034

SEQ ID NO: 80069 - DNA, 1797 bp, Burkholderia ubonensis
atgccgctgcgaaggggccacgtcatgtctaattttgaacccaccttggagcagcaagcaatcatcgctgctgaactcaagtcgctggcggttattgcatgccccggaagcgggaagacggccacggcagtgcgccgccttgcagaggtgcgccgtcggttggacgagacaggctcgcgcagccatgtcgcactactgtccttttccaacgtcgccgtcgacactttccgcaacgaatatcgacaacttcggggacacgatggtgatttcgatcgcgtcgttattcagaccatggattccttcatcactagtttcattttgcgcccccatggcacgcgcgcgatgggttgctcgcgcacgccttaccttgtgctgggcggtgagccgtttctcgccagctatcgcttcggcacggaccctcagaagcttattggaatcgacgagcttgcactggatctggcggatgggaaggtcactatccatcgccgtttcaagagcggcggctccaagcgtcttgaggtgaaagacaccgagcttgccaaagacgtgattcggaagctcggcgtcactggcggctatacctacgcaacggggcgtttgtgggcgaggcaccttctcaagaaggaacctcgtttgacacgggcactcgcccgcaggttttcgcacatcctagttgacgaggcccaagacattggtagattcgagggtgccttgctcgatctgctgagtgaggcaggctgcaccatctcactgatcggcgactaccatcagagcatatatggcttcaacttcgcgactggagagtatcttagaactttcgcggcaagagttgacgtgcttgagttacccctgactcaaaacaggcgctcactggagagcatcgtgcaggcggcgaactcgcttgctggaaccgtatcaaaaccgtttcgaacgccacctgagaggccaaacgggacatttttctggaagtatgacccgcaggaactgccgctcctaatgtcggcgtgggtgacagccctaaacgcctcgcggtactccatcgatgaagctgccgttctgtgccgtggtaacgggctactcgcaaagctcgcggcggcatcaagcgaggtagggcagtccgcggtgaagcattttgcgacagccgcgattgaacgcgagcaagctaccgacatctcgaaagttctcgaccattgcgcaaaaggcgtcatgaccatcttgtcgggcttgccacacagtttcattgccgacctgaagagcatgcgtggcgatacccatgttcagacacttcgtaggctcgtctggacgttgattcgtaagcccactacaggcatcccccttgctacgctacctgcgagaactgggtggctcaagcagttgaaggtgaatttagaagtctggctgaacctggtcgagcagacgacaccgtttcggcgccagccgacttggacgtctcgagttaccgcgaaagagctacctcagaccggcccgctcatcgcggccgacattgggcagaacgactggtctgcattgagatgcggaacggttcactcagcaaaaggggaagggctttccgctgtcatgtacctgaccgacagggacgacttaaaggctctggtcaatggtaccggaggcgaggaaggacgcattggctttgttgccgtgacacgtgctcgcgacctgttcgtcgtggccatccccgagagcacttctatcgatatgattgaaagaataaaagcacacgggtttgctgaatcggaccctgcgaagctgactgtggccgggacacagtcaatctga

SEQ ID NO: 80070 - DNA, 2142 bp, Burkholderia ubonensis; identical to SEQ ID NO: 80032

SEQ ID NO: 80071 - DNA, 1803 bp, Burkholderia ubonensis; identical to SEQ ID NO: 80033

SEQ ID NO: 80072 - DNA, 1905 bp, Burkholderia cepacia
atgaaactacagagcatccgactgtctggttttctgtcgtttggaccagaaccaactgaattgaccttcaacgatattacatacctgatcgggcccaacggttcgggcaagacagcggcacttcgggctttatgccgcctgttcgccttcgatccctcattgagacggattcagcgttcggattttcacgttccatacgacgaggatgctgttccggacgaaagacaactctggatcgaagctgattttgtctttcctgagctggatgaagattgcgacaattcgacggtggcaccgcacttcagccatatgcgcttggacaccgctgatggcttaccgcgagttcgatatcggctgagtgccataatgggagtggatggcgatatcgaggaaaccttggtctatgtgctggacctgaatggtgacggatctcccctgacgactgcacaggttccacgagccgaaagaaatcacgtgcaggttcactacctgcctgcacgccgcgatcctgcggaacacattgcgtacagtacaagtgcgttgcttgggcggatgctgagagcagttaactgggaaaacgagcgcgaggaagtcaaaggcttcacggaccagattagtgaaagtctcgccgcaaacccctccattgcggctttgagcgagagcttgaaggcgacttggggtacattgcacaaaggcagtttctttgccgatccccatatcaccttcgtcgcatccgaaattgaggcccttctacgacatttgtctgtctccttctcgcccggacacgacgaagaactagttgatttctctagactgagcgacggtcagaagtccatgctctacttgtcgctggtgctctcagcccaatccattgggcgcgccgtcctcgccggcgaggacgattcatttgatccggacaagctgcgtccgcccgtatttacgatcgttgcgctcgaggagcccgaaaacagcctgtcgccgcattacctgggaaggatcgtgaatgccttggtggctatgacgggaaacgaggacgcgcaggccctcatcgccacgcacgcgccctccatgctgaggcgtgtcgacccgcagcacattcgctacctgcgactcacggatgaacgtacgacaaagatcacgcgcattcgaatgcccaagaaaacggacgaggcgcacaagttcgttcgggaggctgtacaggcgtaccctgaaatctacttttctcggttggtcatcctgggagaaggtgacagcgaagaaatcgtcttgccccgaatcctgcgtgccaagggcgtcccggttgacgagtcggcagtgaccgtcgcgccgctcggaggccggcatgtcaaccatttctggcgcctgctctccgcgctcgaaatcccgcatctcaccttgctcgatttggatgtcgcccggtatcaaggtggatggggacgattcaaatatgccaacgatcagttatcgaagtaccgagccaaagacgtccttcctaaacattacggaattcccgagtggaattcagacgaaaataaggtccgaaagtacccgtggtacatcgaggcgcttgaaaaacgcggagtctttttctcttttccgatggacctcgacttcgcgatgcttctttcctatccggatgagtatggcgttgaatcgaatccaccgagtgaacccaccatcaaggctgtcctcggcgacagccaccacgatgccaagcaatacaatgccaatgagcttggcctgttcggcacctatcacaagcgcttcaagctgggtagcaagccggcagcacacatcgacgcactggcccaactgagcgacgaagaacttctcgctgacatgcctgagtctctgagtcgcctggcggacgcggtgatcgccaagctgaaggggttgccagagtga

SEQ ID NO: 80073 - DNA, 1665 bp, Burkholderia cepacia
gtgatcgcagcggacacctggcatccagcagatggcctgacgctcgaacccaacgcttggcgtgcggcgatggaaacggaacgctgtcttgcgctgacagcggggccgggggcgggcaagacagaaatgctggcacagcgcgccgacttcctgttgcgtaccggaacctgcccctatccaaagcggatactggctatctcgttcaaagttgacgccagtaaaaatctgaaggagcgtgttaagcgccggtgcggttcagatatggccgcgcggttcgacagttacaccttccatgcttttgctaagcgaataatcgatcggtttcgtccggtgctaaccgggcaagatgcccttgatgtcgattatcggattggtggccagcgagtcgcgcgacgccagatcgaattcacggatctggtgcctctggctacccagattttgagagtctcggccgttgcccgtcgtgctgtccgtcaaacctacagcgacgtcttcttggacgagtttcaggactgcactaaccaccagtacgagttggtgaagattgcctttcaaagaacggccatccgccttacggcggtcggcgacacgaagcagaagattatgggatgggcgggcgctctagacggtatcttccagacctttgcaacagacttcggtgcggtgtcactcaacatgtaccgcaacttccgttcgaagccccgccttttgcgcatgcagaacgagatcatccgtgtgatggacctatcttctgttatgcccgatgagcaacttggaggtgaggaggggcatatcttcgcgtggcgttttccggatagccagcaggaagcggagtttgtggctaacgcaattgacaactggatcaatcatgacaagcttgtaccgtcggaaatcgcaattctggtcgcccgacaacccgacctgtatgccgaccatctgatggcagcgatggagcggcgaaatatcccattccgaaatgagcagcagatccaggacatttcggtagagccagccgcaagactcatcgttgactacctgtcctgtctatacgggcagcgcgctcccaaggcttggattcgtctaatggaccagttgattcctttcggtgacgaagacgtccagaccaacttgcggcgaaacactcaacgctttatagcggagcaacggaaaaaggctgttcttgtcgagtcgttgggcgagcctgcaacggattggtgggagtcagtacgtgaattcttgcgccatgtgggaatcgagaccctgtcagcactttcgccggactacgagtccaaggctcgattgaaggaggtcattgctgacaccaaggttcggatcgaagaactgcagaagatcgagcctgacctgccgaaggctctagcgcggttttccgacgatcaggcagtacgaatcctcaccatacacaagagcaaagggctcgaattcgattcggtggtcattctcggtgtcgaaaaccaaacgttctggggcaacgcagatgcagagcgatgtgctttttttgtggcggtctctcgagctaagagtcgtcttgtcttgactgtaagtgatcgccgacaaacgcctccgtcgaatcctttccgatggcaggagaatagaacgactcacagcgaattcatggcctatgccacgccgtttatcagcctctaa

SEQ ID NO: 80074 - DNA, 2268 bp, Burkholderia ubonensis
gtgaagataaagacaataaaaataaagaacttccgcttgctgcatgatatttctctgcagctcgaagacgagaccacagtcgtggttggacgcaacaactgcgggaagacctcgctctccgacatcatccgcaaattcctgtcggaacggagcacgttcgagatcgaggacttctcgagcgcctgctacgacaaattctgcgcggcgcaccgagcgtacctaaaaggtgctggtatcgaagaggttcgggcgctcgtgccgtcaatcgatttacggcttcatgtgagcttcgacccgactgttcctgagttcggcccgctccgcgagttcgttatagataccgacgacagctgcaccgaggccgtcatcgtgtgctcgcgtagcctcgccgatggccggattgcagacctattcgagggacacgaggaaatcatcctgcacgggcacgacgaattgcactctgatggggatcgcctggcgctcttccgcagcttgaccgaccgcgtgccgacgctcttcacgacgcggatgtgggccgaggacccgcaggaccctacgaatacgcgtgacgtgacgcccaaggctgtcacaaacctgctgtcgctcggctttgtgaacgcccagcgtgcactcgacggcacgggtgcacgtggcactgacgtgctggcaaaggtactggagagcctgttccaaagcgcctccgtctcgacagcggacggctcccaaaagaatatcgcggatgggctcaaaaaggccgttgaggatatccagtcggggatggacacggatttcaagaaagaggtcgcgaagctcatgcctgcgattgagtatttcgggtatccgggcttggacaacgtgccgctgcagccggagacgaagctcgaagtcggcaagcttctgtccgacttcacgaaagttcagtacgccagttacagcggcgtgcagctaccagagtcctacaacgggctagggtatcgcaacctcctctatatcctgcttaagatcgttggcttcttccgcgagtaccgggcgcatgcgaacgcgcctggcgtgcagctcatcgtgatcgaagaacccgaagcccatctacatccacagatgcaggaggtcttcatccggcagttgccggagatcgttaaaaagctctgcgccttggagggcgagaacgtctcatggccggtgcaattcatcgtctcgacgcactccccgcacgtcgcgaatgaggcccgcttcgacacgatccgctatttcgccgtgacgtcgacggatctgccggttggtgttcgctgtactcaggtcaaggacctcagcagcgacctcgccggattgaaaggcccggcgtctgacttcctgcatcagtacctcacgctgacgcgctgcgatctcttcttcgcggataaggcggtgctgattgaaggaacaacggagcggctaatgttgccgcaagtaatgcgcgccctcgatgctgtcgatccctccctgaagcttggcagccaatacattacgatcatggaggtcggcggggcctatgcgcagctcttcattccgcttcttaaattcctgggcctgcgcagtctgatcattacggatctcgacgccgtcaaacgtaacgccaagaagaagctcgaagcttgtctcgtccacgagggggagaccacgagcaattcctgcatcaaacactggttcaacacggtcgaagctacggccccggtgcccgaagcgcctgctgataaacagacgacaacacctgatcccgtgccgcaagcggcttcaacggccccagcttctgcgacggcagaggtagcagtcgccgagactgctgacgacgaggaagaagtaccggatggggcgaccttgttccctctgtcaacggcattggcggcagacaacgctgccaagactcgcggtagtctgcgcctcgcatatcaggtgccggaagcgtcagacgggccctgtggtcggacgttcgaagacgcgttcattcttgcgaaccagacctttttcggcattactggcgcgacgaatgacgcactcgcgaaagccgcccaggacaaggccgcgaagcagaagaagtcaaagttcgcgctgacctacgcgattgagagaaccgactgggtcacgccacgatatattgaagagggcatgcgctggctcgccgcgagcaatgttgtcgtcgctaatcctagcgtggcgctcgccgccgaggcgcaggccatcaatgcgatcaatatacccaccaacacgccaacttccggtgaagccacatga

SEQ ID NO: 80075 - DNA, 1740 bp, Burkholderia ubonensis
atgagcggggccactcatcccaatccagctgaagccgctgccgccgccgcttgggaagcgctgaaaggttgcctcgacgacgggtcgagcttcgtgttcgaggcgggcgctggcgccggcaagacctactcgctgatcgcggcacttcgctacatcctgaaggaccagtcgcgggagcttcaacgcacgcaccggcaagtcgcgtgcgtcacctacaccaatgtcgcgcgggatacgatcatcgcgcagactgatggcgatccggcgatctactgcgacacgacccacgcgtttgcgtggatgctcgtcagcccatttcagaaatggcttcgcgaacttgtccgcacgctgccgggctgggcagatcgcatcgaagaactcgacgccgcgaacatcacggcagttgggtacacgctcggtcggcgctccatcgaagatggcacggcgaacttgcaccacgatgacatttttccggtgtttatcaagctcatgcagttcgcgaagttccgcaatgcggtggcgtcgcgcttcccgctcatcctcgtggacgagtaccaggacacgaacgtcgaactcgttgaatgcatcaaggaccatttcatcggcaagccgcacgcgccgcaattcggcttcttcggtgaccattggcagaagatctatggcgatggctgcggttcgatcgcacacgacgcgctgaagcgcatcgacaagaaggcgaacttccgcagcgcgaagccaatcgtcgacagcttgaacttgatccgtccgaagctcgctcaggcggtgaaagacccggctgcgccgggcgaagttcacgttttccacaccaacggatggggcgggcgacggctcacggcgaatcactggcagggcagcctccccgctgccgaagccacacgagcgcttaacaatgtccgctccgcgctggagagcgttggctgggattttgccggcgacacgaaggtccttatgctaacccaccgggcgcttgcgacggagatgggctacagctcgatgcggactgtcttcgcgttcaacgattcctttacgcgtaaggccaacgaggtcatcgcatacttccacgaacatcttgaaccggcggcgcgggcctacctcaccaagcggttcggcaagatgttcgaagcgattgatgctgagcgtccggtgatgaacgggccggccgataaggctaggtggtcggacaccatgaggcgactctgcgaacttcgcgacacgggcacggtcggcgacgtgctcgcatatctgtcctccaccggcctgccgatcctctcagacgcggtcgtgcgccaggagaaggcgcttgcggacgcgctcgcgaatggcgaaccgctgacgggacgcgtcaaagagctccatgcgcttcacgcagtgtcctaccaagagatcatcgcgctctgcaaatatctcgacggtcactcgccttttgaaaccaagcatggggtgaagggcgatcagttcgaaaatgtcctcgtcgtgttcgggcgcggctggaacgattacgacttcaacctctatcttaagatggccgggaaccccggcctgatcggtgctcgaacggcggactacgagcgttaccgcaacctgttctatgtcgctgtctcgcggccgaagaggcgcttggcgctggtcttcacgcatctgcttgagcccggcgcgatggcgactctgtcgggatggttcgcgggccacccgatccgggatatcggtccggcgctataa

SEQ ID NO: 80076 - DNA, 1872 bp, Burkholderia cepacia; identical to SEQ ID NO: 80004

SEQ ID NO: 80077 - DNA, 1827 bp, Burkholderia cepacia; identical to SEQ ID NO: 80005

SEQ ID NO: 80078 - DNA, 1893 bp, Burkholderia cenocepacia
atgcaggtcgcgcgtatccacatcgagaattttcgaggtgttaaggacacgactcttgaattcaccaagcatgcggttcttctcggggacaacaacacgggtaaaacaacggtgttggaggcgctagaccttgtcctcggacccgaccgactgaacaggactccgccgatcgatgagcacgacttctaccacgggagatacgctgctaaattcaataagtctgccttaaaagatcaggacgagggcgaacagaagaagcctgccactgagaatggcggagccggcgagcaggaaagtgacgctggagaagggccaccagccgaagatcaggcgctgcagatcagggttgatgtcacgatcattgacctatctgaggagcagcacaatcgattcggggactacatcgaattctgggacaacaaagggaaggatctctatcaggaagccgccccagaaggagttgatgcggacacagtctcttctgctctacgcgttaccttcatcggggagtacgacccggaggaagacgacttcgatggcaggacgttctttacgctaacgctcgtggacgggggcaagccccaaaccttctcgaggaaggataaacaggtctgcggattcctctatctacgctcaatccgcactggctctcgcgcgctgagcctcgaacatggaagtctgctggacatcatcctgcgcctcaaggaggtgcgtcctcaaatgtgggaggacgctatcgggaaactctccgcgttctctgtcgcggaagacccgagcctcggcatatccgggatcctcgaaagtatcaacaatgcattgaagaagtacgtgccgaaggaatggggcatcgagccacatctcaaggtctcgaacctcactcgggaacatttgcgcaagatgatcacggcgttcatcgcgaccggcgatggagcgcacgccgctccgtactaccggcaggggaccggtactatcaacatgttggtactcgcaatgctctcgcagatcgctgaggacaaacagaacgttatcttcgcgatggaggagcccgagaccgccatcccgccctatgcgcagaagcgcatcattcacgaggttcgcaatctggcgtcgcaagcgctgttcacgtcgcactcgccatacgtgctggaagagttttcactcgacgaaaccatcatcctctctcgcgacttcgccggaacaatgaagcaatccagggtctcgctcccggaaagtgtcaagctcaaacgctataggcaggagttcaggactaggttctgtgagggattgttggcccgccgtgtattggtagcagaaggtgcgaccgaagcttcagcatttccggtggcatgccggcgtttggccgaacttgatccgaccaagtacgcttctctggaagcgctcggtgtttgtgttgtcgatgctggcggcgagggaagcatccctgatatggcgaagctgtacaaagagatcggaaaacggacgtttgccctgtgcgacctgcaagacgccgcagcccaggcgcaaattcaagcacaggtcgagcacatgtacatgcacagcgagaaaggaatcgagaacctcattctgaagcacacgccgcaggcggcgatggagaggttttgtgaccttctccaatggccggcagacctagcgtcgaagttccccagtccgaaatcggatattgtcaacgccctcatggcgtatttcgcgaagaaaaagggggacttcggcatagcggaatacgtggcccaatgcagcgaggccgaaattccgcaatggatcagagatgcctgtatccacctgaagggcctgtgcatgccgtcgcccacgcctgctgcagcgggcgcgacgccaagcgacatctcgggcagtgatgacgatgaggctcactga

SEQ ID NO: 80079 - DNA, 1806 bp, Burkholderia cenocepacia
atgaggctcactgagaagcagaaggaggtcgtcgaagccgatggcaatctcctggtgatcggtggcccgggggcaggcaagacgaccatctcaatcttcaaggcggcgacggtcgcggcgtccttgcggcccggtcaggcggttttgttcctcagcttcgcgcgtgccacgattagccgagtcatcgaagccatcgaatacgaacacgaccttcccagtgccatcaagtcgcggatcaacgttgagacctatcactcgttcttctggcgcgtcctccagactcatgggtatctgctcggcctgccgaggccgctaacgattctgactcccgccaacgaagcgatcgcgctatcgactatccgtagcgaatacaaggccgaaggcaagctcaatgaggtggaaagaggcgaaaagaaggataaggagaaaaccgaacgacttcgattggccaaggtcgaggggcgcgtgtgcttcgacctgtttgccagccaagtcgccgaacttcttgagcgaagcaagcggatccgccagctgattgctgctcgctaccccgtcatcatcctggatgaattccaggatacgaatgccgatcaatggcgcgttgtgcagcagcttggccgcgagggcacgttggtcgctttggcagatcctgaacagcgtatctatgactggatcggcgcagatccggcccgactcgaccagttccgagctaaattcaagcacacagagttcgtgctgcaaggtgagaaccatcgcagcgccggaaccgagattcttcttttcggaaatgagatcttgactgggaagttctcgaagaagaagtacctcggcatcgaatttaagttctattctgcgaacgagaacgaagcatgcaccgctctcgtcacccagacgtatgctgctcgcaagaggctcgtcgattcgaagaaaaaggactggtcgctggcggtccttgttcccacgaagaagatgacgcgaacagtctcggatatgttcaggcagccgctcgcgaagatgtcaccgatccgacactcagctgcagtcgactttgatgcagctattttgggagccgagattgtctctttcatgctgcagccgccaagtctcttccacatcgatgggatgatcgatctcctctgcaactactaccacgggaagggcggcgactcgccgacgaaatcggacctgcagcaggcgacgagcatccgcaaggcattcgtgctctacgcagagaagcaggccgacggtaaggcgctgcccaagaacagcctcatggttccgtttttgcagacatacgaacaagtcagagcaatcccccttactggggatccggatcaagactggcgagcggttaggaggggcatggagaatggctcttgcgcccgcttgaaggaagttgctgtcgaagtcaaaaacatccgtctactggagcgcgggactcaattgcgccaggaactctcgcaggactggcgaaccttcgggcgatatgaaaacgccttggaaattacaaggcaggcatttgttcgcgagcacttcgctacgcagtcaaaccgggaaaccgggatcgtcgtgatgaacatgcacaaggccaagggaaagcagttcgacgaggtgatcatctttgaaggttggccccgctatgtaaagaagaagatcgtcgccaacccagatcggattgtgaggacaaatctgaaggagaacattgacgggcagacgagacagaatcttcgagtcagcgtcacacgaggaaagcaacgaacgacgatccttaccccgcgggaagacccttgcgtgatcttcatctag

SEQ ID NO: 80080 - DNA, 2085 bp, Burkholderia cepacia
atgcgagtcgaaaaggttagggtcgaggggtttcgactccttcaggatgttgagatcatgctggaggacaattccacagtgatcgtggggcgcaacaacagtggaaaaacatcattcaccgacatttttgatcgtttcaccggagagactggggcacggtttcgtctggaagacttctcggctgcacaacgcgagcgtttcttcactgcaaagacgctaagagagcaggcagccaagccagaagacgtactcgctgcactcccgacgctctctcttacgctcaccttccgctatgacggcaccgcaccaaatttggggcctcttgcgcctttcgtcattgacctggacgtagactccaccacggccattgttcgcgttgagtaccgccccgtgttggcagcactccacacgctgctcgacataccgcctgcgcccaaaggcgttgaaccaagaacgcatttcttccgctcgttgcgcgacacgttgcccaaggcatacagcatccatgtgtccgccatcgaccccaccgacgataccaatcggcgtgattttgacggcacggccgcactatcggctttgctgcagtgcaatttcgttcgtgcacaaagaacgctcgaccatgcgaagcatggcgatgccgatgtcattggcaaattgctcagtgcgctattcaagactgcttccgcgccaactgcagcaaccacagatcaggaactggcggcgaagctaaaggcatccgtcgaagacatcgagcgcaatgtgcaaagcgacttcgatgagatgctgaagaagctgctgccggccatggaggtactgggctttccgagcctcaacgataccgaacttcggcccgagacctcattgaatgtggaggccctgctttcagaccatacaaaggtggtctacacaggcacggacggggtacacctcccggagggatacaacggcctcggcactcgcaacctgatctacatgttgctgcagcttgagagctaccacaaggcctaccgggccaaggcaacccgccctgccagccatctaatcttcatcgaagagcccgaagcgcacttgcatccgcagatgcaagaggtcttcatcaaccaactgaatgcagccattggaaagctgtcagcgagctaccccgaagaggctgcgtggaacgttcagttcgtcatcacgacgcactctcctcatgtcgcaaatgcggcttcgttcgaggcagtgaggtacttcctcaatgagccgccgacccaggttaatgctcgccagaccaaggtcaaggatttcaaaaagggcatgagcagcatctcttccgatgaccaggatttcttgcatcagtacatgacgttgaccaagtgcgacctgtactttgccgacaaggccatcatggtcgagggtacgacggagcggctgttgatgcctcgtctgtgcgaattggttgacaagtcactcgacgacaaacacaagctggccagacagtatgtgacctgcgtcgaggtcggcggcgcttacgcccatatcttctatccgctcctcgacttcctcgaactcaagaccctggtcgtcaccgacttggattcaaccaaaccggtagaaaagcagaacaagaagggaaccacgattaccacatgggataaatgtccggtggctgatggccagcggacatctaacgcagcgatcaaggaatggttccgccccaaggacacacaagacaaggacgattggcagatcacacctgccgagcttgttaccaagacggccgcggagaagcagagcggctaccgtcgcattgcctttcagatcccagagaagcctgacacgaacgtgtgcgcgcgcagctatgaagatgcgctcgtcctagccaacccagatcggtttgagtggccaaaggaacaggacgaagccactgaggcatgggagatcgcgaagggactcgcgaaggcggatacggctttgcgctttgcgattcgcgagaaggcgtggacggttccccgttatatccaggaaggcctcgcctggctttccgagcctcctccacctcccatgcagaacgtggaagcgccagccaagggagctgcggtatga

SEQ ID NO: 80081 - DNA, 1734 bp, Burkholderia cepacia
atgaccgagcccaccgagaatccagcactcatcgctgcgcaagaagcccaaaaaaagatcaatgaggctcttgatgcagggcgaagctttcgacttgaagccggtgcaggcgcgggtaagacgtactcgttggtcgctgcactgaaacggctcatcgcagagcgtggcccggccttggtgcaagccggacagaaggttgcctgcatcacctacaccgaagttgccagaaatgagatcgcccaggagattgaggatcaccctgccattctggtggataccatccacggtttctcctgggccttcctacgccaatttcaaaaggcgctacgcgacctcgtgggagaaatggatgacaggaaagaaaaggtcgatcaaggcggaggcattagctcaaagcccgtggattacgacttgggattctttggcgttgacaccgacagaatcacactgagccacgacgatattccggagatgatggccaagctcctgcataaggataagttccgacgtatcttgagccagcagtttccagtgatcttcatcgacgagtatcaagatacccatcgccaattcatggaggcgattaccgagcaattcttgaagcccgccacaggccccctcattgggttctttggagatcattggcagactatctaccgcagcgaatacgaactcgctgattacccgattgaagagattggcaagggctccaactttcgatcagtaccggcagttgtagatgtacttaacaggctgcgccctgagttaccccaagccgttcgcgaccctgacgcaaagggcgaggcaaggttttttcatgccaatgcctataagggggagcgaaccaatagttctcactccaaggaggatctaccacccgatttggcgcgaaacactcgggaggccttgatgcaacggctgcaagcagagggttgggatttgagcaagacgaaggtgctcatgcttacccacaacgtcttagcggctgaacagggctatcccaatatcgctgaagttttcagcggccgcaccgatcagttcgcaaagaaggaagacccagcactcaaattcttcgcggaaatcgttgaacccatgtgtgcagcctacaacacgtctcgctatggagatatgttcagggtattcggctcaggccctgcgatcaccaagcacgaagacaaagctcactggcgtcgcgatatggatacccttcaaaagctgcgtacagagggaaccatcggacaggtcatcgaccacctgaagacaacgagacgcccctctcctccagagcgcttgctgcgacgtgacgcagaacttgtcgcgctaaatggtgcgcctattcctgaagatgcttcagcacttcagcggtacagcaaactgcgggacatcccctacaaagaagtcgtcgaggtggtcaagttcgttgagaagcagactccctttgctactcagcatagcgtcaagggtgctgaattcgaaaatgttcttgttgtgcttggaggcggctggaaccactacaactggccacaacttctagaactgctgaagacaaatgcgctgaatgcaaagaacacgaagggcttctatcgtgctcgcaatctcttttatgtctccatctctcggcccatgacacgactcgcagtcctcgccacacaaaccatgcctgatgctgcgctcgcagcggtgaaccacctttttggcagcgataacgtcgaggaacttgctatcgcaccataa

SEQ ID NO: 80082 - DNA, 2070 bp, Burkholderia ubonensis; identical to SEQ ID NO: 80060

SEQ ID NO: 80083 - DNA, 1737 bp, Burkholderia ubonensis; identical to SEQ ID NO: 80051

SEQ ID NO: 80084 - DNA, 1905 bp, Burkholderia cepacia; identical to SEQ ID NO: 75050

SEQ ID NO: 80085 - DNA, 1668 bp, Burkholderia cepacia
gtgatcgcagcggatacttggcgtccagcagatggcttgacgctcgagcccaacgccttgcgcgcggcgaaggaagcgaaacgttgccttgcgctgacggcagggccgggggcgggcaagacagaaatgttagcgcagcgcgccgattttctgttgcgtacagggacctgcccctatcccaaacggatactggctatctcgtttaaagttgacgccagcaaaaacctgaaggagcgcgtgaagcgccggtgcggtccagatatggccgcgcggttcgacagctacaccttccatgccttcgcgaagcggataattgatcggtttcgtccggtactaaccgggcaagatgccctggatgccgattacaggattggtgacagacgggtcgcgcgacgccagatcgaatttacggatctggtgcctctggctacgcagattttgagaatctcggccgttgcccgtcgtgctgtgcgtctgacctacagcgatgtcttcttggacgagtttcaggactgcactaaccatcagtacgagttggtgaagattgcctttcgaggaacggctatccgtcttacggcggtgggagacacgaagcagaagattatgggatgggcgggcgctttagacggtatcttccagacctttgcaacagacttcgatgcggtgccgcttaacatgtaccgcaacttccgttcggagccccgcctgttgcgcatgcagaacgagatcatccgcgtgatggacccatcgtctgttatgcccaacgaacaacttggaggcgaggaggggctcatcttcgcgtggcgttttccagacagccagcaggaagcagagtttgtgactaacgcaatcgatggctggatcaatcatgacaagctcgcaccgtcggaaatcgcaattctggtcgcccgacaacccgacctgtatgccgatcatctgatggccgcaatggagcggcgaaacatcccattccgaaatgagcaacagatccaggacatttcggtagaaccggccgcaagactcattgttgactatctatcttgtctgtacgggcagcgcgcacccaaggcttggattcgcctaatggaccagttggttcctttcggtgatgaagacgtccaggccaacatgcggcgaaacacccagcgcttcatagcggagcagcggaaaaaggctgttctcgtcgaattgttgggcgagcccgcaacggattggtgggagtcggtacgtgaattcttgcgccatgtggggatcgagaccttgtcagcactttcgccggactacgagtccgcggctcgattgaaggaggtcatcgctgacaccaaggctcggatcgaagaactgctgaatatcgagcctgacttgccgaaggcactagagcgtttttccgacgatcaggcagtacgaatcctcaccatacacaagagcaaagggcttgaattcgattcggttgtcattctcggtgtcgaaaaccagactttttggggtaacccagatgcagagcgatgtgcgttttttgttgcggtttcgcgggctaagaggcgtcttatcttgaccgtttgtgattgtcggcaaacgcctccgtccaatccctatcggtggcaggaaaatagaacaactcataacgaattcatggcttacgccacgccattcctcagcccccaatga

SEQ ID NO: 80086 - DNA, 1788 bp, Burkholderia anthina
atgcggatatcaaagatacgaattgtcaatttctccaatttcgcaaatcttgaggtcgagactggcgagaatatagtaattgttggcgagaacaaggtcgggaagagcaactttctttgggcgctgcaattggtactcgacccggggctttccgaacttgaccggcggcttggcctcgaacacttctgggacggcctcggggaaaataaactcggcgcaactgtagaagtttcggttgagctcacagacttcgacgacaatccggacctgatcgcatgccttgccgatgcaatcgtgtcgccaggccccccaacggttgcacgcttgacctacagatttcgaccgatggcgagcctcgggggaaagccaccggagagtcttgcgcagtacgagtacgtgatttttggtggcacggacgaaaacaattcaattggtgcaccgctccgacggagactgccattggatgtgcaggccgcattacgcgacgcagagaaggacctgctgagttggcggcgctcgccgttacgcccgcttatcgaagaattgaccgaggaccttgacgctgacgcgcgcgaagaaattttgcagatggttcgtgaggctcagaccgaactcgcagaccgggacgaagtggtttctactgcggagagaattggcaaaagactactcgacatcgttggcgacaaacatgccgtcccaatcaagcttgggttggcgccgacgcgagtagacgcactgctgcgcgggctgcgcatccttattgacaatggagcccgtggagtctccgatgccagtctcgggaccgcgaatctgatatttctcgccctgaagagcttggagcttgaccgtctggtggtcgagggcgagcggaatcacacgttcttcggcattgaggaaccggaggcgcacctgcaccctcatgtacagcgtctcgtatatcgatactttcttggcgtgaacgccgcgccggcccagcagcctcgcagcctttcgacgatattgacaacgcactccccccatatcgccagcgttgccccgctccgttcgatagtattgttgcgtaaggatgtcacgcaaggtgcgaccatcgcaacgtcgtcggccaaggtgccattggaggaacgcgaagtctcggacttacaaagatacatcgacgttactcgaggagagctcttcttcgctcgaggcgtgatttttgtggaaggtgacgcagagcgattcctaatccccgcttttgccgagaagctaggaatccacctcgacgtgctaggtatttcagtctgctccgttagtggcgtcaacttcacaccttatgtgaagctcttgagcacgcgaagcctgcatataccgcacgtcgtcatcacagatatggacccaacggaagggggcgagcctctcgccataaggcgcatttcaaagatgttgcaagcccggaatggaccacctactgcgccagggctaacgaatgagagaattattgagcttggagaagccagcggtttctttgtgaacgagaatacgctcgaaattgatgttttcaaggccggcctggggccggctatgtgtgatgtattagagcaagaaatacccttcaacgataaatctaaggccatcattgatacttggcggaaggacgcaggaaaattagatagagaaagatttttgaaagccgtcgagagagtcggcaaggggcgcttcgcgcaggcgctcgcacctcatatcacgcctgccgcttgtccctcatatattcgcaaagcactcgagtacattcgcaatgccgtctcgtaa

SEQ ID NO: 80087 - DNA, 1332 bp, Burkholderia anthina
atagccgatagaaccttgccggcatggcacgccaacgaggaattggctgcgctggccgagttgtacgaaattgagctacatagagtcggattggtcgacttcgaggacctagtgcgatacggcacacgccttgttcgtgagcacgattgggtgcttcccctcatccgcgcaaagtttcctgtccttgcagtcgatgaatatcaggacctcggggcgtcgttgcaccaaatcgttaagcgcctggcattcgatggtggcgttaggttgtttgcagttggtgacccggaccaatctatttatgggttcaacggtgcagatagcaaattgttagaggagcttacgaataggaaggatgttgaatcggttcgcctcgaagtaaactaccgcagcgctgagcatattgtccgggtggccgagcgtgcgttgggcgaaccgcgcggttacaaggcctttgacgaaacgaggagtgcgcgggtagtaatggtgaagtgtccagatggactcgcttctcaagctcagcatgcggtgtcgaaaatcgtgcaagaggcgcttgctagcaagccgggtcgccagttaggtgatatcgcaattttgtaccgtactgcggagctcggtgatattgtcgcggaagccgcgaccaatgaagggctcgatttcattcgcgtggacaatgctgctccctacaggaaatgcacattgacgagctggatagaggattgtgcggcgtggtgttcaggtggctggggcgaagccaaacctagattgcagtcgcttctttctcgttatgcttcgtttcggcgtcgctcgcctgatgagcgaaccattcgggaagagtctcgtcgactgaccgagtttctctggaatcgtcgcggcaacggggtagcactagatttcgtgtcggctcttaggacagaaatgctcgacgccatggcggcgacggaagcgacgttagccgaccaaatggcccaagtaaatgcgatgagcaaggcgctcgcgaagggaggcgccattcatgggcttgatatggcgcgtcttggtggacgagatggctctcccgaccacctaaatctcttgaccctgcactctgccaagggttgtgagtacgatgttgtcgtcatgcttggactcgacgagggggtgtttccttggagcaatgaagacggtgcaaccctagcagagagtcgtagattgttctacgttggactgacgcgagcgcgcgacgcggttcacatgctttactcgggctggacggtgaacaaatacggacgtaagttctataatggccgctctcgatttttagacgagctcgcagggaggaaggaaggaggctag

SEQ ID NO: 80088 - DNA, 1893 bp, Burkholderia stagnalis
atgcaggtcgcgcgtatccacatcgagaattttcgaggtgttaaggacacgactcttgaattcaccaagcatgcggttcttctcggggacaacaacacgggcaaaacaacggtgttggaggcgctagaccttgtccttggacccgaccgactgaacaggactccgtcgatcgacgagcacgacttctaccacgggagatacgctgctaaattcaataagtccgccttaaaagatcaggacgagggcgaacagaagaagcctgccactgagaatggcggagccggcgcgcaggaaagtgacgctggagaggggccaccagccgaagatcaggcgctgcagatcagggttgacgtcacgatcattgacctatctgaggagcagcgcaatcgattcggggactacatcgaattctgggacaacaaagggaaggagctctatcaggaagccgccccagaaggagttgatgcggacacaatctcttctgctctacgcgttaccttcatcgggaagtacgacccggaggaagacgacttcgatggcaagacgttctttacgctaacgctcgtggacgggggcaagccccaaaccttctcgaggaaggataaacaggtctgcggattcctctatctacgctcaatccgcactggctctcgcgcgctgagcctcgaacatggaagtctgctggacatcatcctgcgcctcaaggaggtgcgtcctcaaatgtgggaggacgccatcgggaaactctccgcgttctctgtcgcggaagacccgagcctcggcatatccgggatcctcgaaagtatcaacaatgcattgaagaagtacgtgccgaaggaatggggcatcgagccacatctcaaggtctcgaacctcactcgggaacatttgcgcaagatgatcacggcgttcatcgcgaccggcgatggagcgcacgccgctccgtactaccggcaggggaccggtactatcaacatgttggtactcgcaatgctctcgcagatcgctgaggacaaacagaacgttatcttcgcgatggaggagcccgagaccgccatcccgccctatgcgcagaagcgcatcatccacgaggttcgcaatctggcgtcgcaagcgctcttcacgtcgcactcgccatacgtgctggaagagttctcactcgacgaaaccatcatcctctctcgcgacttcgctggaacaatgaagcaatccagggtctcgctcccggaaagtgtcaagctcaaacgctataggcaggagttcaggactaggttctgtgaaggattgttggcccgccgtgtattggtagcagaaggtgcgaccgaagcttcagcatttccggtggcatgccggcgtttggccgaacttgatccgaccaagtacgcttctctggaagcgcttggtgtttgtgttgtcgatgctggcggcgagggaagtatccctgatatggcgaagctgtacaaagagatcggaaaacggacgtttgccctgtgcgacctgcaagacgccgcagcccaggcgcaaattcaagcacaggtcgagcacatgtacatgcacagcgagaaaggaatcgagaacctcattctgaagcacacgccgcaggcggcgatggagaggttttgtgaccttctccaatggccggcagacctagcagcgaagttccccagtccgaaatcggatattgtcaacgccctcatggcgtatttcgcgaagaaaaagggggacttcggcatcgcggaatacgtggcccaatgcagcgaagccgaaattccgcaatggatcagagatgcctgtatccacctgaagggcctgtgcatgccgtcgcccacgcctgctgcagcgggcgcgacgccaagcgacatctcgggcagtgatgacgatgaggctcactga

SEQ ID NO: 80089 - DNA, 1806 bp, Burkholderia stagnalis
atgaggctcactgagaagcagaaggaggtcctcgaagccgatggcaatctcctgttgatcggtggcccgggggcgggcaagacgaccatctcaatcttcaaggcggcgacggtcgctgcgtccttgcggcccggtcaggcggttctattcctcagcttcgcgcgtgccacgattagccgagtcatcgaagccatcgaatacgaacacgacctccccagtgccatcaagtcgcggatcaacgttgagacctatcactcgttcttctggcgcgtcctccagactcatgggtatctgctcggcctgccgaggccgctaacgattctgactcccgccaacgaggcgatcgcgctatcgactatccgtagcgaatacaaggccgaaggcaagctcaatgaggtggacagaagcgaaaagaaggacaaggagaaaatcgaacgacttcgattggccaaggtcgaggggcgcgtgtgcttcgacctgtttgccagccaagttgccgaacttcttgagcgaagcaagcggatccgccagctgattgctgctcgctaccccgtcatcatcctggatgaattccaggatacgaatgccgatcaatggcgcgttgtgcagcagcttggccgcgagggcacgttggtcgctttggcagatcctgaacagcgtatctatgactggatcggcgcagatccggcccgactcgaccagttccgagctaaattcaagcacacagagttcgtgctgcaaggtgagaaccatcgcagcgccggaaccgagattcttcttttcggaaatgagatcttgactgggaagttctcgaagaagaagtacctcggcatcgaatttaagttctattctgcgaacgagaacgaagcatgcaccgctctcgtcacccagacgtatgctgctcgcaagaggctcgtcgattcgaagaaaaaggactggtcgctggcggtccttgttcccacgaagaagatgacgcgagcagtctcggatatgttcgggcagccgctcgcgaagatgtcaccgatccgacactcagctgcagtcgactttgatgcagctattttgggagccgagattgtctctttcatgctgcagccgccaagtctcttccacatcgatgggatgatcgatctcctctgcaactactaccacgggaagggcggcgactcgccgacgaaatcggacctgcagcaggcgacgagcatccgcaaggcattcgtgctctacgcagagaagcaggccgacggtaaggcgctgcccaagaacagcctcatggttccgtttttgcagacatacgaacaactcagagcaatcccccttactggggatccggatcaagactggcgagcggttaggaggggcatggagaatggctcttgcgcccgcttgaaggaagttgccgtcgaagtcaaaaacatccgtctactggagcgcgggactcaattgcgccaggaactctcgcaggactggcgaaccttcgggcgatatgaaaacgccttggaaattacaaggcaggcatttgttcgcgagcacttcgctacgcagtcaaaccgggaaaccgggatcgtcgtgatgaacatgcacaaggccaagggaaagcagttcgacgaggtgatcatctttgaaggttggccccgctatgtaaagaagaagatcgtggccaacccagaccggattgtgaggacaaatctgaaggagaacattgacggacagacgagacagaatcttcgagtcagcgtcacacgaggaaagcaacgaacgacgatccttaccccgcgggaagacccttgcgtgatcttcatctag

SEQ ID NO: 80090 - DNA, 1893 bp, Burkholderia stagnalis; identical to SEQ ID NO: 80088

SEQ ID NO: 80091 - DNA, 1806 bp, Burkholderia stagnalis; identical to SEQ ID NO: 80089

SEQ ID NO: 80092 - DNA, 2097 bp, Burkholderia pseudomultivorans
atgcgcattgaaaaggtcaaggtcgaaggatttcgactgcttcaggacgtcgagatcatactggaatctaattccaccgtgatcgtcggacgaaacaacagtggcaagacgtccctcaccgatatattcgatcgcttcacgggagaaaccggcgcccgcttccggctggaagatttctcggccaagtcgcgcagcaaattttttgatgcgaagacgctgcgagaaaaggaggccagcccagaggaaatactcgcggcactcccgaaaatcgtactgactcttaccttcgtctacgacagcgtggcaccgaatttaggccctcttgcaccattcgttatcgacttggacgttgcatctaccaaagcgattgtgcgcgtcgagtatggtccaacattagccacgctccacaccttgcttgatgtaccgacgccagcggaaggcgtaaatccgaacactcactttctccgctcattgcgcgaaacgctaccgaaggcgtacggcatccacgtatgcgccatcgacccgacagacgacactaaccgacgcgactttgagggaacggctgcgctagctgccttaatgcaatgcaacttcgttcgtgctcagcgtactctcgaccatgcgaggcacggcgacgctgatgttatcggaaaactactcagctcactcttcaagactgccgcaacaccaacagcggcggcggcagatcaagagctcgccgccaaacttaaggcttccgtcgaagacatcgaacgaaacgttcaagaagacttcgacgagatgctgaaaaaactgcttccggccatggaagtactgggcttcccgagcctcaacgatacggagcttcgaccggaaacctccttgaacgttgaggcgcttctttctgaccataccaagattgtctatacaggttcggacggcgtgcacttgccagaaggctataacggattaggcactcgcaacttgatttatatgctgttgcagcttgagagcttccacaaaacctaccgcgcaaaagcaacccgccccgttacccatttgatttttatcgaagaacctgaggcacacttgcacccgcagatgcaagaggttttcatcaaccaattgaatgcagccatcggcaagctatcggccagttaccccgacgagccagcctggaaagtgcagttcattattacaacgcattcgccgcatgtagcaaacgctgcgtcgttcgaggcagtgcggtattttctgaacgattcgacagagaaggcgagcactcgccataccaaggtcaaggatttcaaaagagggatgaccaccattcccgccgaagaccaggacttccttcaccagtacatgacactaaccaagtgtgacctgtactttgcagacaaagcgatcatggtggaaggaaccacggaacgactccttatgccgcgcctttgtgagctggtcgacaagacgctcgacgaaagacataagctggcccgacagtatgtgacctgtgtcgaagtaggtggcgcctacgcgcacatcttttatcccctactagattttctggaactcaaaacgctcgtcatcaccgacctcgattcaacaaagctgatggaaaaagagagcaagcacggaaagaagataaaaacatgggagaaatgcccagtcgccgaaggcgaacgaacctctaatgcagccatcaaagaatggtttcatccaaaagacaagaaggacgaggatgactggcaaatcactctagcagaacttgcgaccaaaacggcgaccgagaaacagcgcggctatcgcagaattgcctaccaagtcccggaggtggatggttccgccgtctgtgcccgcagttacgaagatgcgcttgtccttgccaacccggatcgatttgattggccgaaagaacacgacgaagcaacggaggcatggcatatcgcccagggcctcgcgaaggcggacaccgctttacggtttgcaattcgtgagaagaactggacggtgccgcgctacatccgagagggtctcgcatggctctccgaacctcctcctgcagagatagtacccactatagaaaatccggaagtgctagccaatgcggagaaagcatga

SEQ ID NO: 80093 - DNA, 1734 bp, Burkholderia pseudomultivorans
atgaccgaacctaccgaaaaccccgcccttgttgccgcgcaggatgctcaaagaaagatcgatcaggcccttgacgcaggtcgcagctttcgtcttgaagccggcgcaggtgcaggaaagacgtactctctggttgccgccctgaaacggctaatcgcgaaccgtggatcgacgttggttcaggcaggacaaaaggtcgcctgtataacctataccgaggtcgctcgaaatgagattgcgcaggagatcgaagatcatcctgcgattctcgtcgatactattcatggtttctcgtgggcgttcctacgccaatttcagaaggcgttgcgcgacctcgtgaccgaaatggaagacagacgtgaaaagatcgagcaaggcgggggcgtaggttcaaaggccgtggactacgacctaggcttcttcggtgtcgatgctgatcgaatcacgctcggtcacgacgacatcccagaaatgatggcgacacttctgcaacgcgaaaagtttcgccgcgtgctaactcagcagtttcccatcatcttcatcgatgagtaccaggatacgcaccgacagtttatggaggcgatgactgaacatttcttgaaacccggtgctggtccgctaataggtctttttggcgatcattggcagaccatctatcgcagcgaatacgagctcgctgagtacccgattgaaggaattggcaaaggttccaattttcgctctgtaccggtcatcgtggatgtactcaacaaacttcgccccgaactgacacaagccgtatgcgatcccaatgcgcttggtgaggcaagattttttcacgctaatgcctatagagggcagcgaaccaatgatagaaactcgaagggcgacctacctcccgaactagcgcgaaccacccgagaacggctgatggagcaactccaagctgagggttgggaacttagcaagaccaaggtactcatgctcacccacaatgttctcgccgcagagcagggatacccgaccatcgccgaaatattcagcggcaggaccgacttgtttgcaaggaaggaagatcccgcaatcaagttctttgctgagacagttgaacctatgtgtgcggcctatagcacctctcgctatggtgacatgtttagggcgtttggctctggtcccgccattatgaagcaccaagacaaagcctcctggcgtggcgatatggacgcccttcaaaagctgcgcaacgaaggaacggtcgggcaagtcattgaccatctgaaaaagacgaggcgcccgccgccgccggaccgccttttgcggcgcgatgatgagcttagagcgttcaatggccaatccatacctgatgatgccactgcgcttcagcgctacagcaaactccgaaatgttcgttacgccgagatggtcgaactggtgaagtttgtcgaaaagcagacgccctttgccacgcaacatagcgtcaagggagccgagtttgagaacgttcttgtagtgctcggcggcggctggaatcactacaactggccacaactactagagcttcttgaaacgggagcgctaaatgcaaaaaacacaaaagggttctatcgggcgcgtaacctcttctatgtctccatttcgcggcccatgacgcgacttgcggttctcgccacacagaccttgtcggatacagctctaactgccgtaggacggctttttggaaatggtaacgtgatggaacttgccattccgacgtaa

SEQ ID NO: 80094 - DNA, 2298 bp, Aeromonas hydrophila
atgagtgatccattagcaaagccccctttagtaccagaagtaagcctcacttgcatagaactcagtcgatttcgacgcttggcaaaggcttgtgtccagatcgacaggagaacaactgtcttagtcggagccaacaacagtggtaaaacatctattcttatcgctatccgcaatttcttggcctcaagtcaagtcttcggcgccttcgatatcagcattgaccaatggccaacgctgaaggcccttggctctgagtgggaaaaactgacagaagatcctacatcaatatcggaggatatcgatacgtggaaagagcagttggcagcactcttaggttctatgcctacattggatttgtggttcgatgctcagccaggatcttacaatctggttgcgcccttcattacctcgctcgactgggggggcggagcagtaggggttcgtctgcgccttgagccagcttcttcggtagaagacctccaacggctggcatggcgataccgtgaggctcggaatccagtcaaagactttaaaaagcaggctcatgcctggccagtagacctcattgattactggctgcgtcatccttccgaccttggtagtgttcttgtctataggctggatccagcactgggaccacttgccacccccccagcaactgcgccacagtccttatcgccaaaatcggtagctattgaccgaacaaaactatctaagctcctacgtgtcgacttcgttgcagcacaacgcggatttggtactgaggaagccgagtctcgctccagttctggtacgaatcgcgttggcctattttccaaccagctgctgaagtacgcccgtcagcatctgaacatagcgacgaaaggtcagggccatcagccagaactgattgcagccattgctcaagcccaggaagaccttgacgatcgaataaaagttgctttgacgccatccatagagcatgtaaagaagcttgggtatccaactcttcatgacccccaagagattcatttcagaactcgtatacagactggagatttgctcgaccacagtaccgcagtacagtaccgccttgatggagtgcaggctgacgtctaccttcctgagtattcaattggtttaggttaccagaacctccaatcgctgagttatcagctagtctcattcagagatgctcggctaacacccactgaaggtagcccaccggcagtgcaccttgtacttgttgaagaacctgaggcccatctacatgttcaggtgcaacgcatttttccacagcgagcaaccgagctcatcagtccgaccgcccctgaacatgcgcatctaagcagccaattagtcatcagcactcatgcaagtcatctagctcatgcagaaaacttcgaccgcttgagatatgtcaggcggattccgtccacagtaggcacgatgccgtgctccgatgttattgatctcgctacagcctttggaaccgacaaagaaacacggacatttgcggaacgatacttccgagtgcaacatacggacctactgttcgccgacgcggcgatctttgtagaaggcgcggcagagaggatgcttgttcctttgttcatcgagcgcgatttcgaagagctcgacaagcgctatatctccttcctcgacctcggcgggcgtcatgcccaccgactacgacctctcgtagagaggcttggaatccctacggttatcatcaccgatgtggacccggtgaaagtaacgaagggcgaaaatgataaggtcatacgaaaggcagcagcaatcgttgacccaaatagtcttgagtgcggaaatgacactctcaatagctggcaccccaagaagaaggaactgcatttgttggcagatccggtcgaagcagaccagacctggagcaacggaagcggcggacgggtccgatttgcatggcaggtcccagtatcccaaaacggcccttggccgagttcgtttgaggactctttgatattgtccaacattgattggttcaaaaacattgggcaagggattggcaagaaacccgcagaaggtgaggtagctacgccgaaagtgacaggtccattgcgcgtcgctgttaataccgttcttgccgaacaggatcctgcgaaactctgtattgcgcttcattctatgctgcgtgaaaacttcgcaaaggctgagttcgctgtaaccatgtttgaacgcatcagtgtgggcgacaaattagcttgtccaagctatatcgccgatgctctggcgtggctcgataatgaattagcgccgtcaaagaaggagttgacttga

SEQ ID NO: 80095 - DNA, 1986 bp, Aeromonas hydrophila
atggttagcgaaataatagatccgaatgagcgagatgctggtgtagtggacgaaattgtctcctatgtcacaagcacgccgcctagaagcttctttctttttgctggtgctggctccggtaaaacgcggacattagtttctgttctccgcaggatcactggcggcgagcaacaagacgcgcaaccggggtctaaggatacagcagacgacctggctcttcgatttgcacgagaactgagagctagagcccagactattcgtgtaatcacatatacgaaaaatgccgccttggtagtcaccggccgattgggtatcaacgatcttacacaagttgccaccattcactccttttgctgggacttgatcgcgggctttgacgacgatatccgcgaagctcttctggcattaaatagcagtgcggtagagaaggctcgggaagttgctgctggcaggaagaagggacctacagacaaagataaggctgtaattgcggaacttacggctaaagctataaccctgtccaaaactccacaattcatctacagccctgatcggaaacgattttccgatggagccctgagccatgcgcaagttctgagcgtagcagcttggctgctcaatcaaaaaccgactctgcggcgtattcttcgcgaccagcatccggttatcctgattgacgagtctcaggacacgatgaagaacattctagatgctctgcttgaagtcgcggcagaggacccgactcggttgatgctcggcttgttaggagatcaccgtcaacgcatctacatggatgggcatgcggaccttccgagcattgttccaccagagtgggctacccccaagttggagatgaatcacagaagtcagcgccgtatagttgatctaattaacgatatttgggatgccgatttggaagggcgaacgcagtctaaaaaggcggtgcgtcaacattctcgagaagagaaatcatcagggatcgtacgagtattcatcggcgatacggcggcttcacctgaagataaactgcgacgagaggccctttgtgagtctgcaatggagactgccgtgggtacaactgagtggcagcgagacaatcccggacacaagattcttgctcttgaacactcgttggttgctcgacgcggtgattttcttgaaatctttgaagcactagcactacttgatcccgattcagttcgaccagatacgacaggtgaagcttctggtcccgctgcggtgcaagttctattgcgagaaatgatggatctcgcagattgtgtagaaaatggtcaagtttcatcgaatttcgccgtcatggaggtccttcatcgctacgaccggcttttgaatctttctgctgatagagatagtcgtgctcagcagttgagggcatatcggtgtggaatcgaacacttcgcagctgtttgctcgagaccttctgcaacggtaagggaggtcttgtcccccatagttcatagtggccttttcgagtcagacaagaggttactcgcagcttttaatgacacccagccgcctcctgatgcgccagaaccacgccagaaagagagtgtcgagaatcggctggccagaggctggcatgctcttttcgcttcaccgtggattcaggtgcggagattcaagacctacttaagtggtaattcgcacctcgccactcaccaagtagtcaagggttcagagtttaagcatgtcatggtggtaatggacgatgaagatgccggtggttttttgttctcatatgaccggctgtttggcgcccctttgggggcctctgacctcaagaacgtggaagagaacaaggaaacatcgattgaccgcactctccgtcttctctatgtgacctgcagccgagcaaaagaaagcttggccctagtgctctggacgcgcgatgcaggctatgcacttgcctatgcccataagagcaaatggttcttacctgaggagattcaagctattcctgaatag

SEQ ID NO: 80096 - DNA, 1953 bp, Aeromonas hydrophila
atgttcattgaacgattaacgttaaccaattttcgctgtttcggggccgaaacgaacattgatctgacaccaggtctaactacattcattggtgcaaatggttcaggtaaaacggcagtgatgcaggcgcttcagcggcttttcggtatcaccggagatcagcgtcatattcgtcgccaagacttttatgtgcctgcagatgaggccgttgcacctctacaacgacactttagcctcgaagccatcttggcttttcctgagttggacacggaagaagtgggtgctgcagccattccggagttctttcagcaaatggctgccgacgaggctgggcgtttgaagtgccggcttcggctagaagcgacatggacagatgatgggtcgcttgatggggctatcgagcagaagtactgggccatacgtgcctttggcgaattcactgatgaggattgcgtcgagctgaaagctgtcgatcgggcacgtatccagatgatctacgtacccgcttcgcgtgatggttcttcgcaggtaacttcatttttgcggggtcgcctgtggcgcgcgatcaattggtcccagggtgtacgcgacacgtttgatgaagctggcacgacactcaatggggcatttgctggtgaagcggctgtcgatgtggttgctgacgcggtacgacggcgctggcaagaggtccatacggccggcactgataccacgccattgtttcgccccgtcgatttgcgtttccaggagtttattaggaaggtcgaagtggtttttcggcctgacgaggctggacgtgaacgtgcccttgacgatctcagcgacggccagcgctcgttgtttcatctcgcaatgacggcagcaacactggatgtcgaaaacagtatcgccggggatcccgtcgcagccggatttcaacctggcggcgtccccctgccggcattgaccattattgccatcgaagagccagagaacaatctcgcgcccttctacctctcgcgcatcgtccgtcaagtcgaagacctgactggggggagccgtgcccaagcagttgtctcaagtcactcggcaagcattctttcgcgagttgatccttctcaagtcaggcacttccggctcgactccgctaatcggacgtccttggttcgagcgatctgcctgcccgagggcctggaggaggagtcaaagtttgttcgtgaagctgtgcgcgcctatccagagctctacttcgctcgattcgtcgtacttggggaaggtgcttctgaagaggtggttatcccgcatctggcagaggccatgggtttcgatattgatcgctcgtttgtcgctgtcgtgccgctcggtggacgccacgtcaaccatctgtggcgccttctcaaagatttagaaatcccttacgcaacgctgcttgacctcgatcggggacgcgatggcggcggttgggggcgaataaagaccgcctgtactcagttgctcgagattggtgtcgcccctcaagcgctgtttggtcaggaccctgatccaaatggagctgacgtgaacctcgctcgctttgataaactaccagcagagaatacggcagggatgcaggagtggaccaattggctgcgccggttcgaagtattcttctgcgctcctctggatctcgactattcaatgctttgcgcttttcctgctgcatatcaagttattgagcccggacggcaaggcccctctaatcaaggcgaccctcgcattgcggtgctgggagagacggggcgccgggagctttatggggcggaccaagaagcctcgttacgctggtatcgatacttgtttctcgggagaggaaaacccagcacgcacgtgcgtgttctcagtagccaagcatctgaaaccttggctgcgggagcgcctgaggagatccgggcgctcctcatggctattaacgctagattggatccggcgaactga

SEQ ID NO: 80097 - DNA, 1881 bp, Aeromonas hydrophila
atggtactaattcctccagagaattggcggccacgcggcattgaggatttagaacctgctgcatggcgcgcgttgcgccatgagggatccgcctgtgtagtcgcaggcccaggagccggcaaaaccgagtttcttgcccagcgcgcagcctacctgcttgagacgggaatttgcccggccccttaccgcgtgctggctatttccttcaagagtgacgctgctgacaatttagctgcacgggttcggaaacggtgcccaccggatctcgctaaccgctttacctcgctcaccttcgactcgtttacgaagggcttggtagaccgcttccaggcggcgattccggtagcgtggcggccaacacgtccctatgacgtggcatttccgacgcgccgccaggtcgagcaatccattgctcgtgcgaggcaacatgctgcagttcaatggcaagccacaattggtggctatagccctgtcacatttgagtcgcacaaggtaggggcataccgactccctatcgcccggaatgcaccgcattcggctgaagaatttgctatccaccattggtggagagaacaacttgagcaccaaccgaactcaagtctcacctttgtaagcttgaaccgtttagcagagctgttgctacgctcgaatccgcatattcgacgtgcgttgcagcacacctatccttttgtgttcgtcgatgagttccaagacacaacctacgctcaatacgacttcctgctatcagcattctctggtagtgatatagcagtaaccggtgtcggcgatgataagcagcgcattatgacatgggctggtgcccgcccagattcatttaaccgtttctctgaggatttcggcgcagttcgtattccgttgttgttcaacttcaggtcgtctccagaccttgttcgaatacagcaggttgttgcacgagcacttgacccagacgcgcctcaagcggaagcacaagcgttacgtcgggttgacggtgatgtggctcaagtttggaatagccgcagcaggaatcaggaaaccacacacctggcacgctggattgtgaacgacatggccaatcgtgccctttcgtctcgagattacgccattcttgtacaacaacgcgccgatgattttgaggctgaactagcgcctgctttcgcacaagttgggctacggattcgcaatgaaagccatgctcttgggcgaacgacattgcaagaccttctatctgatgactttgcaaaaatcgccattgggctactcaggctcggtgcaagccgcagagcacctgctgcctggcagttagtttcctccgcgctttgggttatacgtgctattgctccagacgatgagttaggagctatgcgcattgagacagagctctctagattcatcgcaacgcttcgcgctgatatggcacattgtccgccttcggtagccaatgctaatgtctttgctaatcgcgtggtggagtttctcgacctggcagccctccggcgaacctacatcgaatatgcatccagtgacttgctaaacattatggaggaggcgttccacttgcaccttgccgcgtcttctgataccgctgactggatcggttgtctcgatgccttcgaagggatagatcaaatccccatgatgaccgtgcacaaaagcaaaggtctcgagtacgacacgatcgtctttgtgggccttgatgatcaggcttggtgggcacatagaccgggcaatcttgagggacttgcaacgttcttcgttgccctttctcgtgcaaaacaacgtgcgatctttgccttctgccaagagcgcggtcagcgacagcgaatagctgagctataccggcttttgacagacgcaggtgttccggaggtggtaatttga

SEQ ID NO: 80098 - DNA, 2007 bp, Bacteroides cellulosilyticus; identical to SEQ ID NO: 72680

SEQ ID NO: 80099 - DNA, 1818 bp, Bacteroides cellulosilyticus; identical to SEQ ID NO: 72681

SEQ ID NO: 80100 - DNA, 1917 bp, Pseudomonas syringae pv. syringae
atgtatttacgtactttagatattcacggtttcaaatgcttcggcgagcctttcacgattgaattccacgatggtctcaatgttttagtaggcgagaatggagccggtaaaacaggtgtcgtcgcagccgtccgccagctctttaatgactctgaatcgggcaaacgtttgatcaacgagcgagattttcatcgtggatttcacgaggaagcagtaacagcgcaaaggattgatattcaagccacattttctgacctggatgagaatgacgcaattgctttcagggattggtgcggcaacgaagaggaggcaaaactcacttttaccgcgctcaatttggaatctcggggacggttcaaaagccagctttatggtggttatgcacgagctacagcgctggaaaccgagacccttgatcttattcactgcatctacttaccgcctctgcgtgatgcggaaacaaaactccgggatgggcgccagtcccgtctagcccgacttctgaaggcgctctgccgcaaggagcttgatatcgctcgtaaggagggtaaaccgcatcccctggaggagcgagttggtgcgttcaaccaagagctttccgcgagcgacgactacgcaatcaagcaagcaaatgaacgaattgggaatagcttgagggccgcgttaggtatgcacctgtcccagaacacacacattcagttctcggaagtgagcttttcacgcatcgttgaaggtctgcgatttctatattttccgagtctcgctgcggccgacgctacgcagttccggtctctagaagaaaacagccttggctacaacaacctgctctatattgcttcgattctggctgagcttacgttagaagttgaggaggagcgcggggaagaaacgtacttgcgacttctgctgattgaagagcccgaagcccaccttcatcctcagcttcagatacgtctcctgaagcatctcagcactgtggccaaagaaaaaagtatccaggtgattgtaaccacccattcgacggtaatttcatccgcagtgtcagttgatgaaatcatccatctctccaacaaatgcaccccggtagcgatccccctgcgcacgtgtggacttccagagtcaagccggaaattcatcgaccggtggctcgatgtcactaaatccaacctgcttttttcgaaaggctctattttggttgaaggtatagcagaagcgatggttatcccggagctggcacgtagagtgctcgctcagtacggcgacggcgaaaacacactagaggattacggtgtatccgtcataaatctaggcgggatctacttcaagcatttcatgcagctgttctgcgacgtgaccgatgagagtgcaggggaaaacgtgccggtacgctgtgcgggtttgacagataaggatccacccaaaacgatcaagattgatgttgatggtgggaagcaaatggcagttgagtacatgccgaacgacgacgacttgagggatggtgaaaaccatgctctcgcctacatcgccaaaattggacagtctcagttcggccgcctttacgcaggtaagtacaaaaccttcgaatacgatatcgctatggagggagcgaacctgcaaatgatgctctctgtagcagccgatctttggcctgctcaggatggaacggtagctcccgagctgcgagaaaaagcgaagctaacttttgacgaaatgaaaagtcctgagcgagcaggtcacgcggctgagctgctatatcgcatcgattccacgagtattggaaaaggaatctatgcgcaggcttttgccgaagagcttgagaagcaggaaggcatattcgtcgtaccggcctacattcgtgatgccattctttgggcttgcggactcgaggagcccccgctcaatgatcaagctgactga

SEQ ID NO: 80101 - DNA, 1755 bp, Pseudomonas syringae pv. syringae
atgatcaagctgactgacgagcagaaggcttatatcggcgcacctatcgaccagcatgtttatctcaacgcttgcccaggcagtggcaaaactgaggtggtcgcagccatggtggccaaaatcgttgaagagtggactagcttccctagcgggatagcggttttgaccttctccaacagcgcaacggacgagctcaaaaacagactggttcggtatctaggggagccgctggggtttcctcaccaggtgtcgaccttcgatagctttgtccactcccgaatggtcgcaaacatcgcaagcgaggttactgaatttccagggaaggagggggacagtcgtataaggatcttggaaaacaaggctgacatattccacactcgcaataggatatgtggccgttcgatctccgcctgtaagtacaactacgacttggaaaccaaagggttcgtgttctctacaagcgagcgtactagagataaacagctcaatgacgctccagtcaatgaggttgcacgggaagatctgatcaacacaaagaagcgtttctgggcagcaggttttgcaacatacaaagatgtggacataattgccctgacggcgctcaagaagcccgctctcaagagctatttccagcgcgttgccaagcgatttccactgatcattgtcgacgagtgccaggacctttcagcagagcaactggcgatagtacggaagctccatggccttggcgttaaattccatttcataggcgatttgaaccaatcgatctacgggttcagaaaatcgaatccagataatgtgaaggcgctccttgccgagctcggtttcgcagagctgccgctcacagcgaattggagaagcgggcaatccatcgtcgatctctgtagtgatttgctgcgaatcaagcggatttctggcaatcccgagattgcttccgttaaaccgcttttgctgcagtatgagaaatgtccttcagagcttattccgaaaatcattgagctcaccaatggttatgaagaggttgtcgttgtcgctcgtgggcacagcacattgcaacgatttcgcagaggcgacagtttcaagggcgttgaagtgttggcactggcatgtgttgctgccaataaggggagcaacaaggagttgaatgtcgcggtagcactattcgctgaatggtttgcagataggctctccttgcaagtaacacgatcaggcccccactgcccggttgcaatcgagtccaagctcgcctggcggaaatttattcaccactgcttgaagcacttggttgctgccggcgctgcagatacgaatctgacttggaaagagtgggttgcggtagcaaaaaaaaccatgcgtaacttgcccgatcaggctttcgtgttggatgaaatcagtagcgatcttgaaccgcttagggagctgatacttcgatcacccgcaaatcagggtgccatcgcactttccgttcgcctagaccaagttgttactcaacaacctaccatgggcgcattgcgctacgagaccatccatcaggtcaaaggcgagacccacgatgcaacagttgtggtgtcatcgcttcaaaaaggcattcacctttcccattggaaggagtggctagccgacccaagatctgaaggcgcgaggttcgcttacgtggcgagttcacgtccacgctatatgcttatctgggcagtgaagaggctgaaggccggtgagaaagaaacgcttgctgggttaggatttgagctagtctaa

SEQ ID NO: 80102 - DNA, 2298 bp, Pseudomonas syringae pv. papulans
atgcgcatccagcatctggagcttgcgaatttccgcaagcttaaatccgttagaatcgacttggcggccgaaaccacccttctagtgggcgccaacaacagcggcaaatcttcagcaatgctggcactacgcaaattcttggttaagccgacgacgttccgactgcaggatctcaccctctgccatatcgccacgctcgatgcgattggccaggagtgggaacaggccgatgacagcttcgctattcctgcatccaacgcttgggctgagtggctgccaacgttggacgtttggctacgagctgctcagggcgagctccaccacatccgcgacctgattccgaatttctcctggtcaggcggcatggtaggtatgcgatttcggctggagcctgatgatcttccaacgctctactccgactatcgaaaagaacgggcacgggtcgctacgcttctggaggaaattgaaaatcaggctgctgatggccaagtgcgcccgaccctccaattatggccgcagaacctgcatgactacctcaaccggcgcttggccaaggcgtttaaagtgcgttggtaccgccttgatccagataagctttcgccacctaacgcagaaaccaggactgccaatcttcaaccgctgagtgatatggcaatcccgctggagcggaatcccctacttaacttgatcagagttcacgagatcaatgcgcagcgcggtttcggggacagcgccgatgagggacaagacggaagtaaacccggaagcggcaggaagctttctgaacagttacgcacttattatcgtcgccaccttgaccccggtgatagtccggatgtgcatgacctagaggccttgcgggcgattgaagcggctcaaagtgccttcgacagcaggctctctgtcagttttgcgccagcactgagagaggtcgcaggtctcggctacccgaacaacagcgatccgaacatcaaagtagcaactcgtctcgcgccaacagacggaatggatcatgaggcggctgtactatttgagttggactctgtcgcaggagcaccaggggaaccgcgcctgagcctccccgagacatccaatggccttggctaccaaaacctcatttccatgatattccgtctcatggcgtttcgagatgactggcttaggaaatctcgtacccctgaggagcgcagcgccgccaacgttgagccaatccatctcgtactggtcgaagagcctgaggctcacctgcacgttcaagtgcagcaagccttcatcaagcatgcgtaccacgtgctgtgcaacgatcctctacttgaggagtttccaaacctgagaagtcagctggttgtgagttcccattcaagccatgtcgcgcatgaaatcgagtacgagcaccttcgttactttcggcggctcccatccgggatggcgaatatcccgataccggtatccacggtctcgaacctgagcacggtgtttggccaacccgggaagaccaaggaattcgtcacacgatacctccgggcgcatcatgccgatcttttcttcgctgacgcggtaatcctggtcgaaggcgcggcagagcgcatgatccttccccatttcctgcgcgagcatttcaagttcctcgaccagtgctacatcactattctcgacatcggcggaagtcatgctcatcgcctcagaccactgattgatgccctggggattgcgaccttggtaatcactgacctcgacgcaggaaaagccaaggcggcacagccagttgctcggggggccgggcaaatcacgaataaccctaccgtccgccactggatgcgcgtggttggacgtggtcatgatgtggatacattgctagacctccctgccgagcagaaggtggaagagatcgatgcgctctattcgatcagaatcgcctaccaaacccctatcaccattcgtctgccaaaaaccggagcacaaaccgaggccttgcccaatacatttgaggacagcttggtattgagcaacgtcgagcgttttgctgggaaatcacgtcgtgggctgatgcgtgcgttcagtgaggccgtccagaccgccgacacggctcaagtactgggtgaagcgttgttcgagaagctacgtacaggcgacaaggcagagtttgccctggagatcctgggcgatccagaattcagtcaactcgtggttcccacttacatccgtgaaggcctgacctggctgcagtcgaagctggaactcaaacgcaaagaccttctggtggttccacccgcaatcgtcgaggtgacagaagaatga

SEQ ID NO: 80103 - DNA, 1875 bp, Pseudomonas syringae pv. papulans
atgagtccgtcagcgccggagcgcgataaccccattcgtgatgctgacgacattatccgagaatgcctggatctggatcacccacgtagttttttcctctacgccggcgcggggtcggggaaaacccattctctggtaaccgctgtcagggagctgaaatcacgcgcgcaaaagagactgaccttcgaagggcgtcaggttgcgatcattacctacaccaacgcagcatgcgaggagattgctcgccggctggagcatgatcccttagtggtcgtttcaaccatccacgcattttcatggcgaatgatccaaggtttcaatgacgacattcgcgattggcttcgcaccaaactcgctgaaagcatcgaggaactgaaagacaaaatcgcaaaagctcgggatcccaacaataaaaccgctcgcgccaatcgtgcatctctagagagtaaaacgcgccgacttgcggggttagatgaggttctcagcttcacctatagccccaccggagaaaatcggggacgccaagccttgaaccacgccgaggtcattcagatggcggctgcatttatccagcgtccacctttgctggacgtgatggccgatcagcatcctgtacttctaattgacgaaagccaggacacctacggccctctcatggacgcgttcctgaccgctcaatcgctgatcccgaatcggttttgtcttgggctattgggcgacaccatgcagcggatttacaacgatggcaaagagcaattggaacaggcaatacccgccgagtgggccacccccgaaaagccagtaaatagaaggtgtccaacgagagtagtggagctcatcaacgtcatccgcagcgccgccgatgatcatcaacaggatccaaagcctggtgcgattcaagggtcagtgcgcatgttctgtacccggcaacctgcaaatggcggctttgagttggagagccagattgctcaacgaatggcgcaaattacaggcgatgagcagtgggcagcaggagcatctgagcgcaaaacactgatccttgagcacaaaatggccggtcggcgcctaggatttgagggcatttttactcctctttacgcagttgagcacctgcgtaccagcctgctggatggaacgctgccgattcttaaattgttcttcgacggggtgatgccgattttggacggcgccaggagcagcgaattcgcactcatggaagctgcgcggatgagatcacctctcctcgacagtgagcacatgaaagcggcccctgatcagttggggttacttcaacaagtcggtgccggttgccaaaccttgtgcgatttggttgcaggcaatgatccatctttggccgatgtcgtgctggtgctggcggaaacaggtctactcgaaatacccgatcgtctcgcagctgccctggcacagggtgtgactgatgaagaaccgcccgagacagttgatcgtgaagcacttgaagtacacgcctaccgtatcctgttgggacgccgatattctgaaatggtggcattcgctggatacgctcagggcttgtcacccttcgatactcaccagggtgtcaaaggcttggagtttccacgagtcatggtgattctcaatgatgaagaggccggagggttcctcttcagctacgaaaaactgttgggcgttaaggctccgtccgacagtgatatcaaaaatcagcgcgctggaaaggatgatgcgctatcccgaacgcgccgcctgctttacgtcacctgcagccgggcagagaaaagcctggcgattgtggtttatacagctcaaccggaaatcgccaaagagcgcgtagtcgaggctcgttggctcgaagcagacgaaatagagatcatctga

SEQ ID NO: 80104 - DNA, 1746 bp, Leuconostoc gelidum subsp. gasicomitatum KG16-1
atgcattttgaaaacataaaaattattcattttcgtaacttcgaaacattagatattaaactagataacaaaaacgttatttttggattaaacgatgtcggaaaaactaattttttgaatgccattcaggctgtttttgattataaatttagaaatagcataaatgaaaaggacttttttgaaatggactttcatactcctatagacataattatttccttatccctagaacaagaagttgctgatgaagacgatcagttgctaatagccaacttaaaaggtgcacttcacgacaatgtttcagatcctaatgttataaagatcagattaaaaatatcgtgggatgagaagcacagagacaccattgttgaaatgttttggggcaataatgataattcaacagaattatctgtcattcccacaagaggcatttcgagaacagaaatagacaatttgttctcaccagtctatatggagccattaaatgatggtgtaaaagactttcaaagatccagaaattcattgctatccttatttgaagaatcagattctaccttaactgcacaaatacaagataaaaattctgaaatgaacgaactactatctaaatctgatatagtcacaagtttacaagaagagctaacgagtgaatattcttatctcagaaatgaaaattccaaaataattttgaatagtgaacaacaaattggcagactatctactggtttaaagccttatgttcaactagaaaataacagttctctatatccatcaagtggagatggcagaaagaaaattctttcatacgccataaaaaatttattagcaaagaaaaatgaacaacaaaaaatcattattcatctaatagaagaaccggaaaatagtttacataaatcattacaaaaaagtctatctcgaaaaatatttaatccgaacgactctaacttttataaatatctatttttaacaactcactcaagtgagatagtttctgagatggacgacacaatgttaatcaaattaggattatcaaattctcacagcactatgtttacagttccagacaattttaagaacatacgaaaaatgtattctgaacaggtttcagaagcgattttttataataaagtgttcttggtcgaaggaccttctgaaaaactattgtttgaatccatactaaacatgagtaacatatttatggaggaaaaaggcggatacattttaaatattagaggaattggatttaaaccatactttaaattactaacagacattggaattaatgtttttattcgtaccgataatgatattaaacctaacaattccgggaaacaagattatacattccctggtgtaaaacgcttaatagacctattcaatgataacaaacatgtacttcaacaaacacaaacatggtcacatggagtgcactataattctgttgttaaagacttagaacagcaaaaaaagttcatatacactagtcaagatataaattcacttcgcactcaaaatctttttatttcaaaaaatgatttagaacatgatatggttttagcaagcagtgatagtattatagatgacttaaaggataaaagactaacatcaactgcaaacgttgttaactaccttcaaagtagcaaacagaaaaatatggttgaatttgtcaaagtaatgtctaacactactagtcaaaaattatatgaaaatttagatggactgaaagagtttgtagatgcaaattaa

SEQ ID NO: 80105 - DNA, 1545 bp, Leuconostoc gelidum subsp. gasicomitatum KG16-1
atgcaaattaaaaaaatgatactagaagacgaagacatcagaacgagtatactgtctgattctgataatattgttgttactgcttcagcaggaacggggaagacatttacaataattaataaaatagctaaaattttagaaactaagaagaatttcaaaaagattgtagcaataacattttcaaaaaaggcagctgctgaaataaaagatcgcttaaaaaattcagcaaatactacacttcgatatgatagtgtattaactggaacaatgcattcatgggctgttagtgaaataattgaaccattttacagcgattattatccgttaaaaaatgacatgcctattactccatactttggcaatcagaggcctcctgttactacttacgaagagggtatacaaacgtttcgagatagtggatttttaatgccctatattcggcaaaggccaagatatggtgaaaacagtaatttccgctacggcaacgatggctatgatttcatttttgactttgcttttgatattcttcaaaaaagttctgctgcaaagaaatatattatgactgcttacactacaatatttattgatgagtatcaagatgttaataaaagtcagcataaattaatttcttatatcgtgaatagtcttaacattcagctatgtatattcggcgacaataaacaggaattatatggctttcgtggtgccaatccggactttttgaattcatttattcaagatactaaattcaaacattacgaactaacgcataatttccgctcttctagagatattgttgactatgccaacagctttgcgcatgatactagtactgtgacacttgctaatttaactgatgtccaaatcgaacaatctgataaactagtacctatcattaagcatttaagacaaacttttaaggatgaaagtatactaatattattcgctagtcgaaaacgcagagaaaatgatcgatttgaattaataaaaaatagtgaccccatatttaacgatttttttatcgaaaacgaattagcgtattcagaaagcgataatgctggtattttaactgaattagtcaaaattatttttggaaattcaactctatacaatttatctccatttatagaaactacaaaaatccatcaaaaattcgatgatttaaattacacaataaatttgataaaagaaaatgatcagtatttggaaacaaatttgtatttgttgatcaatattattaattcaatttatattaaacagatagatcaacccgatactcagtttttacttgatacaattactaaccgtgaacaattggaaagtatcatacaaacaaaaaaccccctcaaacttttaactatccacggtgctaagggtttagaagctgacaatgttattatatttggaaatgattttttttggcagggtggttttaaaccagaacttcactatgttgctattacaagagccaaaagaaaattaatagttttggactctgggaatcaatatataaacatgttaaacagtaagcctaatgtactttaa

SEQ ID NO: 80106 - DNA, 2142 bp, Burkholderia ubonensis; identical to SEQ ID NO: 80032

SEQ ID NO: 80107 - DNA, 1803 bp, Burkholderia ubonensis; identical to SEQ ID NO: 80033

SEQ ID NO: 80108 - DNA, 2310 bp, Serratia marcescens
atgtcagaagcagctaccaccatgtcattatcgggacagatatcactaaggtttattgagctttcccaattccgccgactaggcaaggtccaaatggacgttgacccaaaaactactatcctcgtcggcgctaacaatagcggcaaaacatcaattctggcagcactgcgccacttccttgctgatggctcaccatttggtgctttcgacatcagtatttctcaatggccaaaattgcggggacttgggagagcttgggacgcattagaagaagatccgtctacgtcaggcgtatccgaagatgaatggggagagcaacttggaaccttactttcggcgatgccaactctggatctatggttcgatgctaaggcaggtatgttccactatgtctccccgttcttgtcaaaattcagttggaaggggggcggggtaggtgtccgactacgtctggaaccggctacgaacattgaggatctcaagcagttggcttggaagtatcacttggcgagaatacctgtgaaggatatgggaaaggattcacttgcgtggccaattgatcttcttgatttttggctacgagaaccttctctactcggtcaagttcgagcctataagttggatgccgataacaaccctttggacggaataaagacctatgttagccaagtactagatgctgattctagcccaattgatcgtaaacatctgcagaaactcataaaagtagactttgtggctgcacagcgtggccttggtagtgaggaagctgattcccggtctgcttctggcccacatcgcataggtttattctccaatcagcttctcaaatttgctcgacaacatctaaatgtggcagcaacaggtcatggacaccgagctgacctcataaaagctgttgctgaggcccagcaggaactagataaaaagattcatgaggctattgggccatcggtagaagaggttaaagagcttgggtaccccggcttgcatgacccccaagagattcgtttccgcacgcgtatacagacagccgaattactcgaccatgggacagctgttcaatacagcatgcagaaggattcattagaggagcttctccctgaatattccattggactaggttatcagaatttacagtcccttagttaccaactagtttctttcaaagctgctcgcctaaatcctgaaaagggcgctccagcacctgttcatctggttatgattgaggagcccgaggctcatttgcacgtacaggtacaacgtattttcccgggtaaggcacataaactaatcagtcctaacggtagcgatgagtcaggtcttaaaagccaattgattatcagtactcattctagtcatctagcacatgctgagaattttgaccggctacgatatgttcgccgcattgctaagtgtgaagaacaaaacatgcctaccactgaggtggttaatcttgggcaagtttttggtgatgataaaacgacccgtcaattcgctgaacgttattttcgcgttcaacacacagatcttttatttgccaatgctgcaatctttgtcgagggggttgctgagcgaatgctgttacctcttttcattgaaagagattttgcaacactcaacagccgctatctgtccttccttgatattggtggcagccatgctcatcgtctaagatctctcgttgaaagactccgtattccaactgtaattattactgatatcgatccagttgaagaaagaccaggtaagcctaaaaaaaatggggacccgactacaaccttagttgctgtagctaataccggacaacccggactgcaatgtgggaacccgactcttcgcggatggcaccctaagctgcaacagcttgaggatttcaagaacccgaaagatgagcatcttgtctggaacgaaattgccgaatgttctgtacgtttcgcatggcagttgcctgtagccgaagctgatggtcaatggccaagtacttttgaagactccctaattattagaaatatcccttggtttaagcaacttattaatgaaaaagtcgatggcgatgggaagcaaatcaaaccgccgaagggtgcgctgggctcagtagcaaaacaggtcgctgaaaatgataatattccagaactgctcgcggctctgcacaaattaatgcatggatcttttaataaaggagattttgccgcaagcatctttgaaatggttgctgcggatgagccgataatctgtcctaaatatatcgaggacgcattggaatggctccagacacagttggaaccaagcagggaggtgatgccatga

SEQ ID NO: 80109 - DNA, 1992 bp, Serratia marcescens
atggctccagacacagttggaaccaagcagggaggtgatgccatgactaactcacagatccttgacggcaatgatcgcgatgcaggggtagtagaagagatctgtggctaccttacagatataccaccacgtaactacttcctttttgcaggggctggttctggtaaaacacgaacattggtggaagttttacgtcgccttactggtgtgatcgagcatgagagggggggacaattggcacggtccctgaagatgtatgggcgttcgattagagtggtaacctacaccaaaaatgctgtctctgtaatcaacggacgtcttggagacaatagcttagtcagtgtgtctaccatccattcattttgctgggaattgattagcgggtttaacgatgacatccgtgaggctcttattgcattaaaagaagcacaacttgctagacacactgcagaggcggaagcaaaaccgagaggtattactgcagcaaaacagcgtgaccttgacgaaatcgcgaatgaaatcgaggatcttcggacaactgaagtattcaaatatcatcccgatcgcaatacatatgggcctggcgcactaccgcacaattacgtactcgatgcgacagcttggttgcttcaaaataagccaacactccaatccattctcaaagatcgacatccaatcatactgattgatgagtcgcaggacacgatgaaaggtgtactggactccttgatggtgcttgccaaaaaacgggagagagatttgactcttggtctgctgggagatcatcgacaacgaatttatatggatggtcatgccgatcttccaagcattgttccggaaagctgggcaacgcccgagttacaaatgaatcatcgcagtcaacgacggatagtcacactgattaataaaatctgggaaactgaacttgaaggcaggacacaaccaacaaagggttcagcacaacatccccgaacggaaaaagctggtgggacggttcggttcttcttgggggatacatcacgaagtccagaagataaagtgcttagcgaacgctggtgcgctgagcgaatgtatcaaattagtggtttagcagattggaatcaaggaaaatatcagttgcttgcgcttgagcataagcttgtcgccactcgtggctcgtttcttgatgtttatgaggcaatggttctgttagatcccaacgctgcagcaccatctggcagtggggacaataaggggccttcaacagtacaaattttgcttaatgagctggcacatttagaagcctgcgtcagtaatgaaggaattttgaatgagtttaaagcaaccgaggtttttcgtcgttatggcggtttagacaatatgcctgaggactcagaagtaagagctgaacgtactgatgaaatgcttgaggcgatagtggtatttgcaatggcttgtgccaaccctgagtcaacggttgcggaggtattagcaccagtcttaagtgcaaaactatttgaagtagaccatcgccttcaggaggcttatgccgacaagtcaccagccccgcaagctcctggacgaggtgaggatgagtcaaagcaaacaagaatgcgtcgtggatggtgtgcactatttgctgcaccatggaaacaacttaagtgctatcggaattaccttgctgggatttcagaactcgcaacacatcaggtagttaaaggttctgagttcaagcatgtaatggttgtaatggatgatgctcttgctggtggaactctcattaagtacgacaaattttttggtggtgtggagctaagtacaacagataaaaagaatgcagagtttggtaaggagacaaccatcgaccggactttacgtttgctgtacgtgacttgtagcagggcgcaagaatcgctagctttagtgctttggtcgtccgatcctgatgcagcaatggctcgaatcaaggagagcgaatggtttagtgaagaagaggtacagatcataccttag

SEQ ID NO: 80110 - DNA, 2016 bp, Pseudomonas syringae pv. broussonetiae; identical to SEQ ID NO: 79006

SEQ ID NO: 80111 - DNA, 1158 bp, Pseudomonas syringae pv. broussonetiae; identical to SEQ ID NO: 79007

SEQ ID NO: 80112 - DNA, 1785 bp, Serratia marcescens
atgtatttatcaaaactcgaaatccgcaactttagaaattttgaggcggctgatattcccctggcaggtaatgttgtgttattgggggaaaatcgtgtcggtaaaagtaatctgcttttcgcaattcgactggttattgatcccactctgcctgattcagccaggcagcttaagctgtcagatttctgggatggctgcgaccttgaatcaaaccctcaaattgaggtgcaccttgaattcgccgatttcgacagtgatccttccctctcagctctgttgaccgattttcgcatcgcagaggatcctaccgtagcaaggttgagttacatttttcgtaaaaaggaagaagtcgatggggctccacgttcgggtgaggactgtgagtttattgtttttggcggaggtcaggaatcgcgagccattcctggacgcgtcaggcggcggatctccattgatatgctggacgcgttacgcgatgcagaagcacaacttgcttcctggcgaaactctccactacgccccttattggaagatgcattctcttcactgagccgagccgatctggatcgcgtagcaactgagcttcaagcagcaacggaaaccatggagaagttcccatcaattaaggatctcgaggattctcttcgtggtggcattcttgacctagctggaactgctcacgatttagatgcccgcctccgttttgcgcctgctgacccgctcagattgatgcgttctatctctatgttcattgatgatggaaagagaggcattattgaagcgagcctaggttctgcgaacgtggctctgatatcactcaagctagcagagtttgcatggcgacgtgaaaagaatgaacgtaatttctccctgctttgtattgaagaacccgaagcacaccttcacccacagcttcagcgcgctgtttttgacaaactcttcaataatgccgacaaagatcagtccttgattgtaacgagccattctcccacgctggcaaccattgctcctcttcgttctgttgttcgcatttgcagggatcctgaagggcgatctcgagctttttccctagccgatctgccagtaaccagtgaagaactcgacgacattgcacgatatttaacagcaaccagatcggagctgctttttgctaacggggtaatatttgttgaaggcgatgctgaggaggttttacttccaggtttcgcacaggccatggggatcaatctcgaccagctagggattacggtatgtaacgtagcgggagttaattttgaaccatacgtgaagctggcagccagcctcggactacctttttccgttgtaaccgactgggacccactggatggtacgaaacaaccgatgggtaaaacccgttcaattggtatctggcaagcatatagtgatgtatcggaaaaacagggaaaactaacccctgaaaatattaattggttcaataacagttcttatgaagtctgtaagcctgtatttgaaaggattggcatttttttaaacgatcagacatttgaagtcgctgtagccaatacgacaggcctcaaagaagcgctgcttgatatcctcgatgaacagggatttggcgtgttacgttcatcaaggattgcttcatggcgtgccggtatagttccagacccgacgcaacttctcgcgatgatatctgacataggtaaaggacggttggctgccaagctgaagcaaaaagcacctgggcttgcgccgccggagtatattgcttcagctattcaatatgtggtgtcgaatgtctga

SEQ ID NO: 80113 - DNA, 1782 bp, Serratia marcescens
atgtctgaccgccgcgcactttcagaggctctgaatgagctgttgccgaacagagagcagtacgctgcggccacataccccggccactgcgtagttattgctgggccaggcagcgggaaaaccaaaacacttacgactgccatggcacgtgccctgattgaagaggtcgctgacccccgaggcgtggcctgtattacttacaacaatgaatgcgcttctgaacttgaaggacgtctggcatgctttaacgtcattggcgatgatcggaactttattggtaccgtgcatagctttgcattaaatcaggttttaatcccctactcacgatgtataccgggtttgctgccggatgattttcatgtggcgaccagagatgagagtcgcgcggctgttgaagtggcttaccaggctagattcggatcagtcggagatcctcatgcacggtggaaatttgcagaagagaaacgacgccgggatgtgaaccgactcctaccggcttggcggaataacaatccggagctggcagattttattgaaggttatgaggcagaacttcggcgcttaggactgattgactttgatgatatgccactcatcgcttttcgtattattagcgagcatgaatgggtacgtaatgctatccggtcgcgctatcctgttttgtttgtagatgaatatcaggatctggggcacgctcttcatgagctggttctgctgctgtgctttaacggtggaatacgattatttgcggtcggtgatgcagatcagtccatttacggatttaatggtgcaaatccagggctactggatagtcttgtttcacgggcagatgtaagaccgttccgtcttcgcttcaactatcgatctggcgcgaaaattatcagggcatcactaggggcgctgggagaagaccgcgattatgttggccccgatggtaatccagagggagagttagggttccatggggttaatggcgattacgacgcacaggcgcattttatcgcgcatgatctaattccctcgttgattgagagaggatttcagcctgaacgcatcggggttctttaccgggcagcttggcttggcgataaagttgcggatgagctcaaggccagaaatattgccataatacgtgctgacagtaatgctcttattaagcgcaattctcgttttgcccgtttcatagaagcctgcagtcagtgggtaacagggggatggaaagaagcctcacctccatttaatctgttactgggtcaggcgatctttcttgtttatggccgccgcgcaagccgtgctgaagaacaattactgactatacagctcatcacatttttacgaaacggaattgataaagcggaaagtgctcacgagtggctgagacgtttaaatgatgagatcatcaccggctggatgggtatctcacagaacactcagcaggaatgggatgtcatcgctgagttactgaaaagaaccgaccccgtcaggggactggatgtggctctggatgtattcgctgggaaagtagaaggaactgggcgcatcacccttagcactcttcatagtgcaaaaggccgagaatttgatgtagccataatgtttggggtaaataaatatgacttcccaagtaagcgagatctagcttcagataatgcccttcgcgaggcccgtcgcctcttttatgtaggcgtcacccgtccccgaaaagagctgcacttggtttatgaaaagggtaaacattcaccttggattgccgaactatatcatcgcagtcagcagatatag

SEQ ID NO: 80114 - DNA, 2136 bp, Serratia marcescens; identical to SEQ ID NO: 78392

SEQ ID NO: 80115 - DNA, 2031 bp, Serratia marcescens
atgtatgaaatagataaaaacaaggccaaaaaagaagaagaaataattgaaagaatatattcattaattaataaaaaagaatctttttactttcaatctggtgctggctctggaaaaacatatgctttagttaaggcaatcaaacactcagggaaattagaccttataaaggacaaccatggtttcagaaaaatattgtgcataacatacacgaacaatgccaccagtgaaatagttgagagactgccaaactcagacctctattatatatcaacaattcattattttatttgggagctattgaaaaattataataaagaactaattgatgtacatgtatcgtttcttgaaagtgagataataaatatagaagatgcgatttttcataatcctgattctaaaccttcatataaaaaattcagagacattaccattacagacttagagtttgctatcgaaaagatatacattgacaagaccaattattatgaggttgcctttgggccagctaaagaatattggaattatctcgaatctataatggggacaactacattacagagaatcaagtctaacaagcaagatgtttgcgatgtaataaaattgctaatgaatattagaaattataaattttgtctggaatcaattcagaatggtcaccttgaatataagaaaataatatataactccaatcaaaacattgaaatacttcataggaacatcataggtcatgacacattgcttaaatatgcaaaaatgttattactgaaaaatcgaggcttatcaaagttagtgatagactcatatccatatatttttattgatgaatgtcaggatactaacccggacattatagatttctttgctgaaatatatgactactccaaacaatctgaagatgattttgttctgggattttttggcgatccaatgcaaactattttctctaaagaaatagttcatgcccctttctattctaggctcaatgtcatcaataaggatttcaataggagatcctatgatgaaatcataaatagtataaatataatcagagggaaccatcagcctattattcagacttctatttttaaaaataaaaaaggtggcttggttaagtttcaaaggttggacgaactatataatgaaaagtcattgataagagaaatcattgctgagcatgtacgtgagtggaatatatcatcagaaagttcttttgcatgtctagtcctgaaaaataaaatgcttgctagcttgtgtgactatgaaaaagtttatagtttagttgctagactctatcaggcagaaaactcttcttatcacaataaagttaatgaggaattcgttgtaagagaaattaagaaggcagggcggttggctataaccctccacaaaatattacttccattgttttttattgttaaggatgacaggttgtctttaaatgaagtcttcccagttattcccaaagggcaatataatttgaatgaggtacgtgaggctatatcgttcttcaaaagtgtatctaattgctctttgttagaatatattgataatattcgtaacaaattaaacagcacatatccccgtgaaataaaagaactaataggatgtaatttcccgacggaactagttaatgctgactcgagtttggaagcgactattttgggattgtctggatttaagagggtttctgagtgttctccaattttatctgaacttcttcaagttaataccaatgagtttttgaattggatgaattacttgcacggggagaaaaaaacctcaggcacaaattatttaacatgccactcatcaaagggattagagtttgataatgtactgattttactcgaagattcaatgttacatgataagaacattttttctgaacttctatcttcagatttaaacataacgttaaatgacaagttagagagagccaggcgtattttttatgtttcagtctcacgtgctatcaagaatgttagtatagttttgttttctaaaaatgctgttgattttcaaacgtaa

SEQ ID NO: 80116 - DNA, 2136 bp, Serratia marcescens
atgtatctaaaaagtttagttattcataactttaggaaatttggcgatgtgaataataaagtatgttttgttaaagctggtaaaacattacctgaacaatcaccagtggcggcatcaaccacagttgttattgggaaaaataactcaggtaaaactacgataacaaactcactatctttgatatgttctgacactgaaaaattaacaggaaatgactttaaccataattatttgaggaagattttgtcttctatgatggcatcagatttctcaaagtatccagaaataaagttcgaaatggaatttatcttagatgacattcataatgatagcactagcaacttcgcaccattcatcgatatatcatcactaagtagtactcctggagaagaaaataatgctgcaacagcattagcattaataacctttaaaataaatgatgaatcaatttttcaggataaaatgaaagatctcattcgagaaaagcaggaaaattcttataatgacactgaggtttttaggcggtttttagatttaatatcaatgacagaatttaaaagagtaattaaaaataaaagcaacagagtaattgaaaaggttagaataaaaaacataatcgatcttcgagttatcaaggtagcaaataatatacatgaccaaagactattagctaagtcttttaaccgcatcataaaattcatgtatgaaaaaaataaagatgaactaaaaagcattttgcatttagtagatggcaataatcatagccttacagaaatgatcaagctaagtcatcaggataatgtggagtcagtcttgaacacaatcatacttgatgaaagtttaggtattgaattaagagctaacttaactttcgataaattgatgggagatcttataacatatgagcatcgagatggtaacaatttaattcctgaaggacagtttgggttagggtatgcaaatcttataaatataattagtgagataattgattattccaataggagtctgcatgaacaaaaacaactaaagattcaactattatgcattgaggaacctgaagtcttcatgcaccctcaaatgcaagttaatttcattcgccatattgaagaggcgctagtgaaaatattaggtcttaactttaaagatattagttctattaaaagtcaaataatagttactactcactcctctcatatattaaatagtattattcatggcagtggaacttttaatgagataaattacattaatagttccaaacggaatagcgaatgtatcgttctgaatgatgatgaactttgtgatggtggcaaggagtttgactactttaaatttataaaaaaacacgttaaacaccaagttcctgagcttttcttttctgatgcaataattttagttgaaggtattactgaagagcgcgtcctgaattatcatatcgataataacgatattttaagcaggagaaacatttcagtatttagaattgatggagcgcatggtaaggtttattcaaacctgctgaaaaaaataaacatccccacactaataataactgatatagatttcaaaagagatagttctctcttcaaacaagtgactataatggaggatggttcggaggttactacagagcatttcccacagatggagaaaattgacaattcaactgaaacaaccaattcaacgttaagctatttcttagggagtaagaaagttggagagtatcctacacatcatatctcagataatatatatatatcttatcaattagaaaggatatccattgatattcctggttccaaacagtctcatttttatgccacttcatttgaagaggcatttatcctcaaaaactataaaaataacttattgagagaagtattgctgagagttgttggaaaggattactcagatataatttcaacgaaacaggatgattattaccttctcgcgacgaactcattcaaaatacaaaagaaactttccgattgtaaaagtgcatttgctaattctattatttttgaattaatcacgagcaacaaaaccaaacctatactgccatcatatatattagatggactatcctggctcgagagacaaaaaacaaaaaaggaaggatttgaccatgtatga

SEQ ID NO: 80117 - DNA, 2031 bp, Serratia marcescens
atgtatgaaatagatgaaaacaaggccaaaaaagaagaagaaataattgaaagaatatattcattaattaataaaaaagaatctttttactttcaatctggtgctggctctggaaaaacatatgctttagttaaggcaatcaaacactcagggaaattagatcttataaaggacaaccatggtttcagaaaaatattgtgcataacatacacgaacaatgccaccagtgaaatagttgagagactgccaaaatcagacctctattatatatcaacaattcattattttatttgggagctattgaaaaattataataaagaactaattgatgtacatgtatcgtttcttgaaagtgagataataaatatagaagatgcgatttttcataatcctgattctaaaccttcatataaaaaattcagagacattaccattacagacttagagtttgctatcgaaaagatatacattgacaagaccaattattatgaggttgcctttgggccagctaaagaatattggaattatctcgagtctataatggggacaactacattacagagaatcaagtctaacaagcaagatgtttgcgatgtaataaaatttctaatgaatattagaaattataaattttgtctggaatcaattcagaatggtcaccttgaatataagaaaataatatataactccaatcaaaacattgaaatacttcataggaacatcataggtcatgacacattgcttaaatatgcaaaaatgttattactgaaaaatcgaggcttatcaaagttagtgatagactcatatccatatatttttattgatgaatgtcaggatactaacccggacattatagatttcttttctgaaatatatgactactccaaacaatctgaagatgattttgttctgggattttttggcgatccaatgcaaactattttctctaaagaaatagttcatactcctttctattctaggctcaatgtcatcaataaggatttcaataggagatcctatgatgaaatcataaatagtataaatataatcagaggaaaccatcagcctattattcagacttctatttttaaaaataaaaaaggtggcttggttaagtttcaaaggttggacgaactatataatgagaagtcattgataagaaaaatcattgctgagcatgtacgtgagtggaatatatcatcagaaagttcttttgcatgtctagtcctgaaaaataaaatgcttgctagcttgtgtgactatgaaaaagtttatagtttagttgctagactctatcaggcagaaaactcctcttatcacaataaagttaatgaggaattcgttgtaagagaaattaagaaggcagggcggttggctataaccctccacaaaatattacttccattgttttttattgttaagaatgacaggttgtctttaaatgaagtcttcccagttatttccaaaggacaatataatttgaatgaggtacgtgaggctatatcattcttcaaaagtgtatctaattgctctttgttagaatatattgataatattcgtaacaaattaaacagcacatatccccgtgaaataaaagaactaataggatgtaatttcccgacggaactagttaatgctgactcgagtttggaagcgactattttgggattgtctggatttaagagggtttctgagtgttctccaattttatctgaacttcttcaagttaataccaatgagtttttgaattggatgaattacttgcacggagagaaaaaaaactcaggcacaaattatttaacatgccactcatcaaagggattagaatttgataatgtactgattttactcgaagattcaatgttacatgataagaacattttttctgaacttctatcttcagatttaaacataacgttaaatgacaagttagagagagccaggcgtattttttatgtttcagtctcacgtgctatcaagaatgttagtatagttttgttttctaaaaacgctgttgattttcaaacgtaa

SEQ ID NO: 80118 - DNA, 2139 bp, Serratia marcescens; identical to SEQ ID NO: 72908

SEQ ID NO: 80119 - DNA, 1800 bp, Serratia marcescens; identical to SEQ ID NO: 72909

SEQ ID NO: 80120 - DNA, 1278 bp, Variovorax sp. WDL1
ttggagcgcggcacgctgctcgacaacatcctgcgcatgaaagaagcccgcaaggggatgtgggagagcattcgcaagcgtctggctactcttgatcctccgatagacgctgacgctaccgagctggggccgatcctcgatgaaatcgaggcaaggctggcggaatacatcgcgcccggcagcgaggggcgttcgacccgtctgttcgtctcccagctcacgcgtgagcacctgcggaagaccatcgctttcttcttgacgatggggcgtggagaggaagccgtcccgttccaacagaccggcagcggaacattgaacacgctcctgctggcgctgctgacctttatcgccgaacttaagaaagacaacgtcatctttgcgatggaagaacccgagatcgcccttccgccccatacacagcggcggattgcgaactacctactcgaaaaaacttcgcagtgcttcgttacatcgcactcgccatacgtcatcgagcgtttcgagcctgacgggatactgaagctcaaccgcgaccaacacggcaccttgagcggcacggcgatcaagctgccggctggcatgaaggccaagaactaccgacaaaactttcgccgagccatcgccgaagccatgctcgggcaaggcgtgatcgtcggtgaaggcatcaccgaacaggatgccttgttggtggtcgcgcagaagatggaagacagtgatccggccctgttccccttggacgtggccggcctgtctgtcatcaatgccgatggtgacgggaacctggaaaagttgggggccttcttcaaggaaatcgggactccagcctttgccttcttcgaccgcaaaaagcgcacggatgcggaaatcgccaccttgcaaggtagctacgtggtagccaaagaaatccagcaaaaaggtgccgaagtgctgatggctgaggaaacccccttggatcggcaatggcagtatttggaggccctacgcaccgaggatgccgacggccggtttgggattccggcggcccgccccgctgacgacgaattacgcaagctgaccacttccacattgaagggcctgaaaggcgaaggtggtgcggcaaagctgctgcaactgtgtgccgtggccgagttgcccaagaccattaccgacttcctcgccgacatctaccaacgctatccaaagccgaagcgcaaggaagcacctgccgcgcaggtcgatgccggagcagaagctgcaggtgacaacgcggccgcggccgatgaccccgaggaactgtaa

SEQ ID NO: 80121 - DNA, 1734 bp, Variovorax sp. WDL1
atggccctggtcatctgtgcgcagcgacagagcattctcgacgagaacggtgcgatcctcgttacgggcggcccaggcagcggcaagacgaccatcgctttggcaaaggccagactcgttatcgaacggggcctttcacttggtcagtctgttctttttctcagcttctcgcgtgctgctgtggcgcgcgtcgccgaagcgagtaagacgcagttgcctgccgctctgcaaggaaagctctcaatccagacgttccactcgttcttctggcgcatcttgcaggcatacggatacttgctgggcgcgccaaagtcgttgcgtctactaatgcctcatgatgaggcggcgatgcgccacgagttcgagaacaatggtggcgattggaatgtcgagcgccaacgattgtttcgggaaacagggagggtcgcattcgacctgttcgctccgaaggctcacgaactactgtctcgaagcgcacgcctgcgcgagctgttctcgtcgtgctatccgttgatcgttgtggatgaggcgcaagacacagcagaagatcagtggcagtgtgttcgactgctatccgctggcacgcaaatgatgtgcctcgccgacttggaccagcagatttacgacttccggccgggcgtcagctcagaccgagtaacgcacatcatggccgccttgcaaccgctacgcgtggatctggcaggcgagaatcaccggagtcctaattcagaaatcgtcgccttcgccaacgacgtgctactgaacacaccgagaggcgcggcttaccagggtgtatcacgcataaactatcgcgccaaccgagagtaccgtgatcgcgcgatccgccaagcaatcggaatcgccattcagcgcgcaaaggaggccgcccagggcgacatcgagagcttggccgtactggcaacatgggggcgcggtgtcaacgtcgtttcccgtgctctgactggtaatggcgcgaacttgatcccgcatcgagtgatgattgatgaagcatcggtgctgctttcgagtcgcatggtcgcgtttatgctggagccgcgcaggccggcagcggaggaactgctggacttggcagacggccttgaccttgcggcgacggtcttccgggcacgcggcggaaataccaaccttgccaccgcgcagcggttggcagcaagcgccgtacaaagccgcggtggcacttccccgcgcgctaacggagtggcatccaagctcttggatgcgctacgtacattgcgcatacacgagttctcgggagacccgaaacgggattggttggatgcgcgcagcattcttcgtaacgcaggcgccaacccgcttcaagtcatagcagaggatgccgagcagctcgtcgccttccagcgtggccgccgtatctcagcagcactgaccgaactttggcaaacgcagggagcgtatcgaaatgcgcgcggtgcgcttgatacggccatcgcggaagaccagctcttgtcaggcggcaacgacctgagaggtatccacgtcatgaccattcacaagtcgaagggcaaggagttcgacgcagcaatcattttcgacgatccgaacagcagccctctgcttttcactcaagaggctgcgcctcaccctcgttgccgcaaactggcgcgggttggcatcacccgcgccaagcatcatgtgctgatgctttgcgatatgttcactccaaccgccttgctgcaagggcatcaactctag

SEQ ID NO: 80122 - DNA, 1848 bp, Hyphomicrobium sulfonivorans
atgtatttaagcaaacttaccgtaacagattttcgtaagatcgggtccgtcgaatttgaattcgtaccgggactaaacatcctcctcggcccgaataatatcggcaagactgccatcattgacgcgttgcgcgcgctgctcggtggtcacgacgaagcgccactcaggctctactcagaagattgccgccgtcagaaggcccttcctccccagcccatcaaatttacctacacgtttgatggtctcggacccgatgacgaagcagattttatggctgcgctgaaacccgccggaggaggcaaactcgttgcggagttttctatccgctacgtcgatgccgacgcctctgggcgattgaaggcgcgtcgctggtgcggagaccacgaggacaatgctgttacggctgacatgctggaaaatctccgcggcgtgtaccttcctcctcttcgcgacgcctcacaagggttgcgacccagcaggaccagccagcttgcacgacttctgcaacttcttgcggacgaccctgcaaaatcagacattgaacaggctttgcaagacctcgataaggccctgaaaagcaaatctgcgatcgtcaagactcacgaagccatcacggctcgtcatctctccatgcttggggaaaagcttcgtcagacactcgacgtgggcctcagtgcgaatgacttccaacggcttgcttcccggctgtcgatcctcgctgataattttgagatcgaacagaacgggctcggtttcaacaatctcatcttcatggccgtcgtcttaagcgagctttcaacgaacccagacgctgcatttcgcgcgctcatcatcgaagagcctgaagcgcatcttcatccccagcttcaagcagttttgctgcggtatctctcagcaatccaaggcggcgagggcgagaaacctgtgcagctcttcgttccaacccactcgccaaacttcgcgagcattgctgatctcgaccgtttgagttgccttatgcagaccgatgtcggcgtagaagtcttcctgcctcgcagtgttgcgttcgcagcaggaaagaaggagaagcttcaaagatatctagacgtgacgcgggcagaactcttcttcgcgcgccgagtgatcttcgtcgaaggcgcagcagagatgatgctcgtttccgagcttgccaagaagttggggctagatcttcgcgatcatggagtcagtcttatcagcgttgaaggcttgaattttgactcgtttttcccgctgttcggcgagaaggcgcttcgtatacccgtcgcggtaatcacggacgccgacccgagcggtggtgcggccgatcttgctgctgttgacgccgccgataaatcgaaagcagaagtatccgcgtctgcaactgccacggttgctacggaagaagttaaagatgcaaacgcgacagatagcggtgatgcggcggaccaggacggtgtctatcccgcgctaaacgacactccggaagtgtcagcaaacacagcggcaatgaaggcgctggaagacaaatacgtgaaggttttccacggggtgaagacgttcgaatacgatttcgcgctgcatgaagccaatcgattacttatgcttgaagcactgaaagatcttcaccctcgtgtcgcgagcaacctcgccaaaaatatttctcaggtgtcatccgacgcagagaaggcaaagttactcttcaagggcatgttcgaacgaaaatccaacaatgtgcaaaagggcaggtttggtcaggcgctggcccaacttgtttctaaaacgcccaacgatgcctgtgtcgtgccgagctatatcgaagacgcgatccgtcatgcttgccaagactga

SEQ ID NO: 80123 - DNA, 1575 bp, Hyphomicrobium sulfonivorans
atgatcgttttatcccaagagcaacaagacgtcgtagatgcggcaatctctcctctctgcgtgattgcgtgcgctggcagcggcaaaactacaacagcggtccggcgacttatcaaagttcgcgaagccttgaatacctcaagaggccgcgtggcgctgctctcctattcgaacgttgctgtcgatacttttcgggacaattacgatgagctgatgcagccgctagggctttcgcgttgtcgatcactcgtcgagatcgatacgcttgatgcattcttcagccgcaatctgctcgccccccacgggcatcgggtcatgaagtccaaacgagccgcttttcttcttcatggaggagaagggtatctagcaggtcaaacatgcggctatgggaaggacacgaggcccatcacgaaggccaaagtccgttaccgaaatggcaaggcggaattttacagatcggagaatggcaacaacttcgacttaccgccggcaacagtcggggccatagagaagctcggaagatccggagggtacacccacgatctcggccgctactggtgtcaccggctgctagtggagtatccggaactcctccgcgcttttgcgcgtcgctatccacagatcatcattgatgaggcgcaagacatcggctccgcgcatcagatggtcctcgaccttctgatcgctgccggaagcgtcgtttcgcttatcggagatccagatcaatcgatctacgcattcgccgatgctgacggccagtacctccgggactacgctagcaggtccggtgtggccacgttggcaatcacgcaaaaccggaggtcgataccgaagatcgtcaacgcagcgagcaagctcgctggccgctccgatgctgcgatccgtagccccctgaaggacacccacggcgtattcctcacctcctataaaaagggcgaagagcaaaagcttatcgacgcgttcaagttggaggtcgcgtcagaagagttggccccggagaactccgccgtgctgacacgcgccagggagttggcagacacccttggtggaaagaaggaagcgttgggtcagggtctcacgcaaaggcttgcgcatgccagcctgttgcgagaccgcgatcatgattatgagggtgcgttccgagaggtagttgccgttttctcatcactcatcgaagacggtccggacgatcttgtcacgcaacttaccgcaccctcgcgccagtcggtatcgttggacttgaagcgacagctttggagcttcacaagaaatcccgatgacggcttgccctccgctaccctgcctggatcgtcagaatggcatccaaaaatgttcgcccgtgttaaggaggccctcaaagaaatcgcgcaacgcgacaagctcaattcgacatcaaatctggggaaccgcctcgcaaaaacgaaattgacagccgagccgctgttgccgaaggcagatttggcaaaggacacctccagcgaactcgaaatacgtgtcgacacagtgcacaaggcaaagggcgagagcctcgatgccgtcctgtactggcaagttggattgccgacagtaccgtga

SEQ ID NO: 80124 - DNA, 2028 bp, Xanthomonas translucens; identical to SEQ ID NO: 79710

SEQ ID NO: 80125 - DNA, 1740 bp, Xanthomonas translucens; identical to SEQ ID NO: 79711

SEQ ID NO: 80126 - DNA, 2403 bp, Pseudomonas fluorescens
atgaagctacaggcatatcggctgcagaactatcgccgactgcgcgacgtcgtcattgagcttgacgatgagatttccatcttcgttggcgccaacaacagcggcaagacgtctgccgtacaaggcctgtactcgatgctccgtggcgaagcgaagaagttcgaactcttcgacttcagcgcggcgttgtgggccgagatcgacgccatcggcaggacgcctccaggcgatgaggacgcgcccaagcagttgccgtccattcttttggatctctggttccgggtcggtgaagacgacctcgccactgcaatgtcgcttcttccgagcacggagtgggacggtaagtgcgtcgggatccgggtggcgttcgagcctcaggacgcccatgcactcgtccggaagttccacgaactgcatgaaaaggccaacaacgctgcgaacgcactggtggccagacgcagtgtaggcgcggaggcaggtgcggaaaatgcggcggcggtggtagcggatcccggcgagtacaagccctggccggaaagtctgacgaagtacctcacaaaggaactgagcaaagaatatacgttccgctactacgtgctcgatgagcgcgcatttgtcggctatcagccaaaggaagttgattatgcgccgctgcccctaggcaaggaaccgggtggcgcggcgattctcaagtctctggtgagggtggacttcctgcgcgcgcagcggcacctcgatgacccggatgctggcagctccgaccgcgccgagagcttgtcgcggcgtctgagccgtttctatcaccgcaatctggagaaacgtggcgacgaccatgcagcgctcaaagcgctcgatacctcggagaaagaactgaacttccacctgaaggaagtcttcagcgacactctcaagcgcctcgccaaactcggctatccaggcgtcaacaaccccgagatcgtgattcgggcggccttggatccgaccaccgtcctggggcaggattccaaggttcactacgtggttcctggtgcgatcaccgcgcaactgcccgacagctacaatggcctggggttcaagaacttagtctatatggtggttgaactcctcgacctgcacgagcagtggaaagccgaggaagacaagcgagcgccactgcatctggtcttcatcgaggagcctgaggcgcatctgcacgctcagatccagcaggtcttcatcaggaatgttttgcgcctccttgaggatgccaacgatcacgcaacgtttttccacacgcagctcgttgtcaccacgcactccccgcacattctctatgagcgcggattctctcccatcaggtactttcgccgtgttagcgaccagttggaccataacaccgaggtaaggaatctttcgctcttcaagacgggcgcggccgacgctccagcgcgcgaattcttgcagcggtatctgaaactgacacactgcgatctcttcttttccgatgctgtcatcctggtggagggcaatgtcgagcgcctgctcttgccagccatgatcgagacggcggccaagcgcctgcgttcctccgccctaaccatccttgaagtcggtggcgcgttcgcgcatcggttccaggaattgattgccttcgttggacttactacgctggtcatcacggatctggacagcgtagcggtcaagacggatgccgagaatgccgccgagcaagacacaggagccggtgccgtcgacggagataacgaggaagacgacctgaagcccttcgagctcgaagacgacgacgaagcagcaccgggcggaaagaagaagtccaagaagcgtggcagcacctgccatgctcacgtggagggtgcgttcacgtccaaccaaacccttatcagttggatccctaagaagcggttggttgccgaactctgggaagtcacggcggagcaaaaaacgctgtcgcttgccgaggggaccagcgctgaggttcgggtggcctatcaaaccaaggttttggtgacggtgggcgccacgacctcgcagctctgcggccgcacgcttgaggaggccttcggtcttgagaactccgactggtgtcaggctgaggctaaccgggcggtcggactcaagctgaagcgcgcaccaaacagccctgaagaactggctgagaagttgcacgaaagggtgatcggcaagaacttcgacaagactcgctttgcgctggaggtcctcgcaagcgggccgctcaactgctggaaagtccccacgtacatcgccgagggcttagcctggctcgaaaccaaagtggcccacgagattgaggcggacgcggctattgccaacgaggtcgcgacaattgagccgactgcagccggtgttgtcgccgttattgcaggcgcggggcagacgacatga

SEQ ID NO: 80127 - DNA, 1932 bp, Pseudomonas fluorescens
atgagcagacgaattgatagcccagacaccggcgccgaccgcgagatccacgcgtgtattaccgagacccccccgcagccgttcgtggtccgcgccggcgcaggttccggcaagaccacctcccttatcaaggcgctggactgggtgatctcagagcacggcgccagcatgcgggcgaagaagcagaaggtcgcctgcatcacatatacggacctcgccgccaaagaaatcttggcggatgtcaacgacgacccgctggttcatgtctcgaccatccacagcttctactggtctattaccaagacgtttcaggcggacattaaggtttggctacagaacgacatccgcaggcggatcaccgaactggaagaagaattcaagaactacagctcgcgtgtccggcagactacacgcgacaggaacaaggctgaccaagagcgttatgcccgaagcctggaggctattgctggcgtcaagactttcaactacggcgtgggcagtgactacgcgaagggcgtcctcggccacgaggacatccttcagctcgccgatttcctgctgcaaaatcgcccgctgttccgacgggtcgtagcgctgaacttcccgtttgtgttcattgacgagagtcaggacacgttcctgagcgtagtgaagtccttcaaggaagtggaagcccagatgcggcgcaagttctgtctcggtttttttggcgacccgatgcaagcgattttcatgagaggggcgggggacatcccgcttgaggaccattggcgggccatcacgaaaccagagaattttcgctgtgccaagcagatccttgacgttgccaacgccgtgcgtgcgcagggcgacggcatggagcaagtccgcgggctgcacgaaagggttgatggagaactcaagccggtggagggctcggcccggatgttcatcctgccgaacacgctgaaccgaattgaggccctggcgagagtccgggcgtggagtgcggcgacgaacaacgacgagggttggacgaccccagacatcgcgctcaagattcttgtcatcgtgcaccgcatggccgcaaaccggctcggcttcggtggcatctactcggcgctgaacgataagacatcggagggcatgaagcaggggatgcaggatggcaccggctggcccgttcgaccgttcctaagttttgcgctaccgatcgttgccgccgtgaaggccggcaacgagttcgcggcgatgaacctgctccggaagttcagcccgcgtctggcgccaggggctcttaccggccgacgtgccgcggctgtattgcgagaactgcacgctgctatgtctagacttgtcgccatgctggacgaggcagggaccaccattggtgacatagcactccatctctgtgacacgggtcttttcgagttcgacgatcgctatgcgcgtgttctcggatttgtcagggatgttgcagacgctgcccaggagcccgaggctgctgatgcagttccggccgaaggactatcctcagatgcggcaatggccaagttcttcaagtgctctgcacaagagctttggccctatgagcgctatgtctcagaagggtctccctatgctacacagcacggtgtgaagggagcgcagttcgaacgcgtcatggtggtgatggacgaggaagaaagcgactaccgaacgtacaactacgaacgtgtcttcgcgagcgctgaggcccgtgctgcagatcgtgcacgagcactaggcggtgatgaaaacacttggagccgaacgctgcgactgctttacgtctgctgcactcgcgcccagcgggggctggtactaacgttctttgtcgccgatccgacgaccaccttggaaaatgtcgtggcgagcgggatcttgccgcgaagcgcagtctttacacaggaagttctagctggatggccatag

SEQ ID NO: 80128 - DNA, 1902 bp, Pseudomonas fluorescens
atgtatttacgtacgctggatgttcagggcttcaaatgctttggggagacgttctcgatcgaactccatgacggcctgaacgttctggtcggcgaaaacggggccggcaagactggcgtcgtcagcgcgatacgacagctctttaatgactccgagtcgggcaaacgggttatcagtgagcgtgatttctacaggggattcagcaaggatgatgtcgcggctgaggaaatcaaaattcaggcgaccttctccggtctcgacaagaacgatgtcattgcgtttgacacctggtgcggcaaccagcccgaggcaaaactcacgttcacggccctaaaccaggagtctcgtggtaggttcaaacaccatacttacggtggccacgagtacaccaaagcgtttgaaaccgagaaattggactatgtccactgcgtttacctaccgccgttacgcgacgctgaaaccaagctcagagaaggacgccagtctcgcctcgcgcgcctgctaaaagcgctctgccgcaaggacatagaagccgccagaaaggctcgtgtgctgcatccactggagcagcatgttggggacttcaatcgccaactatcagagagcgaccaatttgctatcaaagccgccaaccagcgaattggcgacagcctaaaagctgccctgggcgctcatctctctcagggcacaatgatccagttttcggaagtgagcttctctcgaatcgtggaagggctgaggctcctgtactttccagacttgagcaaggctgacgcagcacaatttcgtgcgttggaagaaaacagcctaggctacaacaacctgctgtacatcgcttccattctggcagagctgacctacgaagccgatgcagggcagggcgagaaaacgtacctgcgcctgctgttaatcgaggagccggaggcgcaccttcatccccaacttcagctccggctccttcggcacctcaagaaggctgctgaggctcgcggaatgcaggtgatcataaccacccactcgactgtgatcaccgctgccgtatccgtagatcacgttatccatctgtccaacctcaatcgccccaaggcagtccccctcaggaactgcggcctgcccacgcagagccgacaatttgtggacaggtggcttgatgcgacgaagtcgaacctgctgttcgccaaaggcacaatcctagtcgagggcatagcggaggcgatggtcttgccggccctcgccaagattgtgctgcagccgttcggcgagggacgaaactccctggacgactacggtgtgtctgtcatcaatctgggcggaatctatttcaaccatttcatgcagctgttctgcgacgtcagagccgagcatcaaggtaaaaacattcctgtcaggtgctcaggactgaccgacaacgatcctccaaagtcagtgattgaggacgatggtgagggcggtcaaaagagcgttccatttctgccccatgccgacaactgcattgtcggcaacaacccggcgctggggttgcaaaagcacatcggactgtcagagttcgcccggctgtttgcggggaagtacaaaaccttcgagtacgatatcgcaatggaaggcaacaacctcaagacgatgctgatcgtcgctgctgggctctgggaggcccagaatggaacggtggtgaaaggcctaaaagcagacgcgaaactcgattttgctgccatgagctccgcccagcgggcgccctacgccggcgcactactggatcgtattgactccgatgacattggcaagggtatttacgcccaagccttcgcagatgtacttgaggcaaatggggccggcttcgttgtgccggtgtacatccgccaggcaatcctctgggcgtgcggtctggaagagggtgcggcctga

SEQ ID NO: 80129 - DNA, 1794 bp, Pseudomonas fluorescens
atggcggcgcaggataaggcagcccaagcgggggcagccgacatcgagttcaccgaccagcagcagaaatacattgatgcgccgctggataagcacgtgtacctgagagcctgtccaggcagcggaaaaactgaggtagtggccgccaaggtatgcaagattatccaggagtggaaccatcacccttctgggatcgctttgctcaccttcctcaatagtgctaccgacgagctccagagcagggttcataaatacctgcgcgagccaatgggcttgccgcactacatctccaccttcgatagtttcgtgctcacacacctgctgtcgagtatcgccagcgagatcacaggctttcaaggccgggacggcgacttccgtattcgaatcatcgacaaatcagctgatatctatcgcacgcggatcaagatctgcgggcgtagtgtctcagcctgtcgatacaactacgataaaggatccaaacgctacgtcttttcgaccaacgatcggaagtgggataacgaagccaacctcgcccaacaggacgaggccgaccaaaaggcactgttgacgaacaaaaagcggctttgggccgctggctttgcgacctacggtgacatcgatattctcgctttggtcggcatgcaagaagaaaaattcaaagattacttctcgcgtattgcacgccgattcccgttggtgatcgtcgatgagtgccaagacttgtcggctgagcagcttttgatcgtcaaaaggctgagcctactaggcgtaaaattccattttgtaggtgatcttaaccagtcaatttatggtttcaggaggtcgaatcctgcaagcgtgcgtcggcgcatggaggagcttggctttgaggagtacgtcctcaacgagaattggcgaagcggccaagccgtcgtagatgtgtgctccaacattcttcaatccgaccgtgtggtgggaaatcctcgtattgcttcagtaaagccaagggtcattgagtatcagaactgcccgtcggaggtgcttccagccattcgagagatgagcctgatacatgacaaggtggtggtggtcgcgcgcggacatacaacactccagcgcttacgtactggtagagctttcgagggcatcgagctgctggcgctggcctgcataaatctcaaagcaggcaggttgacggacattgcgcaatgcctggaaacattcggtaagtggctggcggcccggctaaaactgcaggtgacgaaagcaggcccttactgccctatggatattgagtcaaaactggcctggcgcatattccttcacgacggtctccagttcttggtggagcacggcgccggagatggtaatcagacttggtcggattgggcccgggcagcaaaaattacgcttggaaagctgccagatcaaacattcgtacctgtagaggtgcgtgagcatttagaagggctgagaggccttaatttgcgagcccgttctgggcaggggaagatgctgatctccgaaaggttgaccggggtacccgatgtggccgccaaacgtgactgcctgcgtttcgagacgattcacggggtcaaaggtgaaacacacgacgtgaccgtggttgtatcttcacagaagccaggcgtgcatcagtcgcactggaaggactggctgcgtgaccggacttccgaagctgcgagatttgcctacgtggcgagctcgcggccgaagcatgtgctgatttgggcagtgaaaaaattgaaggctgaagatcggctggtgcttgagggcctgggattcgagctcccgtag

SEQ ID NO: 80130 - DNA, 2403 bp, Pseudomonas fluorescens; identical to SEQ ID NO: 80126

SEQ ID NO: 80131 - DNA, 1932 bp, Pseudomonas fluorescens; identical to SEQ ID NO: 80127

SEQ ID NO: 80132 - DNA, 1905 bp, Pseudomonas agarici
atgaagctgcagacgctgcgcctatcgagttttcaatcttacggtcctgggcctactgacgtcggcctcgaaaccatcacctacttgatcggtcctaacggttccggcaagacagctgcactccaagcattgtgccgcctgttcgctttcgacccgtcccagcgtcgtatccagcggtctgacttccatgtcccagccgatgagaaggatattccggaagagcgcgagctttggatagaagcagatttccttttccctgaactgttgaaggatgaagacaacagcacggttgctcctcattttggtcacatgcgcttagacgaaccggacggtattccgcgagtgcgtttccgccttagcgcagtcatggggcaggatggcgacatcgaagaaacctttgtttatgtgctggatgtcaatccagatggttcgccgctcaccactgcgcaagtgccgcgagccgagcgcaaccatatacatgtccactacctgcccgcacgacgtgaccctgccgaccacattgcttatggggccaatgctttgcttgggcgcatgctccgcgcagtgcagtgggacaaagagcgagacgtcattagggaacttactgacggcataagcgacagcctggccgccaacccatcagtcaatgcgttcagcgagcatctgcaaatgacatgggcatcgctgcacaaaggcagtttctttgccgatcccaagattactttcgtggcctctgagattgaggccttgctacggcatatgtccgtctcgttcacaccagggcatgatgaaaactttgtcgatttttcgcgacttagcgatggccagaaatcgatgctctatctggccctcgtgctgtcgtcacaggctataggtcgtgccgtcttagcggagaaagacaagtctttcgattctgacaaactgcggccccccgtttttacactggttgccgttgaagagcctgagaacagtctttcccctcactatctgggaaggattgtaagtgcattgaatgccatgacaagccaaggcgatgctcaagccctaatcgctacgcatgcgccttccatgcttcggcgagtcgagcctgaacacatccgctacttgcggctgaccgaggcgcggcaatcgcgcgtaacgtgcattcaattgcctgaaaaaacagacgaagcacacaagttcgtgcgcgaggcagtacaggcattccctgaagtttatttctctcgattgattgtcctcggcgaaggggacagcgaagagattgtgttgccacgcctcttgcgggccaaaggtgcgccgattgatgagtccgctgtcgcgatagcgccgctggggggcaggcacgtcaaccatttttggcgtctgctggaggccctgcagattccatatctaacgttgcttgatttggatttggcccgccatcaagcggggtggggtcggtttaaatacgtaaacgaccagctgggaacgtttcgagcggataaggtccttccaaaagaccacggaattccgaaatggaattccagtgagcacaaggtgcgtgagtatcccgtttacatagaagcctttgaagaacgggacgtatatttctccgacccgatggacctggatttcgcgatgcttctcgcctatccagacgcttatggcgttgaaaaggagttgccagatgcagacgtgatcaaggctgttctcgggaaaagccatcacgactcttcccaatacagcgaagacgaactcaagctgtttggcacctatcatcaacgcttcaagcttggcagcaagcccgccgcgcatatcagtgcacttgctcaactaagcgaccaagagttgcttgaaaatatgccagcatccctgagcagattggcagacaccgtcatcgccaaactcgcggagctgccggagtga

SEQ ID NO: 80133 - DNA, 1677 bp, Pseudomonas agarici
gtgattgcagtcgaagcctggcagcccgctgacgggttgacgcttgaaccgaatgccctgctcgcagccaaggagcaggagcgctgtcttgccctgactgcagggcctggtgctggcaagaccgagatgcttgcacagcgagcagattttcttttgcgcaccggcacttgtcgttatcccaagcggatcctggccatctcgttcaaagttgatgccagcaagaacctgaaagagcgggttcagcgtcgctgcggcccagatctggcctcacgctttgatagcttcacctttcatgcctttgccaagcgcatcatcgatcgattccggccagtgttgacgggtgaagatgccctggacgcgggttacaaaatcgccgatagcaaggtggggcgctcccgaactcaaattgtgttcggagacttggtgccgttggctatccagatactgcggaagtcaaaagtggctcggaacgccattcgtcagacctacagcgatgtctttctggatgagtttcaagactgcaccaacctgcagtacgagctagtaaagcttgcctttcaggacaccagcattcgtctcacagccgttggcgataccaaacaaaaaatcatgggctgggccggggcactcgatggcatctttgaaaccttcgcggctgattttgctgcggtaccgctcaacatgtaccgcaacttccgttccaagccacgcctgcttcgggtgcagaacgagatcattcgtgtacttgatctcgcgtcagccatgcccgacgagcagcttgccggtgatgaaggtgaggttttcgcatggcaatttgaggacagtcgcagagaggccgagtgcttggcggatttgattgccaactggataagagtagagcagctgcccccgtcggaaacagcggtgcttgtttccaagcaattggagctgtatgccgaccatctcatggcagcgttggaggtgcggggcattccttttcgtaacgaacagcagatgcaggacatcacggtagagcctgtcgcgcgcttgatcgtagactatttgtcctgtctctatggacagcgcgagcccaaagcctgggttcggttaatgaaccagttaattcctttcgcggatgacgaaatccagtcaagcacgcggaagaatttagatcgtttaatcaagcagcagcgaaaagaagctgtcgtagctgagcttcttgacgtgccgttctccggctggtgggagtcagtacggtcgttcttgaagcaagtcagtatcgaaaccttggtcgcgctttcaccagactatgaatcccacgacaggctcagggaagttgtccgggacaccaaaatgcgcattgaagaattgctcaagatcgagcctgatctgcccaaggcccttgagcgcttttcggatgagcaagcggtacgcattctgacgatgcataagagcaagggcttggagttcgattcggtcattctccttggcgtcgaaaaccagaccttctggggaaaggcagacgaagagcgttgcgctttctttgttggcgtatcacgggccaagcgtcgattggttatgaccgtcagtgagcgccgtgagacgcctccatccaaaccataccggtggattgagcaaagagtgccccatgcagagtttctcagctatgccaggccatttttgagcaacgcaacataa

SEQ ID NO: 80134 - DNA, 2139 bp, Pseudomonas fragi; identical to SEQ ID NO: 73474

SEQ ID NO: 80135 - DNA, 1785 bp, Pseudomonas fragi; identical to SEQ ID NO: 73475

SEQ ID NO: 80136 - DNA, 1728 bp, Burkholderia sp. LMG 29326
atgctgctcaccagcctgaagattgaacactaccggggcatcaaggcacttgagctttcgctgggtccgacgactgttctagtgggcgagaacaactgtggcaagaccaccgtgcttcatgccttgcgtgcgtgcctgtctgcgctgcggtcctccggacgtacttctccgttcgaggagttcgacctgcatttcgatagccgggctgcagaccccaccaccgcaccgcctatcgttatcacgctgactttcgaagaagcgcaagccggtgagtggccagacgaagtcgagcagcggctcggcggggacggcggggtgatagttcttgtgccacccgatgaccgaagtcgtgtccaactgcgtgtcagcgcccagtactctccagtcacccaggaaatcgagaccacatttgagttcctcgatgccgttggaaacccgttgccagcgaagagtcgcggtcgtctgacaggcttgcagcagcttcggcctttgttctacctctcggctttgcgtgatgctggcaaggagttttctcgcacgtcgcagttttggtcgcccttcgtcaagaactcgcagattgacgaggcgacgaagactgccatcgagacgcagcttgaggacatcaacgcacaaatcatcgaagctcatggaacgttcaaaggcgtccgcgaccatctggctaaggtgcaagagctggtggctctcggtggacaagacgtcgtcagtgtcgatgcagttcctgcacgggtgtttgatatgctgaaccgcacccaagtgagcattgcgtcggctacaggcgcacgattacccattgggcgtcatggagaaggtacccagagcctgaccgttctgatgctgttcgatgcctttctcaaatcagagctggccagaaagcaaggcgccaaggaatcgaagcccatcgtcgcgctggaggaaccagaagcccatctgcacccgaacgccgtcagggcgctctggaagactattcaagacatcgacggccagaaactgattgctacgcactcaggcgacctcctgtcggaggtggacctgacggcaattcggagaatctacaagtcgcggggacaagtgaaggttggtgccatcgctccgggagcactggacccgcgtgaccaaaggaagtttgatttcctggttcgccgcacccgtggcgagttgttcttcgcccgttgctggttgcttggagaaggtgaaaccgaagccatcctgttctccggtgtggctcaggtgctcggcctagacctcgagcaggctggcgtcagatgtgttgagtaccgcttgggcgacatcgactacttcctagatgcggccaatgccttgggaatttcgtggcattgcttgaccgatgccgacgcccagggtgccagcgacgcgaagaaggcagatgaccggattcccgagactcccaagcggccgtggcgatacatttcggttcttgccggtgcagcgtccatcgagccttatttggccgcgaatgggttcctagacgtttatgaggccatcgcagtacctgcgaagaaggcggcgaagctgactgttgcaccgggcgacccagcgtacgctgaccaaatcatcaaatgcatccctgacaaaccgagtgctgcatacgctgtagtcgaggcgatgcgccagcgtggtgctctatcggtgcccaaggcactgcgaagcgccgtcataaaggcgattgctctcgccgggaggtcgtga

SEQ ID NO: 80137 - DNA, 1914 bp, Burkholderia sp. LMG 29326
atggactacttgaagaagctcaatgccagtcagctcaccgccgctcagtgggattcggggcctttgttggtcctagcaggcccgggttcaggaaagacagcgacgttgaccgcccgagtcgcacgtctcgttgagcagagccaagacgactcatttcggattctgtgtttgacgtttaccaggaaagctgccgcagaaatgcgcgagcgcctgctgacgctcgtcccaaatgcgaaggaccgggtcctgttgaccacatttcactcgtttgctaccgacatcttgcggcagcatggtagccactttggattgagccccgacttcgagattcttgatgagtctgagcgtgttgggcttctaaggtcggtgctggcagagaggtcggatgaactcaccaagtttgtttcggcagacaaggcgttgactgccatcgactttcttctccggaacgtgacccctgacgcccaagttccatccttgctgaaggatacagaggcgggccagcagcttcaaacgctgttcgttcgctacaaagagttgctaaagcaacagaattgcttggactacgggtccatcttgtatttctgcgaggagttgcttcgcgaacggcctcgcattagcaagcagcttcggacagtgtatcggttcgtctgtgtggacgagtttcaggacacaaatgcagcacagtaccgggtacttcgggtcttggttcccgacagggacgccaacgtcttcatcgtcggcgacgacgaccagaccatatatcagtggaacggtgcgagtccggcccgtgtgaaggagctcgagcagcactacaacttgaccaccattcagcttccggaaaactacaggtgtcccccagaagtggtggcgctcgcgaatgcacttatcgtccacaacggtgagcggtcgccggacaaaaaaccgttgctctcgatgaaggttggctctggcacgaaccctatccagcttctgtcgtttgaagacgaccaaaaggaggcagagggtattgctgagtgcgtggctgctcggctgaagaacggcgcacgtcctgccgatattgttgtcctggcgcgcgcaaccaagctcttggagcgggtccaaagggcgctggaggcgctgtcagtgccgagccatatccaacgacggaagtcccagttcgagagtgcgccgatgcggttcgtaatgtcggcgctgaaactggcgttggtacggtccgacgacgatttggcctcgatggtaaccaaggctctgtccgactgcgtggagcaagactccagtgaagaggacctcgctggattttccgccgcactcaacggggaccaattagaggcgcttggcgcgctagtagctgacagtcccgccgtggctaaagagcttcaagacgctgtctccgtgctggttcagggacgatatgccgaattcatccaggagactctagcgtacttcgacgccgtcgaaagcgctggccgagacggagtagacgagcagtacgccgagtacacaacggagcgaaatgtttggcaaaacatcattcgtgagattggcggcgaggatgaagcttactctctgtcattgggacagttcctacaagagcttgcgctggcgaacaagaccccagaggcaccctcaaactcagtgcgctgcctgactattcacagctcaaaaggactggagtttctgcatgtttatctggtcggcatgtccgaagaccagttgccgtccttccaaagcaagaaatcgggagacgatagtagggagatgcaggaagagcgccgcaattgctttgttgcgattactcgaacgatagaaacgctgaccatgagttacggtgaaaggtacaacggatggcgcaaggcgccgtctcggtttcttttcgagatgggcgtgttggcgtcagggggcgaagtttga

SEQ ID NO: 80138 - DNA, 2070 bp, Streptococcus pneumoniae; identical to SEQ ID NO: 71978

SEQ ID NO: 80139 - DNA, 1818 bp, Streptococcus pneumoniae; identical to SEQ ID NO: 71979

SEQ ID NO: 80140 - DNA, 2190 bp, Enterococcus faecium; identical to SEQ ID NO: 71696

SEQ ID NO: 80141 - DNA, 1794 bp, Enterococcus faecium; identical to SEQ ID NO: 71697

SEQ ID NO: 80142 - DNA, 2133 bp, Citrobacter freundii
atgtttatcaagacgctctcaataagaaattttaggaattttaaagcaacatctctatcctttaaaaaagaatgtgttaatactattgttggtgaaaactcatcggggaaaacaaatgtttttgaggcgatgagacttatactcgatgatactttgccttattataaacgatttcttttagaaaatgattttcacagagggttaggaagtgcatttggccattgggtaatagtcagcctagagtttgatgagataggcggggatgaagaatcagagctactgtgtcaattaaatactactgttaatggtggtggcactgggcgaataacttatatttatagaccgcaattttacataagagagcaactctttaaattgaatgaaattgaagattatgaagaacgtaaaggtgcatatcatactctgaaagaacagtatttaatcgataagacaacctatgaatctttagtgttatgccaaggtactgccgattttagtgataaccaaacatactctcttgtggttggtgattttaatgcactattattctctgatcctaaactagaacgaattaatttaattggtaacagacagcgtaattataatatacaggataatatcagttgcacctatgctcgcgctttgagggatgtggtaagtgaacttaagaacaatcgattcaatccatttcaaaagctcttagaatatgtatctaaaggaattgataatgatgagaccttgagtaaaaacatcagggatgttaatgaaaaaatatcatctattgatgaggtgaaaaaactctcggatgggatattattatcaataactaatgcggttggtacaacgtattcaccagttttaaatgttacctctgaattacccagtgaactcaaagaattggtaaaggttttacaattaaaggcaggagactcactttctgaaggatatgtttccgaactttcagagatgagtcttggaggtgcaaatttaatctatttggctttgaaactgtatgagtacgaagagggtatcagtaaaaatcttttggctaacttcctgataatagaagagcctgaggctcatattcatacgcatatacaaaaatcattatttagcaacctaaaaaacaatagaactcaggtttttatatctacgcattcaacccatatttcatcagtatcaaatatttcaactactaatgtacttgtaaaaaaaggacttgaaactatttcatgttcaccatcaaaaggactcgaagaggagaaggttaatcgtattgaacgattccttgatgccataagaacagatattctttttgcaaaaaatgtaattctaattgagggggatgcagaggaaatattaatccctcaccttgtcaaaaatacttttggcattactcttgatgagcttggtatttcattgatatctgttcgaggtactgggtttgaattgttatcttcattgtttcatgcagatcggattaaaaagaaatgtgcaatattaacagacgatgatataaatctgtatggcgacaataagccagattatttatcacaagaagaatataataaagctgtaaaatcagcagagtccggtattgcacgcaaagtcattttggatgaaattgttggtgataacagttttattcgtgcctattactctaaatttacttttgaaatcgatttagtcctgtcaggagccgtaaggtattttgatcagatagctgatgaatcctttgagaaaaaagccttttatagcccatatcaagaagcgttttcatcctctgatagacaaaaaatcggatgttacgctttaaagttagcaaataagcataaaaaaggttggtttgccatgatgttggctgacaagcttgatgccgatttccctatacctgaggcactttgtcattcattaggatttacgggtgattttaataaatttactctagctaagatggttcgatatcgtgtcgaagtaattaaaaatagagatgggaatgatttgttaaataatattcttgggcgtgatgatttggcttttgtcattgataatttagatgctgccttggcagtattccaagagcattgccctaatgatcctttaactcttttgcttgaggttcattatggatga

SEQ ID NO: 80143 - DNA, 1677 bp, Citrobacter freundii
atggatgatcaaaagagaggtttgataaagattaaaagcaatctattggttagcgcctgccccggggctgggaaaacaaaattattaattgggatgcttgaggataacttatatcataatgaaggttttcgttggcacattgtactaactcacactaacgctgcagctgatgagatctctagcaggatagataatctcaatattgaaactgatagggtttggtgcggtactattcattcatttcttttagagtgggttgttaaaaaatacgctggagccatcccacgacttgtggatgggttttctttgctttcagagtataagcaaaggaaaataattcaaagtatagaagttgataaaaaattaggaacaaggctacgttataattgtgatgaagaaggaaatgcatttgtagtaccttattgccacgcggcggacagcaaagataaagagttgctggttattcaagaatataatcgcatcaaagaggataataaatttattgattttgatgatatcataaaattaggtgttgatttccttaataacaatccaaatatatgtgagcatctttcaaagttgattggtaatatttacttggatgagtcgcaagacaccagtttaatccagcttaaggctttgtcatatataactagatataatcgtgtttctgtttttatagttggtgataatgatcaggcaatttatcaggatcttggtgtttcagtaaaaaacaaagatattctaaaatctgagttacaattatctgaattaaggcatgaaacactgtctggttgttaccggtcgtctaaatcactggttgattattataaaaaatattctgcttcgcgtaatgatgttatttctatgcgggtaggtgatggtaagctgcctattataagagatatgtcgaaagatgaattgcctaaaagaattttcaatctaataaatcaatatcacttaaaatataatggtgttgatggcattgcgattataggcccggataaatactacctcatgggactgatcaatgatttgtatgatctttctgagtgttttgtttatgattttcaatctacaaacccactttattgtgtaaggaatacagttttttacgaattaataaagttagttcttctagatgtaagtgtggttaactatcaaagaagacattctctggcaagaaaaatagttgactcaattcctgagttaagtcacctaagtccattgcagcttaagcgtgatttaaaagaattccaatgcgtaaaaaataattttattttatggttgaaagaactttatgtctttttagaaatgaagtaccaaaaatccattaagatagagacagattacaatatttgtaatgcagcagcttctgtagcacaacttaaagctggtatgggggcgataaagaaaatgataaacaaagataaaaatgttgtatctgtgtcaacaatacatggttcaaagggtgaagaatatgattatgtaataactattggatatcatgacaaagtagttccacatcaatcatcttatgataaaggaaatgattatgctcaagatattgcaaacagattaatgtatgttgctttctctagagcgaaggattacatgaacatatttatagatgatcgaaaggcggttagccctttctttattcgagaattggactga

SEQ ID NO: 80144 - DNA, 2091 bp, Fusobacterium nucleatum
ttgataagaggtgaaaaaatggttttaaaggaaatagtagtagaaaattttcgtttattaaaaaattttaagttagagcttaaagaggacttatctttaattatagggaaaaataattgtggaaagacatcagttcttgttattttagacaaaatgttgaattcatctgaaattgcatgggaagatgtaaatttagtgaaacaaaaagaactatacaatgaaataaaaggatttaatgggagtgttcaagacggtaataagtttcttgaagcaataaaacttcaattgtatattgaatatagtgatattgattcttatgaaaatattcaaaattttataatggatttagatccagaaaataatattattcttttagagttcatttcattaataaatataaaaaatattttagagttaaaagatataataaaaggaagaaagataaaagatttttcaactttttcaagatatatgagtaaaaattttacaaaatattttaaaataaaaaaatattctaggtgttatgataaaaaaactaaaaaaataatttcagatatgatagaagaagtagataataaaaatatacaaaaagtgctcaaaattgtagggataagagctgatagggcagtttctaataatgagaaaaaccatgccctatcaagtttaacaagtagatattatgaaacttatagaaaaaatatagaagataaaagtaattcaatatttcaagagcttgaagtagagttagaaaaggcagataaggcactatataaaatttataatggagaaaaaacaaataatgggcaagattcagaaggaatatttaagagtattatagatgttgtaaaaacttatggaggatctgataataaaattaatatttcaatagaatcttcaatctctgaaaagaatttattaacagacaatactagcttgtattataaacatggtgatggagatagttcttcacttccagaaacttataatggattaggatatttgaatttaatagggatattatttgaaattgagactaaactacaagaattgtatgaacaacctgctgatataaatattttgtatatagaagagccagaagctcatacacatccacaacttcaatatatatttataagaaatattaaaaatcatattaatagtcatagaaataaattgaataaagaaaaaaataaatatcttcaaataataattacatcacattcatctcatattgtctctgaatgcaattttgatgatattatttatttaaaaagaatagataataatattttagctaaaaattttaattctttaaaaaatgaatacggaggagataaaaaaagagaatttaaatttgtaaagcaatatttgacattaaatagaagtgagttattttttgcagataaagttatttgtattgaaggagatacagaacgcatattaatgccagcaatgatgtataaagttgataaaatgcaaagttcaaaaaatgaatcaactattccattgttgtcacaaaatatttctataattgaggtgggagcatattctcatgtttttataccattatttaaatttctagggataaaggtcttaattattacagatatagattctgctataaaaaataataatggtaaatatgaaaaatctcatccagataatgcaactcatacaagtaatgcctctataagagaattttttaaagaagatggtttagatgatggaaataatcaatttaaagaacttatagaaaagaaaggcaaagataaaataaaagacagaataagaattgcttatcaagtttctgaaattgaaggaggctatcaagccagtagttttgaggatgcctttatatcattaaataaagattttattttaaaaaataaagataatttttatgattatggagcattaaaaaaatttaataaaaataaaataggtaaagatttctataaattttctttaaataaaattgaaaaaaaatcggcatttgcatctgctttattatattttgatgaagaagaagatatggaatggaaagttcctcgttatataaaggagggtttactatggatacaagaattttag

SEQ ID NO: 80145 - DNA, 1902 bp, Fusobacterium nucleatum
atggatacaagaattttagaggatgaggtaaacactgctttacaatgtatagaaaaaggagaaaattttatattagaaggtggagcaggaagtgggaaaacatattctctgatttcattaatagaaactttaattataaaattacctgaaattaagattgtatgtatcacatatacaaataatgcagttgcagaaattaaatcaagaattgataatgaaaatctttgggtttcaacaattcatgagttcatttggtatataattaaaaaatatcaaaaagagataaaaaatgagttagtacttcttattaatgatgaaacaattaaaagttttaaaaagccaaaagacttagaaaataatttgattacaatagattattttaataatatagatgttgaatatgatgaatattattctatgaatcctaatgaaaataaagttaaaattagtcatgatcatattttaattctggctgaaaaaatgtttgataggtataaaaaactatcagatattttaaaagatgtagctaattgtatttttgttgatgagtatcaagataccagcccatatataactaaaattttattagaacatcttaaaaaaagtaaaaagaaaaatgttataggattttttggggattcaatgcaatcaatatatgatgaaggagtaggagatttaaataaatataagttaaaaaaaatagtaaagaaacaaaatcggagaaatccaaggatagttatagagatcgctaataaatttagagatgataaaataacacaagttccttctaaggataagaatgctcctaatatggacgaaaatggagttattattgagggtaatattaaatttatatatggaaaagagcaagaggatataaattttcttaaaaataaagctctttttaagtcatggaattttttaaatggtgaacaaactagggaattaaggctaacacataaatataatgctgaaatggctggatttaaaaaattatatgatttatacaatgatgatttaataattaaattaattgataatattcaaaaaaatattgataataatgaaaataaagaaagtatattagatgaattagtactaaaattaagaccaacttataatagaaaagatttatttgaagaaattattggtaatgaaatatataaatcaatttaccaaaatataaaaaatttagtatggaaagatgcattagaaaaatgtaaaattagtaaggaatcattgatgtcttataaatttaatggaataaatggaagatatgagactaattcacacagagataaaattttaaaaaaattagatgttttaaatgaattaatagaattgtacgaatctaagaaatttaatgaatttttaaagaaaacaaatttttctattcaaaataaaaatgataaaagtaaacttaaagaattaatgaattttttaatatttgaagatgaaaagacaatagaagaagttttagacttttcaaaaaaacaaggtttgataaaagaagatatggactttgataactatattagtgttaaaggtttttatttatgggaaagaattaaaaaaatatcttttaaggaatatagaaatagtatcctttatttgaaagagttttcaccaatttcaactcagcatagtattaaaggaagtgaatttgataatgtacttgtcatattagaatcaaattggaataaatatgattttaaaacgctattcggaaaaggttcagaaaatgaaaatgttataaaaagaacaagaaaattattttatgtttgtatgacaagaacaaaaaagaatatagtgatatatatgcctactgaagatttagaaataataaattcagctaaagaatattttggagaagaaaatgttctttcaatagattcaatttaa

SEQ ID NO: 80146 - DNA, 1764 bp, Staphylococcus simulans
atgaatatagaatggattaaaataaaaggatttagaaattttagtgaggagaaaattaatttctccaataagtctttaattataggggcaaatgatataggaaaaacaaacttaatatttgcattaagactcttatttgatcgaagtttaagtgacagagacttagatttatttgatagcgattataatgtatatactaaatctgaaaacattgaaataacagttaaaataacacatattcaagaagattgtttattagcaacatttaagggagatatcaatgacgaaacagtgtatatacaatataaaaattcaaaaaatggtgaatatagtatacttactggacctactgaagaactattagagctaaaaagttctcgtttttatatcaaaagactaaatatggagtacgtaaacacaaaccgtaatttagattcttttatgaaacgagaaaaaaataaaatactcgaaaatgcaaaatcacaattaacagaaaagcaagccaaacaagatgaagaccgtataactgaaataaaaagtgatttaaccattatgaatagcaaaatagatcatttaaactacattcacgaatctttagacaaagtaaacgctgaattagaatcgcttgctatacataatgtaggtcaaaaactgatttttaaaaatgctaattctgatattgataaaatgttaggtaatattgagctaacttacaatacagatgaaggtgctttaaccttaggaggagatggcagaaataatcaaatttttttagcaacctggatttctaaacaaaaaaacataaactcactagagaaagttactttttatgctatagaagaaccagaagcccatttacatccacaacaacaacgtaagctttctaattacttgttagataaatttgatgaacaaatatttattacgacacactcacctcatatagcctccgaatttagaccaaacaagatagtcaaattatacgctaaaaacaaaactacaaaagtagcaaaaggtggatgtagtgaagaattacaagtgcaatttgatgattttggttatagattagatgcaataacttctgatgtattctttgtaaatgcagtttttttagtagaaggtccgtcagaaaaactattttatactgcgcttgctaaaaaattgaatattgatttagacaaattgaatgtttcaataattacagtgaatggtgtaggatttaaaccttatattaaaatttgcttagctttagatattccatttgtattacgaactgataatgatatttttaataaaaccaagaaagagaaagatattgaattttcttatcatgcaggtatatcacgcgttatcggtatatataaagagcttttattaaaaggtaacaaccatggtctattacatttttgggaagataataaagacaaaaatgaatggataaaatttaatgagcgtccacagagttctatcgattttgctgatgaaatcaaaaagagaatagaagattacaacatatacttatctcatatagaccttgaacatgatttagttcatagtaatttgtttaaatctttaaagaatttctataatactcagaatgaaaaacagacagtatataaaatgcaaaaggaaaaagctgagaacatgttagagtttttaaaaaataattttgatgaattaaaatgtttagaaaacgatgaaatttctaacccacttaaaaaaattgaatgtttagcaaaagaggtagttaatggtcatgagtaa

SEQ ID NO: 80147 - DNA, 1620 bp, Staphylococcus simulans
atgagtaaaaaaattagtgctacaaatgaacaactgaagattatcaaagaacaaggaaatttagttgttactgctaaaccaggaagtggaaaaacacacacaataatagaaaaaatcatagatgtatctacaaatttaatgagctttcaaggagttatagctatctcctttactagaaaagccagtcaagaactggaatctcgttataagaagaaaaaaacagaaaataagaatcacttttttggaactattgacaaattttatatttctgaaattattattccttttgcaaagattttatgcggtaaagggaaaccattggaaataaaaaactcttttgatgattatcctaaatataaacagttaaaaaaattaaaggaaaataaagtagatgaagaaatatttgaactactaaaaaaatcattacaagatggtttgatattcttagaaattagtggtgaaacagcattatatatactcaaaaaagtcccacaaagtttactttatctcaaagcgaggtatactcatatctttattgatgagtatcaagactgtggtcacattcaacacaaagttttcattgagttagtaaatcaaggaattaaaggtatagcagtaggtgacttagatcaagctatctatgcatttagtgagagatattcaaaatatttattatcattaataggaatggaaaattttacacatttggaaatcactagaaaccatagatgtcacgattctatttcagattattctttagaacttatgggtgttagaagaaaaaatatcatgaaagaaaaaagagtatttaaagttaatgtcttaggaacagacgaaaatattattgaatctatagaaaaaaactttgaaaaactaaagaaaaaatataatataaataaaaatagtggttttgcaattttgtgtagaagtaacaaaacagctaaacgggcttctgattttttaaaaataaataataaattatttgttgaaacagctttagataacataaatggaaattgggcaactttgtataatgaccttttatcttcctattatttatataaaaagaattctgaaactgttctaggttttgttagtagatacataaatgaagaattaaattataaaaactttcaaaaaggactaatcattgttgataaaatatttaatttagatgaaaaagatctcatatctaacattgaagattttcataacatcgcccgactaatttatccggataaaccagatgaacaaatttatagaaaattaaaagaagttataagtagcgaaatagctttatgtagcttcaaacctgcatcagaagatgaagttaatatcatgacattacataaatcaaaaggattagaattcaagtgtgtatttctattagatttatatgaatgggttttaccaccacgaggtaattgggtatctaaagaggattatatacaatctttaaatttacattacgtcggaattacaagagcaattgaagcttgttatatcatgataggaagtcacagatatagatcgaaacaacaagattttattaaagctaaagaatcgcagtttttatatagaaataatacacccaatctaagggtggatttaaattggtaa

SEQ ID NO: 80148 - DNA, 1967 bp, Enterococcus faecium
ggattattatctctgcgacatttgaaggaatcagcgaagaagaatttgacaatgagatttgtgcttccatttctttaaattctgaaagtcaaacaatcttagaagaattgatttcaaatgcagataaaggtgtaggtagtatttctctatttattagacctaacaaagctattagaaagcaattatttgatatttccactgaattagactctcatcaatttaacgaatttagaaattctattcgtctatccgactatgaattttactacacatctaaatcaaatctaaatttctgtatcaatgaaaattatgataaattggtaggaagactcaatgacaatatagctagtaatcctgaagaagacgatgaagctctgttgggctcaagaattgacatgtcagatattttcaagcatatttcggttgtttatgttgacgctcttcgagatgttcttagagaaatgaaaaacaatcgaaacccagtcaaaagaatcatggaaacaattgaatcaaaaatatcatcagataatgttgagtcattaaaaacaattatacagcaattaaatgagactattaccagtgttcctgaaattaggaaaattggcgaaaatattaatcggcaactaaatagcataattggttcagtgtattctcctaatcttcttctttcctcaactatgtcagatgatatgggttctttagcaaaatttctttcaatgaagccagaacaaaatatcgacttagacttactagggttaggacatctaaatatgatttatttagctttgaaaatagtcgaatttgaagcgtgtcgttcaagagaactacttaatattatgttgattgaagaaccagaagctcatattcatcatcatattcaaaaaactctgttcgaaggattaaatcttcaaaaaaactatactcagattctcatgaccacacattctgtacatttagctgaagtgtctgaaatatctcggatgaatgtattaaaatcgtttaatggcaaatctatcgttatgaatccagcaaataatctgaactcatttgctaaagaaaagttaaaaaagaacaatctaaatctaataaacgcagtagagagatatttagatgttaaaagaaatggattgcttttttctaaaggtgttatcttagttgaaggagatgctgaagaaatacttattcctcaaatagtaaaaaaattatttggtataaacttagacgaacttggaataggtttgattaatgttggtagtacttcgtttgaatatatcgctagcttgtttgacgatgatagaatacagagaaagtgtgctattgtaactgatttagatgaacaggcaatcccatcagaacatcgattgtataaaagcactgcacaagagaaaggtcaagcaagaaaagaaaaattatcctccctttttaatgaaaacaattgggttaattgtttttatgctaatacaacatttgaaattgagtttttagatgtgaataaagaaaatattctaacttatgtcagtccaattatagatgacgcattcaaagataaaaaaacaataactgcttataaagaagaaatacaaagtgaacaatatttagaaagaaatttagcgatgttaaaactagccaatcatgttggtaaggggtggtttgcaattgagttaggtgaaaaaattgactttttaatcaaaattcctaagtatattcttaatgctattgcttttgcatgtcaggaaatagtagatctctcaatttataaaaaaattctactccatacaatcgacttgtacgaggaaactacagaattgtcagctttatcagctagtttaaaaacaagtgatacagctgatttgaatatagcaataatttctttattagagtactttggtaaagatgaggatgttgtgtatctaatcaatcagatagaaaattacacaaaaatactttatgctgaggtttcaaaatga

SEQ ID NO: 80149 - DNA, 1794 bp, Enterococcus faecium; identical to SEQ ID NO: 71697

SEQ ID NO: 80150 - DNA, 2190 bp, Enterococcus faecium; identical to SEQ ID NO: 71696

SEQ ID NO: 80151 - DNA, 1794 bp, Enterococcus faecium; identical to SEQ ID NO: 71697

SEQ ID NO: 80152 - DNA, 2190 bp, Enterococcus faecium; identical to SEQ ID NO: 71696

SEQ ID NO: 80153 - DNA, 1231 bp, Enterococcus faecium
atgacaaatatcttcgaaaaaatcgtaaatgatttaaatttagaacaaaaagatgttgtggaaagtgaagataacctttatgtaaatgcatgtcctgggagtgggaaaacaagggtacttacaaggaaaattgcttaccaagcaattaaacacgatggatcactaaaaagaataattgctatcacatacactaatagagctgctgaagaaattaaggaacgcctaagtttacttagtatagatgatgatattaatatttgggtggggacaatacatcagttttgtcttgaatttattatttatccttttaaaatgaatctctcaagagtatcaaaaggatttacaattattgatgattatactcaaagagcttacgtcagccaaattaataatatgctgaatttaaatctcaaaacgtatgaactgaacaaaattgatttgtcactttctcatgattttaaaattaatgaagttcagtatactcaagtttctgaaatgtatcacactatgttggaaaaaaataaagaaattgattttgatatgattttactagtagcgtataaaattttaactgtaaacagtaacgttgcacgtaatattgctagtaatataagggcgatttatgtggatgaatttcaagatactagagaattacaatacaatgtaatagctaaattacttcaaaacaaccctcaaattcagtcaatgtttgttggagatattgaccaagcaatttatggatcattagatggtatagctaaatcagttgaagaactagaaatgctaactagtcacacttttcaatcaaagacgctacatggctgttacaggtctaatcagagattagtagacttctactctaattttcagagttgtccttacgagattgaaagcagagggaataataaaaacgaccgtggttttataagttatgattgcaaagttactaaggaggatttacccaacataataaaaaatataataaaggaaaagattgaaagcggcattcatgaaaaagatatttgtgtacttgctcctcaacactatcctctgttttcactgggtgagtatttaaagaaagaattaccgtattgcaattttgatgctataaatatatcaccaattaaggtaaataatcatagtttatttttcaagttagcaattttgtactttactgaatcaggtgaaaaggttcgaagaagaaagctaattgcaaacgatattttaatta

SEQ ID NO: 80154 - DNA, 1041 bp, endosymbiont of Bathymodiolus septemdierum str. Myojin knoll
atggataatttatctcacattaaaatcaaaggctttaaatctattaaagagttagatttagaaatgaagccgattaatgtattgatcggggcgaatggatcaggcaagagtaattttatttcggtttttgaatttcttaaatatgctgttgatgataacatagaaaaaaccgagttatatgtaaaacaacacggcggtagtgatgcttttttactttttggtagcaatataaccaagaaaataaatattgatattaacatacaaaagcataaatatagtttgggatttgaagtagattacaacaaagatgtattaacaagcacaagtattgcctcaaatttagaaaattcttatgataattttatttattttgaaaaagacataaaaagcataaatacttaccattttcacaatactggtaaagccgttagctttaaaaagtatcaggaaaaaaatgactacgcttttttgcgttcagatgctaaaaatatagcaccatttttataccacataagagagaaatttaatcaagagtatagacaaatagttcaatctattcaaacagttgccccttattttcatgattttgtgctaaatttagtgggtgaaaaaaatgacgaaaggattttgttaagatggcagcataagaatgatctggacaatgatttttcagccaatcaattgtcagatggcacagcccgttttatctgtatggcaacactatttttgcagcctaaggagttgcgacctaaaaccattattttagatgagccagaaattgggctgcatccaactgcaattgctgtcttatcagaaattatccagacagtggcaaatgatggggcgcaagttattatttctactcagtctgttgagctcgctaattattttgaacccgatgattttattattgtggattatgaaaatggcgagtcaaaatttaaaaggttaaacgcacaagatttaggtgattggattgagacttatcaagtgggagaggcttggagtgaaggcttgttgggcggtgagccaaaatggtaa

SEQ ID NO: 80155 - DNA, 3111 bp, endosymbiont of Bathymodiolus septemdierum str. Myojin knoll
gtgaatgaccaaaaacaaagaaatcaagccttagatattagccagtcttttatcgtgcaagcgccagcaggatcgggaaaaacagagttattaacgcaacgctatttgaaattattggcacattgtgtagaacctgagagtgtcattgcgatgacttttaccaataaagcggtggatgagatgacgcatcgggtgttatcggcgttgaaatcgacagtgcaatcacgacctagtgagccacataaacaaacgacttatgatttggcagcagcggcaatgaggcactcggatgagcaagggtggcagttgttgcaaaatccgaaacgcttaaaaatctcaaccattgatgggctttatagtctgattactaatcgttatcctttgccaggtcagttggttccgagacaaattatggcgcagcaatgggagcgaaataaagcctatcagatagcagcacagcagacattaatgttgattgatgatgaggagtatggcaaggatattcaaaatttgttgttacacctggataataatgtcagcaagtttgagagcttggtggtgcagatgctgtcgaagcgggatcaatggttggggcgcttgtatcgggataatgtgctagatttacaaatattgcaagacagtgctagaacgattgtgaaacaatattttgagtatttacaaccattggctaaagtgtatttagatgatgaattttttggattgttgtctgctcgtgaaggtaagttatacaccctgccaacgactaatttttcggatttggaggcgtggcagaccattgcagatttatgtttgaccaaaaaaggcacatggcgtacagcagttaataaactcaaggaaaacttgtccgaacaaaaagcacttggcgaagcattgcaaggcttaaggagtttgccaaatattgatttttcgcaagcacaggcggatattttgcagaccattgcacaggtattaaaattatctgtggcacaactcaatatctattttgaagcgcagcaagcacacgattttattgaggtggcgttgaatgctaatcaggcattggacagtcaaattggcgtgagcgatattgccctatttatggattataaagtgcaacatttgctgattgacgagtttcaagacacttcggcatcacagtttaatacggttgaaaaattgatagaacaatggcaaacagatgatgaaaaaacgctgttcttggtgggcgatccaatgcaatcaatttaccgatttagagaatctcaggtggggttatttttgcaagtgcgagataagggaattgcgaacattcgtccaacttcattggtattgagtaccaattttcgctcttcaaaaagtattgttgagggcaataatggatttttcagtaagattttccctgagtgtgacgatgtacataaaggtgcaatttcttactcaccatcgcttgcaaattcggatacaaaggatgacaatgccattgcattctatccctttgcccacgaccaatatctatgtgaagcaaaaacgattggcacgattgtcgccgctagtttggcgaaaaatacacaaaatacaattgcgattttggtgcgtgggcgggcacatttgttgcacatcgcacaacagttaatggatgagaaaattgcatttgaatcggtagatattaccgaattaaaagaccatttattgacgcgggacctgctctcgctaagtaaggctttattgcatttgggcgataaactggcgtggttgagtgtgttgcgcgccccttggtgcggcttgattttggatgatttgttggtgctatctgaggatgataatcagataatttataggcaactaaatgatgaggcgatattggtaaaaatgagtgcagatgggcgtgagcgtgcacagcatctatatcagtgtttgcaagaggttattagcaatcaagggcgatttaattttgtggaattattgacccatacaatgaatcaattggggttaaaaaatgagactttagcaaaaacggaattggcaattaaagacaaatttttgcagattatttatgaatgcgaacagcaacaattactgagcgcggataccattgaacagatgatagaaaagttatatgcaccgagtgaaaaggcgcaggtgaagttaatgacagtgcatgcatcaaagggcctggagtttgacacggtgattattccgggcttgggtcggagttctgggagggatgattcgctgattattcgattgcgtgaattttcgaataaggatttactattagcaccaatgaagtcggcatctgccacacaagaaagtggggtatatcggtatttgaaatctattgaaacagagcaaaactattatgaaagcatgcgcttattgtatgtggcaatgacgcgagcaaaaagccatttacacctattgggggcagtaaataagtcagggaatatcggtaaaaatacgctgttggaattattggggcagttttttacacatcggtttgatgatattgacaagacgcctgatacagtggaatcagcggaaattttgcagttagcgcgtgtttccgagttaaaaacgccagttaatcgaatgcaagaaaaaggcgaaatggtagaatatcagcagaattttgaacgcttatttaagcgtgcattaggcactttggtgcatcaatattatgagcatcaattgtttgagccgagcgcagagaatattcgtaatcaattgattagtataggcacgccgccgagtgagattgaaaaatggcaggcggttatcactaaattattgaataacaccaaaaatgatgctcaattcgagtggctgtttaaagaccgagcatccgcacgaaatgaagcggaatttagcattaatggtagcaccatcgctattgacagactatttattgatgaggggactttatgggtgattgattttaaaacagccaaacctgctgaggatgagccattagaagcctttattaaacgacaacagcaagaacacacaaaacaattgcagttctataaaaccgcaatgtctgagatttacgactatcctgtgcgttgcgcactatattgccctagcgtcaaacaattaatcgacatttcctaa

SEQ ID NO: 80156 - DNA, 1932 bp, Pseudomonas sp. Os17
atgaagcttcagtcacttcgcctatcgaactttcagtccttcgggttaactccaaccgagttaacgttcgaaaacatcacgtacctgatcggccccaatggttcgggtaagaccgcggcccttcaggccttatgcaggctctttgcttttgacccctcaatgagaaggattcagcgatccgattttcacgtgtcgcataccgagctggaggtacctgctgagcgggtgctgtggattgaggcggacttcattttccccgagcttgccacggatgacgacagcaccactgtcgctcctcacttcggccacatgcgtctggatgagccgaacggtatcccccgcgtccgctatcgactccgcgcgaccatgggcatcgatggcgatattgatgaaagcctggtgtacgtactcgatgtggatgcagatggagcaccgctcaacactgcccaagtcgctcgctcggagcgcaatcacattcacgtgcactatctgccagcgaggcgcgatcctgctgaccacattgcttacagtgccaatgcgctgcttgggcggattgtgcgatcggtacaatgggacaaggagcgtgtcgcgattcgggaattgactacccagatcagtgaaagcctttccgccaatccatgcatcgacgccttcagcaccagcttggcctccgcatggggtgccctgcataaaggcagtttttttaccgatcccagaatcaccttcatcgcatctgaaatcgagtctctactacgtcatctttccgtatcgttcactccagggcacgaagacaattttgtagatttcgcacgattgagtgatgggcagaagtcgatgctctacctgtctctcgtcttgtcctctcaggctatcggtagagccgtgatgtccggagagaacaaatccttcgatctggatcgactgcggccgcctgtgtttaccctcatcgcggtggaggagcctgaaaacagcttgtctcctcactacctgggccgcatcgtcaatgcgctagatgcgatggccgcgcaccccgacgctcaagcgttgatagcaacccatgctccttcgatgctgcgacgggtggagcccgagcacattcgttatttgcgactgacgcaggatcggcaaacacgaatcgcacagatcgttttgccggctgaagcggacatcgctcataaatatgtgcgcgaagcggtccaggcattccccgaggtttatttttctcggctggtggtgctcggcgaaggagacagcgaggagattgttttgccgaggctgttgcgggccaagggtatacccgtcgacgaatcggcgatcaccatcgctcctctgggtggaaggcatgtgaatcatttttggcgccttctggccggccttcggattccctatgtgaccctgcttgatttggatgtggcccgctacgcggctggctggggacggatcaagtacgtcaatgatcagctcgagcaacatgagccggagaaggcactcactacaacggtcaccacccccaaatggaatgaggacacgctgttagtcagaagggatcattttttttggctggatggcgttaatcgcaatctattcgaagtactgcaggagcggggcgtgtttttcgcttaccccatggatctggatttcgcgatgttattgtcttatccagacgcgtatggcgtggttaaaacggctcctacaatcgacatcgtcaaggctgtactcgggaaaagccatcacaacgcgtcccagtacactccagatgagcttttgctgttcgatacctaccatcagagctttaagctgggcagtaagccggcatcgcacctggaggcactggcgaccttgaccgatcaacaattgctggatgccatgccgaagtcattgagtgatttatcggacgcgctcattgccatgctgcaggagcttccagaatga

SEQ ID NO: 80157 - DNA, 1665 bp, Pseudomonas sp. Os17
atgattgaagctctggcgtggcgcccggctgataacctgacccttgaacccaatgcgctgcgcgctgcgaaagagcagcaagattgcctggccctgacagcggggcctggggcaggcaaaaccgaaatgctggcgcagcgtgcggactttttgttgcgcacaggtacttgtcgataccccaagcgaatactggcaatctccttcaaggttgacgctagcaaaaacctaaaggaacgagtgcagcgtcgctgcggtagcgagctttcatctcggttcgatagctatacctttcatgcgttcgccaagcgcatcatcgacaaatttcgccccgtgctctcaggggaagacgcgttggaccctggttaccaaatcggcgatcgcaggattagccgtaagcaaatcgagtttcgcgacttggtaccgtttgcgattcaaatactcacccagtctgctgtagctagaaacgcaatacgtcagtcctacagcgacgtttttctggatgagtttcaggactgtacggatcagcaatacgacttgatcaagacggcattccttgacacctctattcgtctaacagccgtgggtgacacgaagcaaaaaatcatgggatgggccggtgcactagacgggattttcctgaagttcgctcaggatttcgatgcggtaccgctcaatatgtaccgcaactttcgctccaagcctcgtctgctgcgcatgcagaacgacatcatccgcgtactcgatccacaatcggtaatggctgatgatcaggtggaaggtaaccaaggggaggttctagcgtttcgctatagcgacagccacgcagaggcggagcatctagcgaacctggtcgctgaatgggtcaataacgacggcgttccgctttctgagattgctatcctcgtgtccaagcagctggatctatacgcaggcgagttgatgactgcgctcgaagcccgcggcatcccctaccgaaacgagcagcagatgcaggatattactgttgaaccggcagcgcgtctggtagtggattttctgtcatcagtttacggaaaccgcgaacccaaagcctggatgaggctgatgagccaactgatcccctacgctgacgaggacatccaggcaaatgcacgtcaggatctaggccgtttcatcacgtctcagcgcaagagcatcgcaatctctgagttgctcagtgaaaggtatgacgggtggtgggacacagcagtagctttcctcaggcacgtaggtaccgaagcgctggcatccttgtctcccgactacgagtcccacgagcgtctacttcaggttttgcgagacacgaaggcgcgcattgaggaattattgaagcttgagcctgatcttccgaaagcactcctccgattttcagatgatcaggctgtgaggattctgaccatccacaagagcaaggggctggagttcgactcggtcatcattctcgccgtagacaacgaaattttcttcggcgaccaagatgctaatcgatgtgcgttttttgtgggtgtatcacgtgcaaagcggcgtttggcactcacctttgcagacactcggtcaaggccgcaaggtcatactggacggtggagccttcaacgcacgatgcaggaagaatacttttcatacgcagtacctcacttgaatgcttaa

SEQ ID NO: 80158 - DNA, 1923 bp, Pseudomonas aeruginosa
atgaggctgagcagtctatttgtcagcaacttccagtcctttgggccggtcgcggaagatatctcgttcgaagatgttacgtacctcttaggccccaatggcgcaggaaaaacagccgcgctgcaggcgctctgcaggatgttttcctttgacccaagcctgcgccgaattcgccgttcagactttcacgttcctgccgcagaagccgagcagccagagcagcgtcatctctggttggaagcggattttacgttcgaggaaacactcgatgatgacgataacgacaccgtgccgcctttcttcgggcaaatggcgatgcgtaaagcaggagagcccccgcgggtacgctttcgtctagaagcaacaatgtacgaggatggggagatcgaagagcagtttctcttcgtgaccaagacggatgagaatggcgatcctgtgtcgaaacaggcggttcccaagcggcatcgtgacaccatccatctccactacctccctgccaggcgcgacccttccgatcacgtagcttacggggcgacagcgcttctgggccggctccttcgtgccgccaattggaatgacgaccgcgagacagtaaaggaactcacggagcagatcaccgattgtctagtcgagaacgagtcagtaaaaacgcttagcgatagcctcaccaccgcttggcagcgcctgcacaagggggacttcttcgcctcgccccgcctgacgttcgagaactctgagatcgaagcattacttcggcacctcacggtctctttcagcccaggtcatggagagaaccaggttgattttgcacgtctgagtgacgggcagaaatccatgctttacctctcgcttgttttgtccgcgctcacgatagggcgagaggtgaggtctggagagaacaaggccttcgatccccataagctgaaaccgccggcattcacaattcttgcggtggaggagccggagaacagcctttcgccgcattatctcggacgcatcgtcaattcactgaaatcctcggtcgacgtggacgcccaggctctaatcgctacccaagcgccttccatgctgcggcgggttgagcctgaaaacatccggtaccttcgactgaatggtgatcggtgcacccaagtcacaactattcagctacctccgaagcttactgacgcgtacaagtttgttagggaggccgtgcaggcctttcctgaggtctatttcgcccgtctggtcgtgctgggagaaggtgatagcgaagagatcgtgctcccaaggatcctccaggcgaaaggtgcgcctgtcgatgagtttgccgttgcaatcgcaccattgggtggccgccatgtaaaccacttctggcggctgctttctgcgatcggcaccccttacatcacgcttctggaccttgatgtcggccgtcaccaaggaggctgggggcgcgtgaagtatgtaagggatcagctagatcagtttgcacctcaagacagcctgcccgctggctggccttaccatgaatggaacgatccccagacgcctgtgcggacccataactggttcgagggtgggacggtaagtctgttcaatgagctcgaaaaacgtaacgtcttcttctccgaccccttggatttagattttgcaatgctgtgcgcattcccggacgcctatgaggctgaagccgtcccggcaaccttgaagagccacaccaaggtcctgggagatagccatttcaatccagaccagtacgacgaagaggagcagcgctggttcgaggcctaccacaaactcttcaagttgagcagcaagccggcggcacacttgggcgcgttgggaaggctcaccgatcaggaacttcttgatggcctgcctgactcgctcgatcggctagcagacaaggtgatcgaacggctcgatgagtcgccggaatga

SEQ ID NO: 80159 - DNA, 1671 bp, Pseudomonas aeruginosa
atgatcaagcctgaacgctgggttccctctccaggaattcgactggaaagaaacgcgtgggaggcagttcgtgagcgcgaaaggtcagtggtgcttactgctggccctggtgcgggaaaaacagaggtgctcgcacagcgagctgactttcttctgcgtacaaacgcctgccgctacccaaaacgcatccttgccgtttcattcaagacggacgcaagccggaacctcaaaaagcgagtacagcttcgctgtggttgggatcgcgcgtcacgtttcgacagcgttaccttccatggctttgcgaagcggatcatcgaccggttccatccagttttggtggatgaggcgttgagccaggactatgaaattggtccggaatacatctggggccaacagatcacctttaaacacctacttccgttcgcccttcggatcgtgaaagagagcgcgatcgcacgcaatacgatacggcagtcctatacgcacgtgttcctcgacgaattccaagattgtacggcagaccaatacgaactgatcaaactgctgttccacgacacgccggcgatcctgaccgccgtaggggacactaagcagaccatcatgggatgggcgggggcgctcgaggggatattcaaaacctacgctgacgactttgatgcccgaccgctacgtctgtttttgaacttcagatcccagccagcactactgcgaatgcagaacgatattattcgggagatcgaggctgaggcagtgatgccggatgatctcgccaagggcgaaggcggggagattctggctgggaatttccgaaatgccgctgaggaagctgaggctcttgcgaaccttattcagcgctggattactcaggacggcataccacctagtgaaattgccgttttgatgcctcgccaagttgaagagtatggcgaatcactaatgctgcggctcactgagcggggaatcgctcatcgtaatgatcacgaccttcaggacctactgaaagagccagcagtcggccttgtaatcgattacctcacttgcctctacggccagggcgaggcagaagcatggtcacggttaatggaccatttcaccccgttcgaagacgacgacagccaaaatagcgctcaacggatctttgaagagacataccgggatcacctcaagaaggttaagcaggagcgaaaaacagcgagcccatatggctcgtggtgggatctgaccaatgagttcctaaagaaacttggcctgtcgtccgtcagcgcactctccgccgactatcgctcaaaggcccgcttgttagaggttgttcgagacgttcgtgatcgtatccgggcgcaacttgcgattgagccagatttactcaaggtattggcacgcctttctgacgattcggcagttcgcttcctaaccatgcacaaaagcaaaggtctggagttccattcggtagttgtgctcggcgtcgagaagcaaacgttctgggggcacctcgaccaagagcgctgcgtgttttttgtaggagtttctcgggccaaacacagtcttgcgctcaccactgcggactatcgaccacgccctaagaacgtcaagagatgggatgagcatcgagctccacatggtgagtttgtgagtcatgttgttcgacacctcaccagtcagcactttaagtag

SEQ ID NO: 80160 - DNA, 1779 bp, Bacillus pumilus
atgtatattagtaaagtgaaaataagtaattttagaaatttcaaagaaacagaagtagaattaggaaaacaaatggttattgttggggaaaataaagttggaaagtctaacttcatgcatgcgctaagactggttttagatccaactttatctgaatcaagccgtttattacagctttcagacttttgggatggtctaactcgaccattaaatgacgaagaaataagaatagatattgaactcactgagtttgaacaagatgataaattaaaatctgtcctttctgattttttagtgaaagattcgccattaactgtaggcttaacgtatagattttttcctgtagatgaaaacggaaataaaatttatatttttaaagtttatggaacagaaacagaaaatatttttagttatgaacaaaggaaatggttaccgcttgaggtgttatcggggttaagagacactgagagtgatttatcaaattggagaaaatctcctttaaggcctttaattgaaagagcaatcgaaacgacagataagcaagaactagagaacgttgctgaagaaattactcgttcaacagattctttgaaagaattagacgaaattggatcattaactgaaagaataaatactcaattagaaaatattgtaggagatatacattcgatagaaaccagcctaggtttttctcctgctgatgcttcaaaactttaccgtgcaataaagatgtttattgatgatggaaatagaggaattaatgaggccagcttaggatcttccaatttgctttatttagtgctgaagcttctctctctagagcaatatgtagatgaaaatgaacgagctcatacttttttagctattgaagaaccagaggcacatctacatcctcatttacaaagattactttacaaatatttgttgaatcacgataagataatagttgagggttctcaagagcaacacaaaatccatagtgtttctaatattttaacaactcattcaccgcatattgtaagtgttgctccattaaaatctatcgttttattaaaagaaacgcatggagaagataaatctacaaaaatagtctctaccgcaaaaatttctttagatgataaagatgtgaaagatttggagcgctacattaatgtcacaaggggggaaattcttttttctaaaggggtaatattagttgaaggagatgctgaagaatttctgttaccttcactgtcagaattgcacggaattgatcttgataaacatggaatcactgtatgctcggtatctggcactaattttcttccatatatcaagcttctgggaagtgaaggattagatattccttttgcaattcttaccgattatgatccaagagataagttacctctaattcataatcgcttaataaaattattaaattttatagataaggaatatgattatagcgatttaggaactgaagatctaattatctatggaaaagaatttggtatttttacaaatagccatactttagaggttgatctatttgatacaatgcctgatgaaattacagaaactttaactgaattgacaacaaatagtaacgcaatcagtagagcgcaaggctggaagttagcaagtagtattaaaggagatgaaaaaagctatctttccgacatagaaaatattggtaaaggaagatttgctcagagattatcgactaatcttacaagtttatcagttgttcctgagtatgtgaagggagccttagattatgtcatcgctaaagtttga

SEQ ID NO: 80161 - DNA, 1827 bp, Bacillus pumilus
atgtcatcgctaaagtttgacaagctactttatagagaagcttctaaagatttatcaaataatgaagcacaactaaaagtttataattctacagggaattgtgtcgttcttgcgggtccaggtagtggaaagtctaaaattcttacattaaagttagcaagaatcttgaatgaagatatagaagcacctcaaggagttgcctgcttaacttacaataaagaatgtgcaagagaactaaaagagaagctatacaatttaggaatcattgaatcatctacaatttttattgatactgtacattctttttgtttaaatcatgtgattagaccatacaaacatttagtgaacgctaatttaccaaaagaaattaaagttgctacttcaagggaagtaagggaaacaatgcttcgaacattcaacttaactattggacagaatgaacgatatacttcaagctggtcaacagcgtttaatgtttatagaagaacgtttatagataggaaatcatccgaatggaaaactaacgacagtgatatagcagaatggattcttaattacgaaagctcattaagacatcaagggttaattgattatgatgatatggttttgcatgggttgtggatgattgaggaaaatcaatggattcaaggattacttcaagctaagtttcctgttattgcagttgatgagtatcaagatttaggtgcatcattggatagaataataagagttctctgtatagaaaatgacactcgtcttctagcagtcggggatcctgatcaatcaatatatgggtttacaggagctcaacctagtttattaaatgaccttgctcaacaatcaggtgtattaaaaattagactaaaaaagaattacagatcaaaggggaatattgttaaggcatcaattgcttcgttattagaagaaagagattttgtttcaaacagagatgaagaaggaagtattaagttttatggtattagggatggtatagatgcgcaatgtgattatatttgcaaagaaataatccctaaaattcttactttagatccttccagtacgcttggggatattggagtattgtacattgataaaaatgatggagatcgaattgctgagaaagtagcaaaagaaggtctacaatatattcgagtggatggaaatgctccttacaataaaaatcagctaactgtgtggatagaaaactgtgcaatgtggtgttctggaggatggttaaagggaagtccccaattttctgaaattgagcgtactttcagttcattttttttaaattcaaatatgtcagaagcaaaactagaaagtaagaaattaaatctattcaattttttatttcgaagcagagatgttgaacttaaactaagtgattggcttgatgaatttaataaaagtattgtttctgaattattagattgttttactgaagagccagatatgttaaaagaatatgataaattaattgaatcggcaaaagatggacaactaaaagactttaaagtatcctctttatctcgccaagtaggatctgaaagtcatttaaatttatatacattgcatagttctaagggattagagtttaagtatgtcattatgtttggtttggagcatggaaggataccttggttgaatgctcatgaagataagataaatgagtcaaggagattattttacgtaggtctaactagagcaaaagatgaaattcatttattatgttcaggatggtattatgattactatgacaggtatcaaaattatgggccatctaaatttgtcttagaacttaaagcgtttgtagataataatttgtaa

SEQ ID NO: 80162 - DNA, 2121 bp, Rothia mucilaginosa
atgagaattgattcggcaaaaatcagagggtatcgattgttggaagaggcagatatttcttttaataatgagggtggggccacagttatagttggacccaataactgtggcaaaacatcctttgtagagatattctacaagttcatagaatcaggtaatcaaaatgattttactgtagatgatttttcgattgcccagcgcataaaattacaggaatctgctaccgatatccaagagtatttcaaggaaatagagagggagggtgatttagaagaaaacttgaagaaaaagtttatcgaatcactaccagagatttctctggaggtaaaattttcatatcaagatgaagataacataattcctttgtaccgactgattacaaatttagatgaagaagataacactgctcgacttgcctgcagatatttcgtcgctgattcgagtaagctatttgatgaatataaagagtatgttctgaataggagcggagaaaacgatgggctcgggtgcgatatcctcaagtttatctctcgtagaaagaatacgttcaaaattgaatatgccgcaatagaagaaggggcagaatattataaaaaaactgttcctgattgcggagtgtacaagaaagttgaacggtcggcagttgaaaatgcaattaagtgtcattttatatatgcacagaataggtttgatgacacgacacgtgattccatgcatggtctttcgaaagtattttataaatactttaggagtcttatttcgaaagaacagattgatttgaatgttttagaaggaagggtaaataagatttctgagatgcatgacgtacagtataaatcatcattcgatgcagttattggcagccttaaagagattgggtacggagaatccctgccgacaccaaaagttatatcagacattgagtttgaaaactttatggataataatgtaaaagttgtatatggagattcctcaggtgatttttctgagggacataacggcttagggtattcaaagttaatatatatcattcttcaagtttcattatttattgagaatattaaaaatatggagccacgccctggagttaatgttatttttgttgaggaaccggaggctcatcttcatccgcagatgcaggaggtatttattcggtatattggagaatatattgaaaagcaacttgaaaaaatagaggacaatactggagtgtccgcacacctggtggttacaactcactcgtcgcatattattgccgagaatggatttacggggattaggtatttcagcctaataaacgatagcatcgacaaaaaaacaattattaaagatttgggagttttctctaaaaatatagataaatacacccttaagtttctgagaaagtatatggagcttcgaccttgcgatatattttttgcagacaaatctattcttattgagggagttactgagcgtatcctcatgcctgaaatgattaaaaaagtatctgataaagcacaggagaatgggggtagtcgtttggataaagagtatatttccattattgaagtaggtggagctcatgctatgaggtttaaggagttaatcaattttattggtattcctgcattgattattactgatattgatagctcgtgcatggtatctggtaagtcgcaaaagtgtgagccgacgcaaaagaatgcatttacactgaatcctaccttgagaagtttgtatagtgatataaaagagaaacgagaaaatgatgaatcagcgcaactttatactgatacgctattgtctcttaaatcggaggacaaggtagccgaaggtgggaatataagagtatcctatcaaattccggaaaatggtagggagccttcaggtagaagtttcgaagaggcgtttatcattgccaacgcatctacaattcataaccagaaagctactattaagtcaggccttaccaataagctgagggaacaaaaaacagatcatgatatattgatgaactcatacatgatagctacgtctatatcaggtaaagcagattttgcgttggatattctaatgcttgatggatgggatgttcctaagtacatcagagagggtctggaatggctgaacaaagcgtag

SEQ ID NO: 80163 - DNA, 1683 bp, Rothia mucilaginosa
atggctgaacaaagcgtagatcaaaagataaaagagtgcgtcgacaataataaaaattttgtgcttgatgcgggcgctggatcgggtaagacaagcacccttactgagactcttaagaaactccttaaatggcgaggtgaagagtataggtgtaccggtcaaaaaatcgtgtgcatcacctatacgaatgtcgcagccaatgaaattatgagcaggattaacgatgactcccgtgtgcatgtttcaacaattcacagtttcctgtggtcgattataggtaactatcaaaaagagttgagggaatccctcatagagatgaacggtacgttggaaagtggaaaaagggtggaaaatttggcgaccgaactagaatataaggatataagttatgtggattatagagattttagaaaaggaaaaataggtcatgacgatgtaatagagctgtcgtatctgatgtttaaaacgcactctaagttatcaagaattgtagccgatttgtatcctgttatctttattgatgaatatcaggacactagtgaaaaagttatcgatattattttgaatacaattggagatagatacaaagatagagtattgattggcttgttcggagattggatgcagagtatatatgagtctggtgtgggcaaggttaatcctgaggacaagggcctggaacgcattgttaaggaagagaattaccgatcctcgaatagggttgttcaagtacttaacaaaattcgaggtgatatttgtggggatatttatcaagctccccacttgggtcttgatgggcaagctaaattctattacagaaaacaaggcaatagtgagtccgctttaagggatttaaagatgatgttagagattgatagcagttggggttctgaaatgaaaattcttgcccttacaaataggattgtggctatgcattctgggtgggaaacattgcgttctgtttataatggatatgctaaggaagatgcgcgatttaaagtggataatctattgagtaacaaagatccttatagtgatctttatgaatatattgaaagtattttgttggcctatgaggataacgataatgtggaactatataggatattcaaaaatcgaattaatgaagaagggtatataaataaatttgggttgtttaaaagagatttatctaagtgtttatctgatttatggaactactgttctaatagttcaattgaagaagtctgctcttatattttgggtaaggatatgtttcctaagaatcctgatataagtagactacttcgggaagcgcgctctgaaattgtttgtgctagtgggtcaaaaaatggtccagtttattacttgaaggattgtaaatattctgaagttcgtgctatgaggaagtataaaaacgagatgacccctttttccactcaacatggaactaaaggggctgaatataagaatattattgtaattttagataatggtaaatggcataaatataattttgaatctgcattgacgaataatggcaataataaaactagagaaacctataataggtccctaaatatattgtatgtctctctatctagagctcgtaataacttggcagttcttatggtcgatccaaatagtagtatattacgtgctgctcgtgatatttttggggaagataatgttattgagttttag

SEQ ID NO: 80164 - DNA, 2316 bp, Klebsiella oxytoca; identical to SEQ ID NO: 74634

SEQ ID NO: 80165 - DNA, 1878 bp, Klebsiella oxytoca; identical to SEQ ID NO: 74635

SEQ ID NO: 80166 - DNA, 2160 bp, Klebsiella oxytoca
atgtgtaataaaactatgctaagagttcaatcgattactatgtatatcaataaattagctattagaaattataaaaactttcgaagctcgagtttctgctttgttaaagactcagtgaatacaattatcggtgagaatgcttcaggtaaaacaaatttgtttaatgctatgcggctgattcttgatgactcacttccaatgaattcaagagttctattagatgaagatttttatcgtggcttgaatgaccccttcgggcactggattattatcacaatgtattttgatgatttaagtgaatctgaagaagaacaggttatagcgaactataccataaataatggtaacgaagaggcattaaaagaaggaaattatacatttatatatcgcccaagatttcatataaggcaaaagctatacgagttaactgtagataacaaagatttagattctagattggaggcttttacagagttgaaatcaacttgtataatatccaaagagacttacgaggcagtcgcttttgttagaacaaaagttgattttaataatgacgaagtttataagcaattagttggggattttgaaaattacattttttcaaatcccaatgaagatgatgctacagtcattggtgtaaaaaaaccgccatacttcgccttaggtagtgaagttgcttgtacttatgtcaaggctcttcgcaacgtggtagctgatttgaagtattataaaaccaatccactgtataaattgctcaccttaaaaagcaaacaaattgatgatagaaaagatatttcagagaatgttaagaacattaacgaacaaatttcagcaatccctgaaattgctcggctaagtaataaaatatcaacatctttacttaatacggttggctcaacatattccccaaaaatattggtttcatcacaactgcccgaagattttactgagttaatccaatcacttggattagtagtcgaggattctttagattatgacggttcaggaagaattgatgatttaagtcttggcggagcaaatttaatatatttggctttaaagttatatgagtatgaagaaattagagatgctgaagagcatataactcattttctattgattgaagaaccagaggctcatatacataatcatattcagaaaactttatttgacaattttaattttcaaaatactcaagtcttcgtttccactcattcaacccaaataagctctgtttctaaaatatcgtcgatgaatattttggctcggcaacgaggatatacagacatctatcagccttccaacggactacagccaaaagaaatttcgtcaatagaaagatatcttgatgcaatccgtagtgatgtgttgtttgctaaaagtgtaattctcgtagagggtgatgctgaattaataatcatcccagaacttataaaggttactttaggtattagcttagatgaattaggtattagcttaataaaattggatggaacagtatttaagcatatttcaaatctttttcatagtaatagattaaaacgctattgcgcaattttaactgataaagatttggcatatgtgaaagaaccggatgaactatttgatgctgatttcgttgagtctttgaaaaacgctgagattgatggtttacgcagagaacgagagttggcagagtatgtagaaggcaatgaatttgtctccgttttttatgcagagaatacgtttgaaacagagcttgttcggtatgatgaaaattccgatcttttcaacagtgtcattaggactacatataaaagatcaggtgatattgagcgagttgttgcaggtattaagtccgatgatttaagagtaagatttagaactgctcggtttttcgccaataaaataggtaaagggtggttagctactgaaatggtagagtatctccataatgagaatcgtgttccagactatatattaaaagcgatccattttgcccttaaagatagagaactgaatgctgtgcttaataaaatgcttgcctataatatgtctttaatgggaacttgctgggatggtgtatgcaacaagattaattctgaatcagattttgataaaaagatgcaagagtatagcaaacatttcgatgatagcttttctagattttgggagttgtaa

SEQ ID NO: 80167 - DNA, 1257 bp, Klebsiella oxytoca
ttgtatgataaccgattaatcgattttgatttgattttgaatttaacgtgcaaattattattgaagaatgatgtgctatgtgaaagactatctttaattatgcgatatattttagtcgatgaatatcaagatacctctcatattcaatatgaaatactaagattaatagtaagtaaaagaaattccttagttacctttattggtgataaagaacaagcaatatatactggattgggagcggttgttaaaaatagaaaagagttaatcgattacttcaaccttgaagtactggaggaaatgaggttaaccggttgttttcgtagtagtcaatcgatcatagatttttatagcaagtataaagatgatgcctattatataaactcattatcagaacttaaaacatttccttctgtgatactcaaggaaaatagtgttgatatcacacagttgtctgtttatgtttcgggaataatacgaactcacttggaacaaggtatttctcctggtgaaattgctgttctatgcccaagttggtttgatgtaataaaactatccaatgaagttataacgctaaattctgatctagatatcgatggtgtcatggtttctcccatacctaaaaataatgaaaacttgtggctcaagcttgtaaaacttgctttacttaaaaagaatccatctaattatcttgttaggcagaaacttttgcgagatttattcaaagagttaaatgatttagagtcgtatacaaaattcttgtctccaaagaaaattataaaagaaataaataaaatagaatttgcaatggattataattgtgaaatagatatttggataaataatcttataagtatgttctgtaactcaatagggttggatattaataatcaaagctatgtttataaggaaatgatctgcttgatagatgccactaaaaaaagaatggctaaatatagtatgaactatagggcaaatgatcttcattcttttttcaattttaaaagcggaattaaaattacgacttgtcattcgacaaaaggagatgagtacgatgtcattatttgcacagggttattaaatgggaaaataccaaattggaatgacattatagattgtagctcggcacatcagaattatgtggctcgcaggctcttatatgtcatagggtctcgtgcaaaaaaacatttatatttgatatctgaaagcggtcataagacacaaaaaggttatccatatcagatcactccacagctttaa

SEQ ID NO: 80168 - DNA, 2160 bp, Klebsiella oxytoca; identical to SEQ ID NO: 80166

SEQ ID NO: 80169 - DNA, 486 bp, Klebsiella oxytoca
atgccatatagaaatttgacttctgaacaactagatgctgtaaaatttgatggtaatctattacttacagcttgtccaggttcaggtaaaacaaaaacattagttgccaaactttgttttatccttgaaaataaggaattgtttgatataggtaagaaaaaaattgtggcattgacatatactaatgttgcagcggatactattctcgaaagaattatttcatatggtataaatagcgattcactgtggattggaacaatacatagtttttgtttaaattggattataaagcctaacattgatagaattccaaggctctgcaaaggttttaatgtaattgatgaatatgaaaaagaattcatattaaatgatctgagagaacgtcataacttatctccttacgataaaatagatacgcttttagactttaatttaactccggtatattctcgaaatactgctgaatattcagtggtaaaagcctag

SEQ ID NO: 80170 - DNA, 1584 bp, Listeria monocytogenes; identical to SEQ ID NO: 73566

SEQ ID NO: 80171 - DNA, 2178 bp, Listeria monocytogenes
atgcttgtgaacgaatatacaaatagatttggtactattagtaatacaaacaattttgcttcagatgttgtgaggatggaagatgaagatgctaatatttttcatcatttagtaagtttaaatggaggtaacgaatttaacaaagagcaagtaaatgctattcgatttgatatgagaacacatcttaggattatcgctggtgctggaagtggaaaaacgcaaacaatttgtgcaaaggcagcttatttagttttgaaagaaaaaattcaagaacgaaatatagtgatgtgcacattctctaaaaaagcaagccaagaaatgaaggaacgtgtcaacgagtttcttggtggcaatagtcgaatagaagtattgactttccatggatggtttcaaaaagagtacaatgtacttattaaaaaatatccgtatctagaaaagtatgggatagcgggagaggtacccggaaaaggctctggaaaagatagccatgataggattttaatgaatttaattaagcagtatcatttatataattttgataaatatgaagaaaaaccaattaatgaacgacttagttattggcgaaatatgggatataatgatgaggaaattgttgcttttatagcaagatattttgatgacaaagaaatattaaaggatcaactacttagtgaagttttttcagagatgttaaaagaattggaacgaattaagagaagagagaaagtcattaattttgatgatatgttaattaatttaaagtgtgtattggagaacgactcaaatgctctttctttaatacaaactcgatatcaatatatatttattgatgagtttcaggatatcaatcccttgcaaaaacagataattgaacttatttgtccaccagattacgagaagagtgttatcaattctactaaattaattattgtaggagacgatgatcaaagtatttatttcttccgtggtgctgaaccacgttacattaaagaatttgatagacaatacaggcaaacgtcaatagagttaatgactaactatcgttctattgctcctgtggtacatataggaaatactctgatatcaaacaatcaacatgatagaataaagaagtctatgatacctcacaaactaaatgaaggtgattgttacgcaaaagtatttcaaaatgaacagctagaagctaattggattgcaatgcggatattaagcttgtcttcagaagagaaaccattccaagatcaaattggtaaaccgaattatacggaaacaatcgtattataccctaataaaaatcaattaaaatctatgattattgctttacaggaaaaaggaattccctttgtcacaaaatcggatgatgatttacttggtatatttggtattaatttttttaaacgatcattcaatctattaatggatattattgatgcagaaacgatagaaataaaaaagcatttatacaagcaactcataaaaaatatttgtttatattattatataccatttgcaaaaagtacagattttgtctcagatgagactaattatacttcggaaaagttaactgattttatatgcaaagaaaagaaagttagtaaaaaagagatggcacttattaaatccatattccgagatattaatgaatttataaaaaccgaagaattgaatattaaagtttttgttaattggcttgtagaaactccgaaagtaaagaaacaattaattgatgaagagaaagattggttgcttaaagaggttagcaatgttaaaacgctaaaagagttaatacttaaatataaagcagcgagaaccttaaaagaagagatggctgacaaattaagagaatatgataataataactataatgcagtgtatctattaacaattcattcaagtaagggattgggatataaaaatgtttttgtaaaaggtatttataaaaactcactaccagactatcgttcagtggataaagaaagtattgaacttcagccgttaattgaacaagcatctccaccaacaacaatggaagaacaaagaagattaatgtatgtagcgctaacccgagcaaaagaaaatctttatgtaacttaccctagagaaataaatgataagcctacacttgtgtcaccatttataaaagaatctaatattatgtttagtgaagaaaaaatatag

SEQ ID NO: 80172 - DNA, 1584 bp, Listeria monocytogenes; identical to SEQ ID NO: 73566

SEQ ID NO: 80173 - DNA, 2178 bp, Listeria monocytogenes; identical to SEQ ID NO: 80171

SEQ ID NO: 80174 - DNA, 2007 bp, Bradyrhizobium diazoefficiens
ttgctgagcataaatccgtccacaactccgccctgctggtcggggcgagaagcagatcaccgcggtgttggcagcccgaatacttcgtacgcgaatcaccgcgtcggtgtatcgtattggttgcatcgcgaccacaaactattgttgcagggggcagaagtgacaatcgccaaaccaaagtctagtggcgtcaaaatagtttgcgtcagaatttctaacttccgtgcgctgagaaatatcgaaatggatataggcgatcttacggtgatggtcggaccgaataacgccggtaagaccagcattctcgacggaatccaggcggcgattggagcgaccaggaaattgcttggtaaggacgacgtgtttcttgccgagacagagaccgacgtaccaaaggagcgcaaagcggtaatcgatattttgttaaggccgactgatgatgacggcaagatcgtagaaagctttccagccggcagctattggactgcactttggggggcaggtgtttcgcaagatggcgccgacttctttgaccaggttgcgattagaacaacgctcgcgtggaatgcagtgcacggagactacaggacctctcgcgcatttctgaaggagtggaaggcattttctgagtggcttaccgccgacgaacaaggaacggctacctccagtcaaattgaaccgatcgcaatgcactacattgatgcgaagcgcgatttggaagaagacttacgttctaaaggatcattcttccgccgattgactgatgacctaggacttagcgatgccgatatatccacgcttgaggccggactcaccgcgttgaatcacagcatgataaccaaaagtgaggttctcaagcatctgaaagacacgcttacaaggctacaagacgtaattgctgctgagaaggcgacggtggacatagctccgattccgaggcgtcttcgtgatctttctaagggcattgacgtcactctcagcaccacaggagcgcaaacctttccactaaatcgtcacggcatggggacccgtagcctcgcttctctcttggtatttcgagcctttgcgtcgtggcgtaacgagaaggcaatcgcggctggtgacaagctgcactctatcttggccttagaagagccggaggcgcatcttcacccgcaagcgcaacgcgcgctattcggccaagtaatggcgatcccaggtcaacgagtagtcagtacacattctccttacttcgcaggccaggcaagtttggaggatcttcgcttgcttgtgaagtcgggaagctccactagtatttctaagctcgaccttgagtcattaagcggcgacgagcgaagaaagctggagcgagaggttattgcaagccgcggagacattctgttcgcacgagccttgattttatttgagggagaaaccgaggagcagtccttgcctgtcctgtgtcagaaacggttcgggatgagcgctcatgaacttgggttcaattttgttggcgttggaggcggcaattatttccctttcgtctggctcgctacaaacttccgcatggcctggtacattttctcagatggcgaaccaaggccggtcgcaaacctaaaatcgcaactagcgcgagctggtcactcggacatcactaagtgtccccaagtatcattgatcccgggcggcaatgactacgaaaagcagttgatcgatgaaggctatctagacgcgatagagatggcagtcgcaaagaccttcggtagtgacaagcttgatgactacatagccagtctccacgggaagcctggtaagaaggtggatggcaaagagacaaccagggattactctggagctgagggcagaaagtctgcagtcttggatttcatgagagagaacaaaacgcggctcgccgctccgatcgctcaacaaatctgcgagttgccaaaggagcggcaaacgcccaaatgtcttgagggcctgtttgaccgtctagcgtcagattttagccttgggagcccgatgtga

SEQ ID NO: 80175 - DNA, 1872 bp, Bradyrhizobium diazoefficiens
gtgaactcgagcgaaattcggttgtcgccgcagcagcaggctatagtgaactatggcgaggggtcgttgcttgttgtcgcagggcctgggtcgggcaaaactagggttctgactgaacgggtgagaagacttattacgtctaccaaagggcactttcggattctggctctgacgtttacgaacaaggcggctaacgagatggctgggcgcctgaaggacctgagtgatctagatcagaaggcgtttattgggactgtgcacgggttttgtcttcagatgctgacggacagaggaaagcctgtcggcgtcaatgcgtcgccacagatattcgagctgatgcaggataggaaacaggttctgctagacgcagtgatggccgaccccgtattaaccaacgtgctagcgcgggctggcgatgcacgggcgagaaatcgacgtctcgacgagtggcttcggcagatcgccttcgtaaaaactcatccaatcacgattcctgaaatcgaggacgaaaccgaggcgcggatattcgacgcgtataacgctgggctgcgtgcgagtggtgcctatgatttcgatgatcttcttcttttgggctaccagcttcttactgattacccaaaaatcggcgatttctatcgaaggctttatgcttatatttgtattgacgaagcacaggacttgaatgaagcgcagtacgcattattgcaggctctctgtggtgatagctttgataacgttatgatggtcggcgatcccaagcagtcgatatacggattcaatacatcaagtccggagttcatggatcgtttctggcgggatttcgacgccactaaaatcgaattggcagagaattttcggtcttctcaagttgtagtcgcgattgcggctaagttggagccctcctacaacgtggaaggacagcttccaattcgaggagaggcaagtctaatagttgggagtgatgaggaggctgaggctcgcttagtcgcagatcagctgagcgctctgcttgctatagggcatccggacgtcgaaggaatcataacgccggccaagtgtgcaatcttgggccgaacgcgctttactttgatcgccatagagaatgagctgaagaaacggtccgttccattttacaaacgcctatcttcgctacacgagaatgaatctgaagtggtggacgacttccaactcgcgcttcgcgtaatggcaaatccgcgagacaagctgcatctctctgcgttagcgaagaagtgggggcagggcgagcccaagcttgctcgcgactcgtcggtagaggatgcgttgactgctttgcgtgcgatgtcagcgacgcatgcagctcaccaggccgtagctcaagcagtagcgctcgtttcaggcgacaaggcacgcacccaatttatggccgccattgaggttttgcgctgctatgcagacggtctttcgggagaagacaggcgcacgatctacgacgacacagaagtattatgcagagagtgggatcagtatctccgttcaggtagcgcaggctcccgacatataggaggctttctgagcaacatggccctcggaacgacgcagcagcccaacacggatggggtcgccttactcacggttcattcctcgaaagggttggagttcgaggtagtcttcttagtgggaatggccgacggcgtgttccccgactatagagcccagcgggagaaggaaaaagctgaagagcggcgcaatgcattcgtagcagttacacggtccaagcggcttctctatttttcttatccgggtaccaggcgtatgccctggggcgatgtttggagcagtaagccttcgccgtacattgcggagatttcatctattctgcggccttcgtag

SEQ ID NO: 80176 - DNA, 1806 bp, Bradyrhizobium diazoefficiens
atgcacctatcaaggatctgcattcagaatttcaggacgttctcagactttgaagtcaagctgggcgggaatgtcgtcgtcgttggcgaaaaccgaattggcaagagcaatctgctgtatgcgcttcgcctcatcttcgatgcgaccttgccagatagtgcgcgccagctccgtatggcggatttctgggatggcttagggcagcctggcaccgatacgaatatcaagatctccgttgagattaaggattttgagcgcgacatggacgtgttagcgctcctgaccgcctttagactaagcgacgacccgtctacggttaggctaacgtacgaattcaggccaaaggcagggcttaccggagaaccgaaggccgacgaggattatgaattcgcctgttacggtggcgagaacgggaataggaccttcggtcataacctgaggcggcggctgccactcgacctgttgcccgcacttcgggacgccgagagtgacctggcgaattggcgacgctctccattgagaccgcttgttgaggctgccttcgcagagattgaaaaggatgatcttgacgaaatcgccactgctatcgaagcagcgaccggaaaacttgccgagttcgaggagattgatgagctcgagtcatccataagcgactttctctccgagatggccgggccaaagcagaacgtcaatccaaagttggggttcgtacctgcagatgcagtccgcctgtatcgcagcattcagctgctgatagatgacggaaagagagggataaacgacgccagcctcggctcggccaacctcgtatttctcacgctcaaggccatcgagctaaaagcattgatagccgacaacaaacgcgaccacaccttcctggccatcgaggaaccggaagcgcatctgcatcctcatttgcagcgatctgtttatcggcacttcttcgaaacgatgtttggtgacgagggtacccagactgaattgtccgttttcctcacaacccattctccgcatgtcgcgagcgtggctcccttgcgctcccttttgctgcttaaatcgtccaaagacgatggcactaaggggtactccaccgccgcgataccattttcggacgatgaggtcgcagatttagcccgttatttggacgtgacgcgagccgaactattgttcgcccgaggagtggtacttgtcgaaggcgacgccgagcgtttcctagtaccggcattcgctgcgaatctctcgatcagtttggataagcttggaataagcgtctgctctgtcagcggcacgaacttcgctccttatgccaaactccttactggtctaaagatcccgtttgcggtcattacagactgggatcctggcgacgacgacgatgccgatgcgcttggttggaatcgtacctataacttggtttcaattatcgaagaggttcgcacaggcaagaagccgaaggcactgctatcagagctcgaagacatcgacgatgtaaacgagttctgcaagcgatgcgaagcgtttggaatcttctcgaatatcgatacattggaagttgacctattctcaggtgatttcatcaagccgattattaaaacgttgcgtgagggaaacttcggaaataagcggacgtcatggatagacgcttgggagaaagacgctaaatcattggatcgcgacgattacctagcccttattgacgctatcggaaagggtcgctttgctcagcgcctcgtcgccaatttgggagcgctcaagccaccacgatatatcaaggcggctatcgagtacgtggtcaaaaatgtctaa

SEQ ID NO: 80177 - DNA, 1788 bp, Bradyrhizobium diazoefficiens
atgtctaatcaagccctgtatctccgggcggccgacgatctccgtcgaaatgcggcgcaatgggaggcgtacgaatctgaggggcattgtgttgtattggctgggcccggcagcggtaagaccaagacccttacgacaaagcttgctcgtatcctctatgaggatgtccaaaccccgcgcggtgtggcgtgcatcacgttcaacaacgaatgcgccagggagttggagacccgacttgcacagttgggtattgaggctaacgagcgcctcttcgtgggcacagttcattcgttctcgctgaccgaaatcgttcttccatatgcgaagagcgccaagctcgggctacccgacgatttcaaggtcgcgacccaacgtgatcaagccttagcgcttgagcgtgctcacaagcgggtcattggcggccctggaaacccccaagagacaaaattcgccatggggcggcaccgacgctcgatcctcaaccgcgaaagcgaacagtggagagctgtcgatcctcaaatgtccagactggtcgtggcttacgaagatgaacttcggaagatggggaccgttgattttgacgacatgccattgctagccgtccgggcgcttcgggaacacgcgtggcttcaacgcgcgattctggctaagtttccggtgctggtggtagatgaatatcaagatctaggacgcgctctgcaccgaatggtgatgggcttatgttttagcaccggaatacggctattcgccgtcggtgacgtggatcaatctgtctatggctttaccggagcgcatcccgaattgctccagcaagtcgccgatcgggccgacgttcagacggtgcgccttgagttcaactatcgatgcggctcgaacatagtggccgcctcagagtttgccctgggagaagtgcggggctatcggaccccgcccggggcccacgaggggaagatcttctttcacgcgctcgccagcagctatgaggaccaggcaaatcatttgttttccgtggtcctacctgatctgcagagaaggctgggaaagttgactcccggcgatatcgccatactctaccctgccgcgtggatcggcgacgcggttgcccaactcgcctctcggcacggtttgggcgtcctgcgggcggatgcgaatgcactgtatccgcgatcgagccgaattatgcgctggctcgaagactgcgcgctatggtgctgcagcggttggcggagcggagagccggacttcacaaaattggtgcgagacggggtacggatattctctgaggatatcatttcggatgatttgaggctgcagttccaacgtcaattgatctccgcgttgtggagccgccgtatgagaactattccagtccacgattggctaggaggcgtccgtgatgacgcttttagtgagttcctctcaggaaaagttgtgcgagacgaggcggagacacttagacagttcattgaacgctgtggtgcagatggtgacgcgcacggaatgacgcttgaacaatttgccggagacggagagcagaacgagcgcatcaacctttcgaccttacacagtgcgaaggggcgcgaattccgcgttgttatcctcttcggaatggattctggccgccttcctcggaacggtgccagctcaaatgagatacgagaggctcgcaggaccttttacgttggttttacccgaccaaaggaagagctccacgtggtttacacggcagctcgcccatcctcgtttgtggttgaggtccaaaagcgcatgggggtaatcgcggggtaa

SEQ ID NO: 80178 - DNA, 1842 bp, Legionella pneumophila
ttgcgagcttgtcggattgacataaaaaattttagaggaataagtaaggcaactattttgtttccaaaacatggtgtcttaattggtgataacaacaccggtaagacgacaactctagaagcccttgatctcgtactcggacctgatcgccttaacaaatacccccctattgatgaacatgatttcttcaggggaaaatatagaaccgaacctaccgatgtgactgataaaactgtaaacagcgacaaatcttccaacactcaagaggaaattaaggataaatcaactgaaatacctcatattgaaattgaagtcaccattacagatttgactgaggaacagcaagcgaagtttggtgattacatcgagttttgggattcaacaacaaatacattatacgtcaaacctgatccagccggaattgatcaggttcatatttcagaagcactccgagttacttttcatggccagtataatgaagaggaagatgacttcgaagggaaaactttttttacccgtagccttactgaaaatgatacaccccaacccttcaccaagaaagataaacaagtatgcggttttctatatctccgttctattcgcacaggttctcgcgccctgagtctagaaaggggaagtctacttgatattatcctgcgtctgaaggaaatcagaccacaaatgtgggaagatactctacaagttttgtcgcaaactgaagtcgcaagcaatccagatctaggcatctcacctgtacttgaaagtatcaataagtcacttaaaaaatatgtacccagcgaatggggaattgaacctcatctacgagtatccagtcttactcgggaacatcttagaaaaattatcacggcattcataacaactgatgatgggaatcattccgcaccgttttaccgacaaggtagtggcactattaatatgctgatgctggctatgctttctcaaattgcagagagaaaacagaatgttatatttgctatggaagagcctgaaactgccatacctccgtatgcacaaaagcggatcgtgcatgaagtacgaaagctagcatcacaaactctttttacgtcacactccccatatgtattagaagaattcgacattgaggagacaattatattaggacgaaattctgacggcttacttatccagaaaaaaatctccttaccaagtaatgtaaaactcaaacgctatcggcaggagtttcgtactcgtttctgtgagggtttacttgctcgccgcgttcttattgcggaaggcccgacagaagcatcagcgttccctgcggtgtgcaggcgtctagcagaactaaatcccgatacatacgcctcactcgaagaactcggaatctgtacgttagatgctgatggtgaaagtaatatctcaggaatggctcagctctaccgtgatctgggaaaaaagacgtttgctctatgtgacaaacaaagtgacgaaagcaaaactctcattgaaagccaagttgaggttatattaatgcaccaagaaaaaggatttgaaaacctaatcttgaacaataccacagagacagctttgcaaagatttgccagattaatagattggccgcaacatttgcttcaaaaatatcctaatccagaacaacaggcctctactgcggtacctgaatatctccgcaagcataagggagaaggagtatgcgctgactttctagctcagtgttatgaaacagaaatccccaaatggcttcgggatgcctgtatccaattaaaagctacttgtacatccagtctaatagcagaggaggctcaagctagttcaagagtcgatgagaatgcaactgactga

SEQ ID NO: 80179 - DNA, 1812 bp, Legionella pneumophila
atgcaactgactgagaaacaacttcaagtaatggaacttaatgggcacctgcttgttacaggaggccccggctctggtaaaacgacaatctcgattcttaaggcctctcaaatagcaaaaaatcaccttcgaccgaatcagcagattctttttcttagctttgcacgggcaagtgtgtcgcgagttacggaagccattgagtacgaacagaaaatcccttcaacccaaaaaaaacgtatcaatgtcgaaacctatcattctttcttttggcgcatcatcaagacgcatggatatcttatcggacttccacgccagttggaaattcttcttccttcaaacgagtcgattgctctctcggagatcagagcaaaattccccaagagaccacatacagatgagcagaacacagcaaaaaaatcaactgaacaaacagaacgtatccgcttagcaattaaagaaggaaaagtatgctttgatctatttgcgacctatgccagtgatatactatatggaagcagtcgcgttcgtcacctaatagctaccatgtatcctgttatcatttttgatgaatttcaagatactaatgatcaacaatggcgtgtggtacaagcattaggagaattctgtcaactgattgcactcgctgatccagagcagcggatatacgattggattggagcaaatccagctaggcttgagcattttcgtaaaacgtttaatccggtagaagtggacttaagtgctgataatcatagaagtccaaatgtagaaattgcattgttcggaaatgacctgttaaatagcaactttcgacaaaatccctacaagggcgtatctattaattatttcgattcatttcctgcaccagcaatgactaaacttgtaactgaagtttatgccgcccgccaacgattgatagaacagaaagtagataattggtcattagctatacttgtaccaaccaagaaattaacacgcctcgtgtcagattttttgcaccaacctccagcaagaatgaaagcagtggcccatgttgctgtcattgagatggatgcagcaattcttgcagtggagatcgttgggcttctgcttcaaccctctggaagaaaaaaccatttcgaacagttcattacattgatttgcaactactttcaaggcaaaaatggagattctccaacacagatagcgttgaaggaagctgcaaatattcggaagtcttacgaagagttattagttagccaaaataatggtaatgcacttcgtaaaaacagcattttagtaaacatgttgacggtgtacaatcagatttgtgctcttgaattgacgggtatacctgaagaagactggcggagtataggacgtactatggaaaatggtgcatgtaaacgcctaaaagaaattgcagacgaagttaagaatattcggttactggaacgcggtactcaacttcgccaacaattatcccaagattggcgagacagccaatatggcaatgcattatctatcattcgacaagcatttgtccaagaacatctctctatgactgcgaaaccagaaaccggagttgttgtgatgaacatgcataaagcaaaaggtaagcagttcgatgaggtaatcatttttgaaggttggcctcagcgagtaagaagagaaatagtagctaatccagatcgtattgtacgtttcaattccaaggaggaaataaacgaccaagcacgtcaaaatctcagggtcagtgtgactagaggaaggcaaaaagttacaattttaaccccaagtgacgatccttgtatcctcttgcctaaattataa

SEQ ID NO: 80180 - DNA, 1842 bp, Legionella pneumophila; identical to SEQ ID NO: 80178

SEQ ID NO: 80181 - DNA, 1812 bp, Legionella pneumophila; identical to SEQ ID NO: 80179

SEQ ID NO: 80182 - DNA, 2121 bp, Sphingobium sp. AM
atgctcatcgaaaagatccaggtaaagggatttcggctcttggaagacgtcgagctgctgctcgaaccgactgcgacagtcatcgtcggccggaacaacagcggtaaaacttcgctcaccgagatctttgatcgtctcgcaggtgagcacggccccaagttcagactggaggatttctcggccggcacccgaggcaagtttctcgaagcaaaggcgaaacgcgagtccggtggcaacccggaggaggttctcgctctccttccggcgatcgcggtcacgctcacgttcaaatatgatcccgacaacggcgagttgggccctctcgcaccgttcgtgatcgaccttgatcctggctgctcgaccgccatcgcgcggatcgaatatgctgcgtcgtcagcctcgctcgccacgttgttcgatgttcaggaggcagaggacggcagcgacggcatcgctcatttttaccgccaactccgtgacacattgcctcgagcttatcgcataagtgtcactgcgatcgaccccacggatccggctaacttccgcatgctcgacgggaccggcgcactatcggcgctcgttcaatgcggcttcgtgcgcgctcaacgaacactcgacagcagcaagccaagcgataccgccgtgatcgggcggctcctcggaacgctattccagaccgcgagctcgatgacggccgctgagagcgaccaagccctggcagccgcgctgaagacctccgtcagtcagatcgaacagacgattcagaacgacttcgacacgatggtgaaggacctgctgccggcactgagcgcgttcggctttccgggtctcaacgatgccgagttgaggcctgaaacgtcgctaaacgtcgagacgcttctatcggatcacacgaagatcttctacaccggccagcacggcgtccatctacccgagggttataacggccttggcacccgtaacctgatctacatgctgttgcagctcgagacctttcataaggcgtaccgcgctcgctcgctccggcccggtacgcatctcgttttcatcgaagagccggaggcgcacctgcatccccagatgcaagaggtgctgatcgcacaattgaacgccgccgtcgcggcactttccgccaaatatgtaggcgagccggtctggcaggttcagttcgtcatctcgacacactcgccgcacgttgcaaacgccgcctcgttcgaagcggtgcgctattttctgagttcgagccaggatgccgcaggggcgcggcgtaccaaggtcaaggatttccgcaaaggcagcgccgctatcccccaggaggatcgcgagttcctccatcagtacatgaccctgacccaatgcgatttatatttcgcggacaaggcgatcctggtcgaggggaccaccgagcgcatcctgatgcctcgcatcgtgcggctcgtggacgaagggctcgcgcccgaacggaagctcggccgccaatatatcacgacgatcgaggtcggcggcgcctacgcgcacatcttctacccactgctcgacttcctcgaactgaagagcctgatcatcaccgacatcgatgcggttcggatcgacaagaccaaggataagccgcgcgcggtcaaatgtccttgcgccgaaggcgagcacagctcgaacgccgcgatccgaaactggttcgcggtccccaagggccagcagatcagcatcgaggcgctctgcgccaagacgccggaagataagctctcccgctatcgctcaatcgcttaccaggtcccggaagatggctcgagctggtgcgggcggagctatgaggatgcgctgatcctcgcaaatcctgagcggtttggcctgcccgaggaaggcgatcgcggattgctcgcgtgggagatggcgcaagacctcagcaaatcagagaccgccctgcggttcgccatccaggaagcggattgggccgtccctaaatacatcaagcaaggcctgacctggctgtccgagccgcccccgcctccggaagctccgccaccgcttgctggtgtcggcgcgggcccgccgccgatcgcggcaggctcggacgacagtcccgccgcgccttcaaacgccgcgcagcagtgcgatctatga

SEQ ID NO: 80183 - DNA, 1716 bp, Sphingobium sp. AM
atgacgaaccccgcggtcgaagctgccaaggaggcgcagaaacgcgttgacgcatgcttggacgaaggtcgcaacttccggctggaagccggcgcaggcgccggcaagacctattcgctggtcgaggcgctcaagaagctcatcaacgagcgcggtcgcgacctgcagtgggcgggccagaaggtcgcctgcattacctatactgaggtggcgcgggaggaaatcgcgcaagagattgagcagcacccagcgatccttgtggaaaccatccacgcgttctgctgggggttcatgtccaggttccagaaggatctacgggcgctcgtcgcggcccttgaggacaagcaggacaagatcgctgaagcaggcggtgtggccgatcagatcgtggaatatcagctgggcttcttcggtatcgacgagaagcgcattacgctccatcacgacgatgtgccacgattcatggcgcatctgctcgggaagccgaaattccgggctctttttgccgcaacttaccccgtcattttcgtggacgagtatcaggacaccgatccgcatttcatggcggcgctggcagagcactttctagccactggcaccggtcccaggatcggcttcttcggcgatcactggcagaccatctaccgtagcgactatggtctggcggcctatccctcccttgagccgatcgacaaggggtcgaattttcggtcggtgcccgcggtggtgaacgtgctgaacgcgttgcgaccggagctaaaacaggccgtcaaagatcccgacgctgtaggcgaggcgcggttctttcacgccaactcctacacaggcgagcggaccagcagttcgtcatccaagaacgacacgcccccggagatcagccgcgagtttatggcgaagctgatggagaggctggaacaagacgggtgggatctgtcatccgagaagacgaagatccttatgctgacgcataacgcgattgccgctgagcgcggctatcccaccatcgcgaaggcttatcgttacaatgactccttcgcgaagaaggaggatccgttgatcgcctttctcgtcgacaccgtggagccgatgtgtcgtgctttcaccgagaagcgcttcggcgacatgttcagaatccttgggtcacgaccagagcttagctcgcacgaagacaaggtcgtgtgggcgaccgacatggccgcgttagcggacgcgcgcgccaacggaagcataggcgacgtcgtcgatctcctgaagggaacaggtcgacctcggctaccggaccggattgttaggcgcgagcaggagcttgcggcggccgaagacggtgcggagttgccgcgctcgctccaggagcatggcctcgtgcgagaggcgccgtaccaggaactggtccggctcgccgaattcatcgaaggccagacgccgtttgcgacacagcacagcgttaagggcgcggagttcgataacgtcatcgtcgtgcttggcggcgggtggaaccattacaactggccccagctgcttgagctgctgacgaccggcgccatcaccgcgaagaacgagaaggggtattatcgcgcgcggaacctcttctacgtctctgtctcccggccaaagaagaggctcgcagttctggcaacccagacgatgtcggccacggctttacagaccgccacgcgactgtttggttcaggcagcatcgtttccatcacgctctag

SEQ ID NO: 80184 - DNA, 2070 bp, Streptococcus pneumoniae; identical to SEQ ID NO: 71978

SEQ ID NO: 80185 - DNA, 1818 bp, Streptococcus pneumoniae; identical to SEQ ID NO: 71979

SEQ ID NO: 80186 - DNA, 1767 bp, Bacillus sp. SDLI1
atgctaatttcaaatgcatgtatcaaaggatatagaaacttaaaaaatgtcgatttgaaattaaataggttagtaatctttattggtgaaaataatagtggaaaaagtaatttattaaaagccattacactaccatttttaaataatgagataggaaatgttggtaaaaatcttggctggcatgatataaataatgatttgaaaaatacctattttaattttattaaaataaatttagaaaaaatcaaggattctgagatagatataaaagattttgttagtattattccatttgtatcagtaatggtaacttttgaaccagaaggagctgatgaatattatgttcgtaaatggaataattacctggacgatggcaagcttctatatcaaattgagtatagatattttgtggaaaatcctaagcagttattagagcatataacaaagattttagctgataaatgtgaagatgatgtagataatatgaaattgaacttattaccgatagagatgtttaaatattcgattgtggtcccaacaacgaatgaacaggtagcatttaatgacttaactagttttaaatataattctctagctgccgagagggatgatttctcttataaaaatactaaattagggtcccaagcattggtgaatctcttgcataataagttaggtgatgaacaaaaagtcaaagttgaagaatcgtatggtaagttttttgatgatttgaaagagattagtaatttagaaggcatatttaattggcaagaaatatcagagattgaaaatgctaaagagtttttcgatcaaattagcttgctacctaatatgcctagtattaactctttactaaacaatgttcgattaggaattggagaggagtatctttatagtcaaggattagggtatagaaacctaatctatctacttgtaatgatgaattcattagaagtaaattcagatattgcattaaatattttaactgtagaagagccggaagcacacctttgtataagtaatgaaaggctacttgcaagttttattaattcaactataaagtctagcaaacagatgcagttatttatttcaacacatagttctgaatatttaaataaattagagcttaataatgtgacgatagtaaaagaagggaaagcattttctttaacaggtgttgctggaaaggaagatttagaatatttagcaaaaaaacccaatcttgattttttgaaatttttattctctaggagatgtattttagtcgaaggtcctagtgaagaaatgctcattaaatcatatttaagtttccaaaaaaacgtattaaatgatattgaagttatttcattacataaaggatttaaaaatatgctggatatatggctgaaggtaaacgatggtacatctaatagaataggtattattagagattttgatgaccaaccaaaagcacaactaagtcatgaagagtataacgataatcatagtatttttgttactactactactgagtatactttggagccagaatttgttaaaactaataaaaatttcgagaaattaaagaagtacttttctgaagaatatggttggaaagatgatgaaataaaatctccggatgctttatctgataaatggagaacagctaaaacagatattatgttaaatttctgccaagattttggtatgggacatctcaaagatatatcgttgccgaagcatattgaaaaagtattaaaatttttacagagtggtgtaaaggaatga

SEQ ID NO: 80187 - DNA, 1341 bp, Bacillus sp. SDLI1
atgaagatagtagttgctggtgcaggggcaggaaaaaccactacaatggctgaagaagttctaacaaggtatggagaattaaaagacggaaaaataatatatgtcattacctatactaacgctgctagagatcatataagaaataaaattactgagcagcatggtagcattcctactcaaattaaagttaaaacagcgcatgcttttctgctacaagaaattatttttccttttcatcatttgttgtatggacaattgtattcaggggtttcagcaataaatttgccagataaccatacttataaaacgaaaaagttaaaagaattaagggagaaaaatattatacatgttgaagaagtaacaaaaatagctcgatatgttgtaaatggtaaaagtactgatagaaaagtagtgaaggacaggcgactaaaagttatatctataataaaaaaatatctagattcaatttttatagatgaagctcaagatatggacgccgatttatctaggattattaagacattttatattaatgaattctatttatatattgttggggatcctaaacaagatttaagggggagaagcgaattaagacaattaattagcagttatcctcattttgtgaagtacaaaaaagaaaattatagatgccctagatcacttgtaaaactttcaaataagtatgttccaaaagaagagagccaagaatatcaaaaggaggaagaaggaagtatccattatttattcgaaaaagatataaacatttccaacttttttgataatgaaacgtttgaatatatttatatatatcaaaaaaatgaaagatttattactagtgataaagatagagacacacataagaatttattagaatatgaattgaaatgtttatttaaaaaaatagattgtgcagaaaatcatgtagaaaaaagagcttttgttttacttagatgggttcaaaaaaatataattgtcaaaaataattggggaattgtaaatggtataagtgatctgttgtctctagagttatctagtcaagataaagcacgaatgattgcagctcttgatttaaatcgagaaatactttttaaagaagggataattgttgattcaattgataaggtaaaaggtttggaaggggatcgttgtttatttatattaacaactgagttagctgaatacttttttcaaaataaaactaaacaaaataaaatggctaattatttatatgttgccttaacaagggctaagaaagaattgtttattttaattactatggaagtagaagagcgttatggacggcaatggattgaaaataaattaaaagctttattgtaa

SEQ ID NO: 80188 - DNA, 1836 bp, Pseudomonas aeruginosa
atgcgcgtctcacggttggggatagagaacttccgcggcatcaagaaagccgaacttcacttctcagggcatacgctcctgatcgggggcaacaacgtcggcaagagcacgatctgcgaagcactcgatcttgtgcttgggccggatcgcctgaatcgaacaccccccgttgaggagttcgatttccgtaatgcaggctatctgaacgaagacggcgaaacacccgttcctctccgcatcgaagtcgtcctcgttgatctcaccgacgacatcaagaagctctgcgccgccaatctggagttctggcacaaggccgacaagcgggttctcggcgaaggtgagattggtaacgccgacgaccccaacgtggaactctgccttcgcctgattaccgctgctcaatacgacatcgaagaggaccagttcttcgccaaaacgatctatggccgaagcgacgacgatgacgacgccgatcccaggtcaattcccactaaggtcaaacgagcgataggctttctttacctgcgcaccatccgcaccggctcgcgtgcattgagcttggagcgcggcacgctgctcgacaacatcctgcgcatgaaagaagcccgcaaggggatgtgggagagcattcgcaagcgtctggctactcttgatcctccgatagacgctgacgctaccgagctggggccgatcctcgatgaaatcgaggcaaggctggcggaatacatcgcgcccggcagcgaggggcgttcgacccgtctgttcgtctcccagctcacgcgtgagcacctgcggaagaccatcgctttcttcttgacgatggggcgtggagaggaagccgtcccgttccaacagaccggcagcggaacattgaacacgctcctgctggcgctgctgacctttatcgccgaacttaagaaagacaacgtcatctttgcgatggaagaacccgagatcgcccttccgccccatacacagcggcggattgcgaactacctactcgaacaaacttcgcagtgcttcgttacatcgcactcgccatacgtcatcgagcgtttcgagcctgacgggatactgaagctcaaccgcgaccaacacggcaccttgagcggcacggcgatcaagctgccggctggcatgaaggccaagaactaccgacaaaactttcgccgagccatcgccgaagccatgctcgggcaaggcgtgatcgtcggtgaaggcatcaccgaacaggatgccttgttggtggtcgcgcagaagatggaagacagtgatccggccctgttccccttggacgtggccggcctgtctgtcatcaatgccgatggtgacgggaacctggaaaagttgggggccttcttcaaggaaatcgggactccagcctttgccttcttcgaccgcaaaaagcgcacggatgcggaaatcgccaccttgcaaggtagctacgtggtagccaaagaaatccagcaaaaaggtgccgaagtgctgatggctgaggaaacccccttggatcggcaatggcagtatttggaggccctacgcaccgaggatgccgacggccggtttgggattccggcggcccgccccgctgacgacgaattacgcaagctgaccacttccacattgaagggcctgaaaggcgaaggtggtgcggcaaagctgctgcaactgtgtgccgtggccgagttgcccaagaccattaccgacttcctcgccgacatctaccaacgctatccaaagccgaagcgcaaggaagcacctgccgcgcaggtcgatgccggagcagaagctgcaggtgacaacgcggccgcggccgatgaccccgaggaactgtaa

SEQ ID NO: 80189 - DNA, 1734 bp, Pseudomonas aeruginosa
atggccctggtcatctgtgcgcagcgacagagcattctcgacgagaacggtgcgatcctcgttacgggcggcccaggcagcggcaagacgaccatcgctttggcaaaggccagactcgttatcgaacggggcctttcacttggtcagtctgttctttttctcagcttctcgcgtgctgctgtggcgcgcgtcgccgaagcgagtaagacgcagttgcctgccgctctgcaaggaaagctctcaatccagacgttccactcgttcttctggcgcatcttgcaggcatacggatacttgctgggcgcgccaaagtcgttgcgtctactaatgcctcatgatgaggcggcgatgcgccacgagttcgagaacaatggtggcgattggaatgtcgagcgccaacgattgtttcgggaaacagggagggtcgcattcgacctgttcgctccgaaggctcacgaactactgtctcgaagcgcacgcctgcgcgagctgttctcgtcgtgctatccgttgatcgttgtggatgaggcgcaagacacagcagaagatcagcggcagtgtgttcgactgctatccgctggcacgcaaatgatgtgcctcgccgacttggaccagcagatttacgacttccggccgggcgtcagctcagaccgagtaacgcacatcatggccgccttgcaaccgctacgcgtggatctggcaggcgagaatcaccggagtcctaattcagaaatcgtcgccttcgccaacgacgtgctactgaacacaccgagaggcgcggcttaccagggtgtatcacgcataaactatcgcgccaaccgagagtaccgtgatcgcgcgatccgccaagcaatcggaatcgccattcagcgcgcaaaggaggccgcccagggcgacatcgagagcttggccgtactggcaacatgggggcgcggtgtcaacgtcgtttcccgtgctctgactggtaatggcgcgaacttgatcccgcatcgagtgatgattgatgaagcatcggtgctgctttcgagtcgcatggtcgcgtttatgctggagccgcgcaggccggcagcggaggaactgctggacttggcagacggccttgaccttgcggcgacggtcttccgggcacgcggcggaaataccaaccttgccaccgcgcagcggttggcagcaagcgccgtacaaagccgcggtggcacttccccgcgcgctaacggagtggcatccaagctcttggatgcgctacgtacattgcgcatacacgagttctcgggagacccgaaacgggattggttggatgcgcgcagcattcttcgtaacgcaggcgccaacccgcttcaagtcatagcagaggatgccgagcagctcgtcgccttccagcgtggccgccgtatctcagcagcactgaccgaactttggcaaacgcagggagcgtatcgaaatgcgcgcggtgcgcttgatacggccatcgcggaagaccagctcttgtcaggcggcaacgacctgagaggtatccacgtcatgaccattcacaagtcgaagggcaaggagttcgacgcagcaatcattttcgacgatccgaacagcagccctctgcttttcactcaagaggctgcgcctcaccctcgttgccgcaaactggcgcgggttggcatcacccgcgccaagcatcatgtgctgatgctttgcgatatgttcactccaaccgccttgctgcaagggcatcaactctag

SEQ ID NO: 80190 - DNA, 1836 bp, Pseudomonas aeruginosa; identical to SEQ ID NO: 80188

SEQ ID NO: 80191 - DNA, 1734 bp, Pseudomonas aeruginosa; identical to SEQ ID NO: 80121

SEQ ID NO: 80192 - DNA, 1836 bp, Pseudomonas aeruginosa; identical to SEQ ID NO: 80188

SEQ ID NO: 80193 - DNA, 1734 bp, Pseudomonas aeruginosa; identical to SEQ ID NO: 80189

SEQ ID NO: 80194 - DNA, 1836 bp, Pseudomonas aeruginosa
atgcgcgtctcacggttggggatagagaacttccgcggcatcaagaaagccgaacttcacttctcagggcatacgctcctgatcgggggcaacaacgtcggcaagagcacgatctgcgaagcactcgatcttgtgcttgggccggatcgcctgaatcgaacaccccccgttgaggagttcgatttccgtaatgcaggctatctgaacgaagacggcgaaacacccgttcctctccgcatcgaagtcgtcctcgttgatctcaccgacgacatcaagaagctctgcgccgccaatctggagttctggcacaaggccgacaagcgggttctcggcgaaggtgagattggtaacgccgacgaccccaacgtggaactctgccttcgcctgattaccgctgctcaatacgacatcgaagaggaccagttcttcgccaaaacgatctatggccgaagcgacgacgatgacgacgccgatcccaggtcaattcccactaaggtcaaacgagcgataggctttctttacctgcgcaccatccgcaccggctcgcgtgcattgagcttggagcgcggcacgctgctcgacaacatcctgcgcatgaaagaagcccgcaaggggatgtgggagagcattcgcaagcgtctggctactcttgatcctccgatagacgctgacgctaccgagctggggccgatcctcgatgaaatcgaggcaaggctggcggaatacatcgcgcccggcagcgaggggcgttcgacccgtctgttcgtctcccagctcacgcgtgagcacctgcggaagaccatcgctttcttcttgacgatggggcgtggagaggaagccgtcccgttccaacagaccggcagcggaacattgaacacgctcctgctggcgctgctgacctttatcgccgaacttaagaaagacaacgtcatctttgcgatggaagaacccgagatcgcccttccgccccatacacagcggcggattgcgaactacctactcgaacaaacttcgcagtgcttcgttacatcgcactcgccatacgtcatcgagcgtttcgagcctgacgggatactgaagctcaaccgcgaccaacacggcaccttgagcggcacggcgatcaagctgccggctggcatgaaggccaagaactaccgacaaaactttcgccgagccatcgccgaagccatgctcgggcaaggcgtgatcgtcggtgaaggcatcaccgaacaggatgccttgttggtggtcgcgcagaagatggaagacagtgatccggccctgttccccttggacgtggccggcctgtctgtcatcaatgccgatggtgacgggaacctggaaaagttgggggtcttcttcaaggaaatcgggactccagcctttgccttcttcgaccgcaaaaagcgcacggatgcggaaatcgccaccttgcaaggtagctacgtggtagccaaagaaatccagcaaaaaggtgccgaagtgctgatggctgaggaaacccccttggatcggcaatggcagtatttggaggccctacgcaccgaggatgccgacggccggtttgggattccggcggcccgccccgctgacgacgaattacgcaagctgaccacttccacattgaagggcctgaaaggcgaaggtggtgcggcaaagctgctgcaactgtgtgccgtggccgagttgcccaagaccattaccgacttcctcgccgacatctaccaacgctatccaaagccgaagcgcaaggaagcacctgccgcgcaggtcgatgccggagcagaagctgcaggtgacaacgcggccgcggccgatgaccccgaggaactgtaa

SEQ ID NO: 80195 - DNA, 1734 bp, Pseudomonas aeruginosa; identical to SEQ ID NO: 80121

SEQ ID NO: 80196 - DNA, 1836 bp, Pseudomonas aeruginosa; identical to SEQ ID NO: 80188

SEQ ID NO: 80197 - DNA, 1734 bp, Pseudomonas aeruginosa; identical to SEQ ID NO: 80189

SEQ ID NO: 80198 - DNA, 2337 bp, Pseudomonas aeruginosa; identical to SEQ ID NO: 73776

SEQ ID NO: 80199 - DNA, 1878 bp, Pseudomonas aeruginosa; identical to SEQ ID NO: 73777

SEQ ID NO: 80200 - DNA, 2337 bp, Pseudomonas aeruginosa; identical to SEQ ID NO: 73776

SEQ ID NO: 80201 - DNA, 1878 bp, Pseudomonas aeruginosa
atgacaagccggatcggcagtcctgacacacaagccgatctagatgttcgagcgtgtctcgatcggatgccgccacgctcgtttgtcatggtcgccggtgcggggtcggggaaaacgacctcgctgatcaaggctatcgcgcacctagccgagacccgcggtcctgccctgcgccgcgccgggcaacaaatcgcctgcatcacatataccgaagtcgccgtcggtgagatttcggccgatgtcggggcctcgccgctattccacatctcgaccatccacagtttcctgtggtcagtcatccggccgttccattcggatatcgcggcttgggtagccacccgcatcgacgagaagatcgcggagcgacgcgcacactacgacaagcctcggactcaggcaaaaacgaaggcccgcctcgaacaggagatcgcagatctcgaagccgatctggctgcgatcagtgaagtagagaagttcgtctacggcaccggcagcagctacgctgaaggcatccttggccatgacgatatcctcaagctcaccccagcctgcgtcgcagcgcatccgctgctgagacaactcgtcgctaagcgctttccctacatcttcgtcgatgagagccaagacaccaatccggaggtcgtcgaggcgttacggcacattgcgggcgaacatcctggcctgtgtgtcgggttcttcggagacccgatgcagaagatctatatgagcggagcaggcactgtcccgctgaacgacggctgggcggagatcacaaagcccgagaacttccggtgcccgacatcggtgctcggggtcatcaatgcaatccgcgcccctggcgacggtcttgagcaggtgcgtggtcggacgataaccgttgatggcatcgagcagccggttgccggtacctccaatctgttcatcctgccggcggacgcggagcggagtgcgcgcctcgcggccattaggcagtggctggccgccgaaaccggcgacggcctgtggctaagcgacgtgcgggaaggcgatgtccgcctgcttgtactggtgcaccgcatggcggccaaccggctcgggttccctaatctgtatgctgcgctcaatgaccgagcccccatgagtctgagtgaagggctgagcgatggcacagcctggccgctccgtccacttgtccagcacatacttccgctcgttgtcgcggcgcaagcgggtgatcggttcacagtgatatcgaccttgcgcagcgaatgcccgaggcttgaaccagcgcggcttcgagggcaagcgacggcccccgttcttacagcgctacagcaagcgctcgacgggcttgtcggtctgttggcagcaggatcgcaggcgactatccgggacgtcttgacgcatgtgcgagataacgagttgctgcgcctcgatgatcgcttcgccatgcatctggttgcagagcctgtggatgacggcagcagcggcttcgagaacgttcaagcctatctggcatgcggtgtcgacgaactctgggcctaccggcgctactttacagaggagtcaccgttcgcgacgcatcatggggtgaagggtgcccaatttgagcgcgtattggtcgtcatcgacgatgaggaagcgggcttccggcagtattcttacgggaagtatctcgggtacgtccccctctcggacaaggacgaagccaacctggcggcaggtgaagagtccgtactcgatcgaacccgccgcctcttctatgtgtgctgctcgcgtgcaacgaaggacctggcagtcgtggcctttgtgcccgatgtcgcagcggctcgcaccgcgatcgtggcgcagaatctattccccgaggccgtaatccgaggtgcggagcatctgggctga

SEQ ID NO: 80202 - DNA, 1836 bp, Pseudomonas aeruginosa; identical to SEQ ID NO: 80188

SEQ ID NO: 80203 - DNA, 1734 bp, Pseudomonas aeruginosa; identical to SEQ ID NO: 80121

SEQ ID NO: 80204 - DNA, 2337 bp, Pseudomonas aeruginosa; identical to SEQ ID NO: 73776

SEQ ID NO: 80205 - DNA, 1878 bp, Pseudomonas aeruginosa; identical to SEQ ID NO: 73777

SEQ ID NO: 80206 - DNA, 2337 bp, Pseudomonas aeruginosa; identical to SEQ ID NO: 73776

SEQ ID NO: 80207 - DNA, 1878 bp, Pseudomonas aeruginosa; identical to SEQ ID NO: 73777

SEQ ID NO: 80208 - DNA, 2337 bp, Pseudomonas aeruginosa; identical to SEQ ID NO: 73776

SEQ ID NO: 80209 - DNA, 1878 bp, Pseudomonas aeruginosa; identical to SEQ ID NO: 73777

SEQ ID NO: 80210 - DNA, 1992 bp, Vibrio fluvialis
gtgaaaataaaaaacgtacgaattaaaaactatcgtctgctcaaagatgtgtcattttcgattgatgaaaaaacaaccattattgttgggcgtaacaatactgggaaaacttcatttgctgaggcttttcgcagttttctgaatcatgccggtcccaaggtgcgttatgaggatttcaatcaatcttgtctgacaggtttcgaagatgcactgaatgctcttcaaggcggtgctgaagatgatgttgtgaggccgatgcttccaacaatcgagctagagttactcattaattatcaagataatgcagatgaatatggcgtccttggcgattttattatcgattttgatgaccaattatttgaaacaattatcctgatttcttatcaattaaaagatggcaagatcagcgatttttttagtgggctcgatagcgccaacagaaagcaatatttctcggatcttagagcgaggatagagcattactacgaggctaccgtttacgcggtcgagccgacaaaccagagcaatagcgctaggcttgagtttgcgtcatttaaaaaattactgctgtcagggcttataaatgcgcaacgcggtttagatgacgaaacgcacaatgaacgtgatgtgcttggtaaatcgttaggtaatattttcaaaagtgcgagcagcgttggagcgcctgaagcttttaaggcgcaatcagctgagatcaatacagtcgtcgaagaattgcaggaaatcgttgatactgattttcaacagagagttcaagcgttattgcctaccttgaatatttttggatatccgggcttgaatgatcccaatttaagcgctgcaaccgaactcaatgtgaaatcactgctggaaagtcatacccgagtttactatcaacgagatgaccattttacattgcctgaaacctataacgggctgggaatgcggaatctaatatttatcctcttccgaatttatgaatatttccgtgagtttcaaagccatcaaacgccaccgaaaggacatgtaattttcatagaagaacccgaagctcatcttcatccgcaaatgcaggaagtatttattcgacaacttgaacaaatcgtcgaacagttccagcgcgagctgaatggtcaacaggtgtggcctgtacaatttatcgtgagtactcattcctcgcatattgccaacgaagctgattttagcaaggttcgttattttctatccaaaaatggaaatgagaccaaagttaaggatctgggcgttgctttccaaagtgccgaagcagcgggcgacaaagagtttttgcataaatacctgacgctcacaaaatgcgacctgtattttgcagaccgagcgatcctcgttgaaggggcgactgaaaggatattgttgcctcaaatgattaaaaaagttgacgcagctttagggactaacttaagacagaaatacctgtcagtcgtcgaaattggtggcgcttatgcacaccacttctacaaattcatagattttcttgagcttaaaaccctctttattactgacttagacgcagttgactcaaaacaacatcatgccgctgtaatggtgagccagggggatagatcgagtaacgtaggaatttcgaaatggtttggcgaggaggggtattctgacttagccactattagagctaaagattcagattctaaaattctcggatgtcggcgacttgcttttcaggtagatgaagatgttagtggtttatgtggccgcagctttgaagatgcatttatcttggttaatagccagttattccagctaaataacttaactggttccgcacttgagaacgctgtttatgacaaggcaaaagatatcggcaaaaagagcaaagctgattttgctattgaatattgtataagtaatacggattggctcgtccccaagtatatccaagaagggtgcgcatggttagacgaagacccaacagttgctgttgaaggagtgcaatcatga

SEQ ID NO: 80211 - DNA, 1752 bp, Vibrio fluvialis
atgactgcattgaaccccgcagcacaggcgtcggtagagacacttgaaagcttgagaggttgtattgaccaaggacaatgtttcagactggaagctggggctggagcaggtaaaacatattcgttaattgagtcgctcaagtatctaatttctttacgagcgaatgagttggccatctcaggaaaacaggttgcatgcatcacttacacaaacgtggcgaaagatgagatcaaggcaagaaccgataataatccagtcatttttgcggatacgattcatgcgttcatttggagtattttgcaaaactaccaggagcagttgagacaacttattcctacgctgggagaaaagtggcaagagagaattgcagaatcggcgggaattagtcatcaaactgttaagtacgatataggttatgcgtcgattaaagagcatgaaatttctctgcatcatgacgatgtagtcgcgttaatggctcgcatgttggcctttcccaaattccagaaattactgaaaagtaaattcccaattatctttatcgatgaatatcaagacactgatagcgcacttgccgaaagtatcgtgcaaaacctgattgataatgattcgggagttgtggttggcctttttggtgatcactggcaaaaaatttacggctcgtcagcctgtgggttgatccagagccctgcaggaaaaatcatcgagattggcaaacgagccaatttccgttctgataaaaacatcgttgaatgcctgaatcgcatgcgcccggaattacctcaagccgaatccgacccaagctctgttggaggtataaaggtctaccattcaaatgattggcaaggtgcacgtcaaactggtgcacattggaaagatgatctttctgaggaagaaactagacgatttatccagcaaaccaaatcattaatggttgaacatggttgggatatgtcgttatctaaaaccaaaatattgtttctgacgaataacttgatagctaccgaacagaaatttaagactttggctgattgtttcaaatattcagaagactatctgaaaaaaaatgacaaatacattgagttctttgttgatactgtcgagttaacggcgctagctttccaacaacgtaagtatggtgaattgcttcagattaaaaagaaaaaccgctcctacttaacgtcgcaagctgacaaaactgcttggattgagaatttagaaaagttaatgcgacttagagacacatctacaatcggtgatgttttagacctgttgataattactagtatgccgagagtaccggcaaaagtcgcagattctgaagtccgctatcagacactatctgcccgtgaccaaaattcattggagccagatgaattgagtttcgtcgacaaaattaggcgtcttcgcgctgtgtcttactctgaagtcataaatttggccgagtacataaatgataaaaccccgttttcaaccaagcatggagtaaaaggtgcccagtttgataatgtactagtagtctgcggtcgtggctggaatcactacaactgggatcaaatgcttgaatggatagatgacggtgtcccaaaaggaagatacgagacttttgaacgaaatagaaacttgttttatgtcagctgttctcgggcgaaacataacctcacgctcctctttacgcagcacctctctgataaatcacttactgcccttggtaaaatctttgggaacgaaaatatcaaaggcagcccattttag

SEQ ID NO: 80212 - DNA, 1731 bp, Vibrio mimicus
ctgtttgtcgaagcggtacttgccttccctgaactggaagagcaagacgcttctcctcttgatgccgttccggagttctttaatcagatggcggcttccggtgagggagagccccttaaggcccggatacgactacaagcaacatggacggatgacggtacgccggagggagcaattgaggaggatatacgctggataagagccctggatgataattttgaatgggatgactgttccagggttcaggctgtagagcgctcttcaatccagtttatttacttaccggcaaatcgtgatgcgacgactcaagtgaccgcccttctaaaagggcggttatggcaggctgccaaatggtcgatggcatttagggatgcaagctatgttaatgccggtcagatccagagcagtttcgaggaagaggagccgtcgaagtttctgctggagcgtctttcgaagcgttggcaacaggtccatgaagccgatacagacagtaaaccgcgtttaaggctcatcgagaaccgttttgaggagcttgttcgtaaagccgaatttacttttacgcctgatgaagaaggtcaggagcgtcgtttgtccgagctgagtgacggtcagcgctctctgttccatatcgctcttacagcggcaacgctcgaaaccgagcgggaagcattttctttgcctgctgatgacagctcatttgaacaggataagttacgccgtattcacctgacgattcttgccatcgaagaaccagaaaacagcctgtcaccgttctttttatctcgcatcatcaagcaggcgagagagattggcgcactgccttccgcgcaggttctgctatctagccattccccatctatcctgagccggatagagccggaggaagtgagatattttcgtatggaccggagcgctcggtgctcatcgatccgagaactgaccctgcctgaagatgatgttgaggcaagcgtttatgtcaggctggctgtaaaggcataccccgaactttattttgcgcgatttgtaatcctgggtgagggagactcagagcgagtcgttattccgaaaattgcggaagagatgggtgtttcccttgatccatcattcgttcccgtcgttccgctcggtggacggttcgtagcgcatttctggcggctgctgaatgatcttgagattccacatgccacattgctcgatcttgatctggggcgccgacatggtggggcgaatgccatgagaagctgccttcagaatttggccgctatcgggagtaattttgggagcaccaatggtgctaatgctgctcagcttaccgaccaacagctttataatgaaggcctgcaaggtcaatggcttcaagcattcaggagggaaggtgttttcttttcctatcccattgatctcgattttgccatgttgctcgcctttccaaccgcttatcaggttgccaatccaggtggcaatggaccccagagtagtgctgctgctattcaagccaaaaaggtcagtacgctgaaaacaggtggtaatcctgccttgtataccacgcattatgatgacgctttcaaatggtatccgtatctgttcctgagccgcagtaagcccgaaactcaccttgcggctttttcccgtatcgcgggcggcggtgttactgcgtccgctcctgtagagctcagggcgctcattgagtacgttacggataagcttaatctgtcaggagagaatgaatga

SEQ ID NO: 80213 - DNA, 1866 bp, Vibrio mimicus
atgacccgcgtaagcagagacgactgggtacctcagggtgtcggtggtctggaagggagagcgtgggaggctttacgtgaaaccgatagcagcatccttgtgaccgctggtgccggtgccggaaaaactgagtttctggcacagaaggcgacctatcttctgcagacaggtatttgtccggcacccaaacgtattctggccatcagctttaaaaaagatgccgcccaaaacctcgccgaaagggttgcaaagcgttgcccgagagatcaggcgcggcgctttgattcgatgacttttgatgcctttaccaaggggcttctggaccggtttcgtccggctttacctgagccgttcaatgcgcccggtacgtatcagattgttaatccgtttcgtagggattatgacgattttattgagcgatatggctatcacggagtgagtgctcaacagcttgagagaagactgcttctgacagacctgccaattgacttgtcaaatggatctgaagtacatcgtgcgttagcagattactggcatgaacaattcttcgggggcgacgagatatccctgtccttcccgatgataaacaggcttgtaaaactgctgcttcaggaaaattcatatatccgccgggccttacaggcaacatatcccatcgtctttcttgatgaataccaggacaccacctatgcccagtatgacatgctgctaacggcattcgatggtagcgatgctgtctttacggcagtcggcgatgataagcagcgtatcatgggatgggcgggagccatgaatgacgcctttgaccagtttgaaaacgactttgctgccagacgcataacactgctttctaactggcggtcacatgtggatctggttcgtattcagcacgagattgcccgccggatagacgataatgtggaagaagtgcaggcacaagggacccgtgaaatcgaaggtgaggtttctgctatctggcaattccggagcgcagatgacgagaacaattatctggctgaatgggtgagccgtgaggttcagtcagagcgtgttgcaccacatgatgtagcgattctgatcagaatgcgggcagatcaggttgagggtgaaatagccccctcttttgcggcacgaggtctcaggatcagaaatgcggcccggtcagtcggtgaaattcagatacaggatctgcttggtgaagagctgaccggtatatttgttcctttactccgcctgggagcgacggagcgaagcccggaaaactgggagcagacccagcagaactatctgtttttggaggctgccgatccggataacgatctcacgcaggaacgattgctggttaagcttgaagcattcgtccgtaaattaaggacagagctagcgcatcgccagcctagtccggattcggcggaagagattgcagagatgcttcttgaatttgtcgggacccctaggcttcggcaatcctttcccgcttaccagcgtgcaagagattttgagagggtgtggagtggatttgtcactctcctgaaagagtgtgcagaacacagcagcagctggacggaggcgctggatgagttcgaaggtattggccaggtagctctgatgaccgtccataaaagcaaaggtcttgagttccatacgatgatattttatgggctcgacaatcagacttggtggagccttacgccgcaacggggtgaagagctaaacactttttttgttgcctttaccagagcaaagcagcgtgcgtttttctcccagtgcgttgagcgagggcatgctattggctggatacagcaattattggccccggctggagtcgaaaccatagatggtacgactatattgggtactacgtga

SEQ ID NO: 80214 - DNA, 1941 bp, Paramesorhizobium deserti
atgaagctagtgcggttgcgtataagcaacttcagatcgtttgaagcggattcaacagaattagaacttgacgatttgactttcctgctcgggccaaacggtgctggcaagactgcggttctacaagcattggccagactgttcagtctggatccggcgcaacgcaaggtcaggaaatccgattttcacgttccgcatgacgagaagcccgataagttgcctgccgaacgagagctttggatcgaggctgattttgagttccccgaactgttaggtaaaggcgaaaaggaagctcctgcggttcctggaaatttcgcccacatgcagctaatggggattgaggggccggcgcaggtccgattccggctgcatgccaagatcgaccaggatgatgacatcgaagagaccttcaccttcgtcatgaaggtggacggcgacgggaagcccctggagcagagccgggtcgcaaagcacgatcgcaatgccattcaggtgcattacctgcccgcccgtcgtgaccctgcggatcatatttcctactcggccaatgcgctgttgggtcgtgcgttgcgttctgcggattgggcaggggagcgcgacaagatatccgatctaactgaggagatcagcgcgaccctcgccgggaacagcgcgatcgagggaatgacagacacgctgtcgacccagtggggcaagctgcacaagggcgactatttcgtggacccggcgatttcattcgaccggagcgaggttgaaaaccttctgcgccacatgagcgtaggcttcacaccaggccacggcgagcaattggtcgacttctcccggctgagcgacgggcagcagtcgctcctctatttgtcgattgtgctgggcatgcaccagatcggggtcgaggtactcagtggcaaactgggggatgcttttgatatcgacaagctgcgacccgcagttttcacactgatcgcagtagaggagccggagaacagcctttcgccgcactatctgggccgcgtcgtccgaacactcgaacaattcgctggtgggcaggacgctcaggcggtgctcgccacgcactctccttcattgatgcggcgggttcagccggaatccgtccgatatatgcggcttgatgaaaaacgcaccacggttgtcagatgcatccagttgcctgaggacgaggaggcgcacaaattcgttcgcgaggcggtgcaagcctttcctgaactctatttctcgcgcttcgtggttctgggcgaaggtgacagcgaggaggttgtcctgccgaggctactggctgccggagggatactcgccgacgatgcatcgatatcggtcgtgcccttgggcggacgacacgttaaccacttttggcgacttctacatggcctaggaataccccatgtcacgctgctggacttggatctcgcacggtaccaaggcgggtgggggagaatcaaatacgcggcgaagcaattgcgggcatatcgcgacgtggagaagattggattcgacggcgcgcaggttaaatcaatccccgactggaatagcgagcagggactgatgttggccgacgatggctggttcgaactccttgaagagcacagtgtgttcttctcttcgccgcttgatctcgattttcttatgatgactgcctatcccggcgcgtatggcgtggaggacgacgagcttgaggctccggacgagggtgcgctcaaggccgtgctcggcaagaaacgcgatactgtcaaaggtcaatacaaggatgaccaactcaaattctttgacgcttacaacacgcgatttaagctcggcagcaagcctgcgtggcatattcaggcgatggcaaacctgacggacaaagatctagcagacgacttgccggacgttctcaagcgcctgctggagcgcatccgcgaagatctgaaggcgttgcccgaatga

SEQ ID NO: 80215 - DNA, 1662 bp, Paramesorhizobium deserti
atgatgcgcgttgaccgatggacgccgtcggataatctcaagctcgagccgaatgcccttgtcgcggcaaccgaaattgatcgaaacttggcactgaccgcaggtccgggagctggcaagacagaaacgcttgcgcagcgggcggacttcctccttcgcacgggcagctgtcgatatcccaagcgaattctagcgatctcgtttaaggtggacgcgagccagaacctcaaggcaagagttcggaagcggtgcggtcacgagctagcagcgcggttcgacagccatacgtttcacgccttcgccaagcggatcattgaccgcttccggctggcactgacgggaaaggatgctctcgatccagactatagtatcgggccagcgcgggtccaaaggcagtcgatcacgttccaagacatggttccgctggcggtaacaatcatcgagtccagtgatattgcgaggaacgccatccgacagacctatagccatgtctttctcgatgagttccaggattgcaacaaagagcagtacgcactgatcacagcctgcttcctagactctggcgctaagttagttgcagtcggcgacaccaagcagaggatcatgggctgggccggagcgctggagggtatctttgagacctatgcagcagatttcgaagcagaaccgctgaacctctatcagaactttcggtcagccccccggcttcgtcgtatgcaaaatgcgatggtgcgcgtcatggatcctcccgctgcgctcgacgatgcggagctgccgggcgaagatggcgagatcgaaattcttcacttcaaggatgccaccgcggaagcctcgtatcttgctgacgcgatcagcggctggatagagaaggatgccatcgagccctccgaaatcgcagtgctcgtcagcaagcagcagaacctctattgccaagaactgcgtgttgctctgcgagagctaaaggtcccattccgtgaggaagaccaggcgcaggatttcgcctccgagccggccgtgaggctgctaactgactttctcctcgtggtcagcggtggcgcgcaaccggaggcgtttcggcggttgctggaagccgtcatttacagcgaaagtctcgatgatgagcaggaataccgtgctcgttctcggtgggaccgctatgttggcgacgttcgccagcaaatagcgacagggcagatcaatcctggcgactacgatgcgctgacaaaactcgcccaggagctcatcgacatgatcggtcgagatgctgttgtggctttttcaccggactatgcgcaaggcaacaggctagatcagttgatcgagggcacggtagcccgaatttccgatttgcttgacgatggaagtgacctctccgcggcgctgactgccttttcggcagatcgcgccgtcaggatcatgtcgatccacaagagcaagggcctggaattccacaccgtgatagtgatgggcatcgagaaggagaccttctggggaaagatcgaagaggaacgcgccgcatatttcgtcgggatttcgcgcgccaagcaaaggctcgtgctcactgcgtgcgatcgtcgcgacaagccagaaggggcgtcacggtggacttcagaacggacggatcagacggagtttctcggctatgcggaagcttacgcctag

SEQ ID NO: 80216 - DNA, 510 bp, Citrobacter amalonaticus
atgcctggaactaaaacgggtctatttacaaattcccctagaggcaaagcgtgtccagttcacagaggtacatattccagcaatgcttgcctgaaggcatggttttccggagaggctcctttcacacttgctggcctacttgccaaaaaagactccgacaaaatactcaaaggcaatcgtatagcctatcaatgtgcagaagttgagaatggcccctgcggacggacattcgaagatgcattcatccttaccaatccaaaactatttgggttggtcgggaaagacgctaattccctagaaatcgaagcccgcagtaaggctgaaggtagcaaaaaatctgaatttgcattgaagtactctatttcaaataccgattggacctcaccaaaatacattgttgacggagttcgctggctggcaagcgagggtatgacctcaccagatccggcattagcattggctaaggaggtttctgcctgcgttgtagaaggagaagcctctaatgtttaa

SEQ ID NO: 80217 - DNA, 1734 bp, Citrobacter amalonaticus
atgtttaaggcacaatcaccagcagaaatcgcaagtcaacgagcacttgaagctatgtatgcctgccttaatacaggaaagagctttcgtttggaagcgggcgcaggcgcaggaaaaacgtactccctgatcaaagcactccaatttctgattgcgcataataacgatgcatttcagaagcaaagtcagcaaattgcttgcatcacttacactaacgttgcaaaggacgagattgccgcacggatagatcgtagcccactagtattctgtgaaaccaatcatgcattttgttggtcgctcatcagttgctttcagaaactactcagaacacaaatcgaggctatgccagcctggaaagaaaaaattgaagagattggagggacattaggccaacgtgtcattgagtacaacctcggccatcgctctattcgcgaccataacgtatctattcaccatgatgatgtcctgccacttacgatctccctcatggcacatgaaaagttccgtcgtatcattgcgaatcgctttccaattattctggttgatgaatatcaggacaccaacaatgaatggatcgaagcgataaaaacccatttgctgggcaagccaggggcaccgctgtttggctttttcggtgatcattggcaaaaaatctatggaggcggatgcggaaagcttgagcatccctgtttaaccgaaattggtaaagaagccaactttaggtcagtcaaagtaatcgttgattctctcaatcggatgcgaccagcgctacagcagttcgtgaaagatcctgatgctgaaggcgaagtacgtatctttcatactaacagttggcaaggagaacggcgaaaaggtgggcattggggtggggatttacctgcatctgttggcctgaccactttagagcatgtcaagactatgcttgctcgtgaaggttgggatttatcaccctgccgcacaaaaatactcatgctaacgcataagcttttagcaaatcagcaaggctattcaaatttagcggcaatatttaaatacaacgaatcgtttacgaagaaggagaaccaacatattgctttctttgtagataagctggaaccagcatgcgatgctttcgctgcccataaatacggaatgatgtttgaagcacttgggggcttctcacctctgttgcgtagccatgcagacaaagcaagctggcacaatgccatgacgcaattgcttgctatacgtgataccgggactgtcggtgatataatcgagcacttacgtaccaggaagaaaccgaggctcccagataatgtcgaaaaacgtgagcgagaattacgtgattttgacaaaacagcaggtgttgaaatgccacgagttttggaggaattagagaaactccaccagattgcttattctgaagtaaaggcacttcgccattatcttgatggccactcaccattcgaaacgaaacacggcgtcaagggggcagagtttgaaaatgttctagtcgttgtagggcgaggctggaaccaatacaactttgctgaaatgttggagctcgccggtacacaagtgatttctgcggcaaaagaagacgcatatgagcgtaatcgcaatttattctatgtcgcctgctctaggcctaaaaaacgacttgctatcctatttactcagagtctgtcgccagatgcgttggctacacttgagagttggttcggaaaagagactattatgccagtcccgtag

SEQ ID NO: 80218 - DNA, 1752 bp, Enterobacter aerogenes; identical to SEQ ID NO: 73074

SEQ ID NO: 80219 - DNA, 1776 bp, Enterobacter aerogenes; identical to SEQ ID NO: 73075

SEQ ID NO: 80220 - DNA, 1992 bp, Vibrio parahaemolyticus; identical to SEQ ID NO: 72330

SEQ ID NO: 80221 - DNA, 1752 bp, Vibrio parahaemolyticus; identical to SEQ ID NO: 72331

SEQ ID NO: 80222 - DNA, 2130 bp, Streptococcus mitis
atgagaattgataaaattactattgagggatatagacgctttaataagagtacaataaatttaaatcatggaaattttgctattttagcaggagctaacaatagtggaaaaacttcgcttattcagctgttagacattgttttcaataataaatcaagaaagtcagtgggttttaatgatttttctatctcattaaagtctttgttggataaaaaagttaaggaattagatctttcctcagattttaatgatgagaagttcattgaatttataaattatattaatgaacatataaaaataaaacttcaaattgtattgtcctatgatgtggaggaatccataggtctatttgcaaactacctaatggatctagaagatgatatgcggaacttttattttgaatacaattataaactcaatacagaggtaataaaagaagaatttattaaacaagatatcaaatcagctacaatacttcaagaaatcatagaacaaaatacagaaagtatttatttttatgctgataaagatttcaataataagaaaattattgaatataaagattttaaaaaattattccattttgaatatatatctgctgatagagaactagatgatgaaaatcttaaaaataaaaagataactacatcaattatttcatcatccgattccactaatcgtgattctgtatgggatagtaaatttgatgaattaaaaaataaaatagctaatgatttggctgaatcagaaattgattgtagttttcaaaaagaaacacaaaaaattttatctgacttaaaaggtagtctagataatgtatcaaaaaatgaaattgaagctttagaagcgaaatttcattttaacgaaaagaatttattgaacttgattaaggatagtttattaataaattattcacatagtactgatgaatttttgtttagtttaactgaagaatcccaaggtctgggtattagtaatttaatttatatgagtcttcaaattgatagatttagtagaactattcaaccaactactgttaatttatttgttatagaagaacctgaagcacatatgcatatacagatgcagaaagtgctagttagttatattgaaacgatttttagtagcaaaaaaaatctacaggggattattacaactcattccactgaaattgtgaaaaatgtagatgttaatgatataaaggtaattcgttcagaaaataactttatgaatcgtattgttgatttacatcaatttattaacgataatggagaaaaagaattttatgaaacattctttaagttgaatttcgcagatttaattttttcagatgctgttattttttatgaaggagatgcagagcgaatgtattttgaaagtttgattaataggaaggattcaaagtacagtaatttagcccgacaatatttaagttattgtcaatgtggtggtgcttatgcacataaatattttccactattaaatgaattggaaattatggcctgtgtttttactgatattgattatgataaagaaagagaggagttagatggaatatgcagagataaatcttctaatacgactttaaattcaatattatctgctgacaataaagatgttgctgatatttatcaacagcagagtcaagatagagaaaagaatatagaaatttttacccaaacatatagagatggatatgctagaacattagaagatgctttattatataaaattatttctccaacaggggaaatgaaaagtgtgtttgaaaaatttaacaaatcggagtgggacaaatttaatgaatcttttgaattgacactacctaatattacttctggcaaagagtgtagtatgaaaagagaggaaatatataatagattagatatatcaaaagaaaataggaaaattgattatctgagagataaccatcctgaagagtatgctgagtatgagaaattcaaagaaacatgtgaaccaaaacgttcaataagagatatagtttcaattattgataaaacaaattttatgtactcaattatttttaaagataaagtaaatgaagtgttacctaattatattgaggagggattatcgtggctcaacaacaaaataacttctacaaaataa

SEQ ID NO: 80223 - DNA, 1977 bp, Streptococcus mitis
gtggctcaacaacaaaataacttctacaaaataaatgctcctgctggaagtggcaagacttactttattagtaagactattaacgatattcttaataatgaaccatttgttaaaattttgtgtattacctatactaatagagcctcccaagtaatgcaggaaagaattgtttctccaaacgttgaaatatcaactattcatagtttcttaaataagtttttaaagccattctttagaaatgagaaagttatagactattatcttgaaatttataaagaagaaattgagactacactcaaagaagaaacaaaattaaatagatataaagaaagatttcaagtagagggtgaagtttctgaggagacaataaaatcaaatttatatgaaatttattataatgaacgacaatactcatccgtgttaaatggtggtttatctcatgatgatttattgaacttttcatttaaattaatagatagatttcctaaaattgggtttaagttacgtgagatgtatgattatattttcattgatgaggttcaagatacaaatgcagatattttgagatttttttataattcggctaaagatagttcaacaaatgtttattttcttggagacaagatgcaagaaatttataataaatatgatggttcgtttgaaactgaatttagagaatttgatggtaatctctcaaaaacctttaccaccaattaccgatcctctgaagaaatagttgatttattaaataatttataccaatcttcttctagagtaaaacaagtcgcttacaaaggcaaaaaaggtcaattccctcaattagtcttcacagataacattgaaaaatatttatttgataatagagaggcttacgaagagttttataaattaagaacaattaataaaaaaaggtttcaaaacatcaataatagtgggaagtctgctgaagaaatctataaaatatatcagaaaatataccctaataatggtcgtgttagtgtaatggatgttctggttaacagtaactatgatgaaaatcctgatgtgctaatgtcttttttaagtttgctatttcaggtattgagtgaatatcataataaaaattatggtgaaatgatacgactcttaaaaaatagcaaaaataacttatcttttggtaaatctgttccagtttttgacagcaacattttgaaaattgaatttcatcaggataaggtaaagatgaaagaaaaaatggatctctttgttaagctattggaatctaaggatcttttaggaattgtaatccaagaattggtagctaataaagttattagtgatgacttttataaatttatatttttatatgacaaaaacggagattttctttatactgatttattttgctcttcaattgaattatttaaattgatagatgaatataatagaacccccatggtgtcaacacaacatggggttaaaggagaagggcataaaaagatactatttgtagcagaaaattcaagtaccccaggtattaagatatatgaatttctaaatctattttcaagtttttatactcaaaatattgtatttaatttcgatatttttcaacagttttattatgattttaataatgatattttatcactagaagaaaaattaggaaaaaaaataagaaaaattgatgtaggtgatagagaacgatactttagtgattttcaagagatttttaataagtatctagataatgattattttaaatttatttgtttaaaagaaaataaacttaactttcaaaagaaaacagcaataaagaagatacaagaaaatatttttaataataatttagttagatcagtcttaacagcttacaaacttttttatgttggatgttctcgagcagaggaagaattagttgtattgattgatgcaaatcaaattgacaatatggaggaatttaaaaattgtttcaaccaaattggttttcagatatag

SEQ ID NO: 80224 - DNA, 2109 bp, Clostridium propionicum DSM 1682
atgtatatacaagagttaaaccttacaaattttagaggatttaaaaaaagtacaaagatacaattcactaaggacataaatgttattgtaggtgctaataactcggggaaaaccactattattaaagcattagaattattgttttcagagggctcttctaagagattatctattgatgactttaatcataatacaagtattgaagaattaaagacaagcccacccaaaattgtcattagtgcaaaattagttgaatcggaaaatgaagaagaatattcggaagacttgattacggttgctacttggctaacaaaaattaaaaaaccatatgaagcaacaataacatatgaattttcacttccagataaagaggaagatgactataaatcaataataggaaaattaacaaataaagatattgaagattattggagagaaatagaaactacttttttgagaaaatatacatcaaaaattttcatcggaaatcataaacataggacatcagttgattcggacagtataaaaaagtttgattatcaatatttagatgccattcgtgatgtggaacgagatttatttactggaaggaatacgttattaagagaagttattgatttttatatggattatgatattaaaattgatgaaaaattaagcaaaaaggataaacaagaacaaatacgcctaaagaagaaagatttctcaaaaaaagcagatgtattaattgcagatttacatactaggatgagtggcggcaaaaaagaaatgctgaaatacgccgagaaaacaggtgctgattttgataatataacaccttcttttgatgggaaaattttagatacagaactgtattcagctttgagattggtagtggaaaataaaacaggagtaaaacttcctgcaacacgtaatgggttgggatataataatctgatatatatatcattattactcgcaaagatgcaaaagaatgcttcaggagaatatatgggtaataatgctaaagtttttcctgttttagcaatagaagaaccagaagcacatttgcatcctaatatgcaatataagcttttgaagtttttaaatgagaatagtatgcatgaagtgagacaaatttttattacgactcattcccctagcataacagcagcggtggatttggattccattatagttttatataaatctgaggatgaaacaaaaattgcatatccaggcaaagttttttctcaaagtgaagaagaccaagcatcaaaaaaatatgtagaaaggtttttggacgtcacaaaagccgacatgttctttgcaaaaagcattgtttttgttgagggtattgcagaacaattattactacctgaatttgcaaaatatagcaatttagatttaactgattcacatgtttcggttataaatgttaatggaagatatttcaatcattttttaaaattatttgatacaaataagagtcaatatgcaattcctaaaaaaatagtctgtcttacggataaggatccagtgatgaaaaaaattaaggataaaacaacagaagaagatgatgaaaatagtagttggaaatcttgctttccctttttactcgaaagtgacaaattgaattatgaatataaaaaaacatccaatcctttaactgaattgtatcagcaaagagagaaaacggatttaattagagtttatacgcaaaaagagggctctacatttgagtatgaaatgatacttgagaacattaaatgtgatcaattacttaccgaatcagtagcaaataaagaagaaattaagaatatgatggaaaaatatcatgatgatatcaacaaatcacagacagaagatttagtgaaaaatatgcgtaatggtaaatttaaagatataataaataattttttacaaataacgaaacttgaaccatcaagaattgcaaaacatattattgcagcaagatatttaaattcaatcaaaaaaggtgaagtagcacaagagctttcatatattatttctagtaatattaaaaatagtagtgacactaaagaaaaagtttttgactttgtagtcccaacatatataagtgaggcgataaaatggatttgtcagtag

SEQ ID NO: 80225 - DNA, 1716 bp, Clostridium propionicum DSM 1682
atggatttgtcagtagcaaaaaaattaaaagatagcgacgaaagaattaatatttcgaatcattttaaaattgttgctgggcctggtgctggtaagactagatttcttattaatcatatcaatcatattattgaaaaatctgataagatttctgacataagaaaaatagcttgcatcacatatactaatgttggtgtagaaacaataatttccagattaggtaaatctatagattatgtagatgtaactacaattcatagctttttatatctaaatattgttaatccctatttatgggttcttgaggatgattataaatttgattttattaatattgatggtcatgatgacatagtgccaacatttagcataatgaatgaatggaagcggagaacaaggcaatatgcgctaaatgataataataaattagctaaagaattatctaaattacattggtatttagacgatggagaactaatattgcgctttaaagaaatttgggaaggaaaagttggatcttacaatattaaaaaggattcctacttagaatacaaaaaaatttgttgggaaaaaggtttgttatcccatgatgatgtgttatttttaagcattaagataattgaaaaatcccctcgtattttagagattattcgaggtaaatttccatatgttttagtggatgaatttcaagatactaatcctattcaaacaaaagtattaaagcttattgctgaaaaagaaactattgttggagttattggtgatgagtgtcaatcaatttataagtttcaaggtgcagatgtgacacaatttactgaatttgacttgccagaacttaaaacatattatattgaagataatcatcgtagcacacaagaaataataggcattttaaattatatgcgaaatgataaaaattttcatcaagaatcgccagaaaacaaacatggacacaaacctacaattttaatagggggctttattgattcgtataatgaggcaattaaattatgtaataaagatgaattgtatacactatcctttaagaatgaattatgcaacatgatacagtatggtattgataattatttttctgagaatatatttgatgaatttattttttctgatggagatcgtgggaagatgatattttatataattcattcattagaatgctgcaaacaagataaatttaaagatgcaattaaatacatgaaaaaagcttatcggaaaataaaagattttgacgacaaggctacattagaaaatttaaaaagattatataatctttattcaagaatacagcaaattaatattaaggaactttataataattatatatttggattttatggtgttaaagcaaaagtaacaagtggaaaagctaataattattataaaaacttgacctataataaagtagcttgtgtgataacaatagccgatgatgatggtaaatttagaaccatccataaggctaaaggtgatgaatttaaaaacgttttactgctattggaacctaaagaacaatataacgaagaaactgaattatcttttttacttaaccctgatatgggtaatgaaagccatagagtttattatgtagctttaagtagaactatggaaaatctgtatatttctattccgcagttgtcggatgaaaacagacgtaaactaaataactttgagattagggaggtaagaacaaaaagctaa

SEQ ID NO: 80226 - DNA, 1914 bp, Clostridium propionicum DSM 1682
atgtatttgtcttcattacaaataaaaaattttcggtgttttaatgatgatgggcacatcattaattttaatccaggtttaactgttttggtaggagaaaatgactcaggtaaatcggctataatggacgctatcagaattgtacttggaacaacagatttcggctggattcgtatagaaacaaatgacttttttaatgaggacatctctcgagaaattagtattagttgtaaattcactagtttgaccccagatgagcaagcctacttcttggaatgcttgacatatgaaaagaaaggagcagtaaatacgccttgtttgtatttacactggaaatgtaaatatttattatcatttaaaccacccaggccagtttcttcattttctacaggtaaggatggtaatggccctgccccatcctcggaagctcgtgagctgctacgtattacatatttaagagccctgcgtgatgcttatagtgatatgcaagccggaaggcattcacgtttatctcagattgtccaaaacataccgggtttaaatcaaggaaaaagtgagtttcaagacggaatggatatacatgaattgtcattggtaggtattacaaacttatcaaacaatttgttggcagctcatccctctcttaagtcaataaatgatgatatgacagaaatattaggtaagcaaatgctcctaaaaaaagatatcatcaaaacaagatttgaggtggcaggttccaatagcaatgatcttcaaaagacattggctcttttagaaaaacttgacttggcggtcgataaaaatgcaagtgctatgcaaggtaaagttggattgggcacgagtaatattatgagtatggcatgtgaactacttttacataaagaagctgaaacggaaaagaaatcatcgttcctacttattgaggagccggaagctcatgtgcatgcccagcggcaactaaagttaattcagtctcttgaaaatgaagcagaaagcaagcaacaacagataattattacaacacattcaccattgttagcttctgtggtaaaaatagataatattgtaatggtaaaagaagggcaagtgcttccattggcaaaaggtcatacaatgttggatgatgatgattacaggtatttggaaaagtatttggatgctacaaaagccaacttgttttttgcacgaagtgtaattattgtagaagggcctggagaagctctgttacttcctaccatagccaaattattaggatgtagctttacggatttcggaacttcattagttgatgttagaagtacaggtctgcgtcgctatgcaagaatattccaacgttccaatattgatgatacttggggcattaaagttgcctgtgttactgatagagatgttatgccgaactgtgctcctggtatttgtattgacgaaaagtatacgctagatccgtcaacatggccgaaaaaggaagaccgtaattggagagcagaagcggattttacgttggaagaagcgacctctcatcttaagaatataaagcaaaaagcagatggacaacaggttgtaacatacatcgcagatcactggactttggagtatgacttggcttttgcaggcttaagtcatagtaaaatgcaagaggctttaattagggcattagttaaagtaagctacgctaagcaaaattgggataaaaaaacagatgatattaagacagcaatcaaagcattacctacgttagaggatagatcctcttatttctataaatattttgcgaagaagaccgcatctaaagcggattttgcacaacagtttgcatttgaacttgaagatgctttcacaggaaatgtaagtgagttaaaatctatgttgccaagttatctagtggatgcaatagaatacgttgcaggggaataa

SEQ ID NO: 80227 - DNA, 1929 bp, Clostridium propionicum DSM 1682
atgggaattgaaaggttggagcaaatcaaaattactgatgacgatattacttgggttgagtccattatgggatttcgctttaataatgatagagtcaacataattaaaaacttagaatcaatagatgtccaggcgtttccgggaagcggaaaaacgaccacactcattgcaaaattagcaattttagcaagaaaatggccatacaataattcaggtatatgtgttctgtcacatacaaatgttgcgcgtgaagaaattgaagagcgattaggaaatacagatattggaagaaagcttttggcgtacccgcactttattgggacgcttcattccttttttgatacatttgttgcattgccttggattcgatcaaaaggcttttgcatgaatatgattgactcagatgttgtaagaaaatctcgctggtatatgctccctcgtggcacaagagtgtatttagagaagaactatagagacgcacaaatttgtagctacaatgggaatataggacgtatagactgggacaaacagggtgaaacacgtcagaaaattttagaagcaatacagaagtctcaaagtgatggaaactttacatttgatgagatgttgctatatgcaaagcaagcgtttgatgaatgtgattctctacctgttggactgcagcagcgatttccaataatttttattgacgaagcacaagatactaattcatttcaatgggagctaattcataaggcatttccggaagcaagcggcatgacgattcgacagggatttggtgatagcaaccaagcaatttataattatgttaatgagatcgttgaacgacctgcgttcccacgtccatcaccactgttgttgagtgagagtaaaagatttgataatagaatagcacatttagcaaatactgtagctatttctgcggaacaaatgaaaggtacagaaaatgatttttctggaaaacaaagtagccatacactttatttattttcaaaagataaggttggacaagtcattgaggagtttgcacaacttttgttagatactttttctgatgaagaattgttgaaaaataagaaacgtggatgccatgttattggaatggttcatgtgaagaaagacgaaactacagaaaaacaatttcccaaaggcatatatgactattggccgaattatgaagctagaagaacaagcaaaagtataaatcctaatagccttatagaatattttagaatgggacgctttgaatttgaaaaaaacaatgaattatgcgcacaaatagaatggattgcaaaaggtatccggagactcatcaacaaggcaaaaggtcaaaatttaatagccgcaaccaataatccttttttatcaattatcaaacaatttcctgaagaaaaacagttggagatacgaaaggatttttatgtattgtcttctgctgatatttcgaaagaggaagagtggcaaagcgtagttagcattttgaaagatattttaaaaggacttgatttgacaataaatgaaaaagtcaaggaatttatagcatggacaaatgaaaactatttcagttgtaatgcccaagaagcaataccacaagtgatgccaaatcattatgtttttgaggataaaataagtgaacgttgcgttgatttggagttcggcagtattcattcagtaaaaggaagaacacatttggctactttggtattagaaacctattcaaaagctcacaacatgaaagctatacttaaatatctatgcaataagccacccaaatctgtagggtcgaatcatagtcgcttaaagtgccagtatgtagctatgacgcgtgcgaaagctttattatgtcttgcaatgccaatagagtttgttgatgataaggcacaaaaatcattgcaagatacaggttggacgataaaagttgtagactaa

SEQ ID NO: 80228 - DNA, 1785 bp, Enterobacter cloacae
atgtatctgtctaatttaaggatagccaacttccgaaatttcgaaacggtagatattcccctagatggtaacattgttttgctgggtgaaaacagagtaggtaagagcaacctgctgttcgctatccgccttgtgattgatccaacattacctgattcagccagacagctaaaactatcagatttctgggatggttgcgatttatccacttcccctcaaattgaaatacatcttgagttcgctgatttcgacagcgacgcttcactctcagcgctgctaaccgattttcgcatagcagaaaacccagccttggcgagactcagctacgtctttcgaaagaaggaagatattgcaggagaacccaagtcaagtgaggattgtgaatttatcgtgtttggcggtggtcaggaacaacgcaccatccccagtcgcgttcgtcgccggatagccatcgatatgctagatgccttacgagacgctgaagcgcaactcgcatcatggcgtaactctccgttacgtcctttacttgaagatgcgttcggttcgctaagtcgagcagatctggacagggttgccagcgctcttgaatcagcaacgggtacaatggaggcattcactcctattaagaatcttgaggaatctctgcgtggtggcatccttaatcttgccggtactgctcacgatcttaatgcgcgtcttcgttttgcaccaactgatccgctcagattgatgcgctcaatatcaatgttcatcgatgacggaaaaagaggaatcactgaagcaagcctcggctctgctaatgtggcattaatttctcttaaactggctgagtttgcctggcgccgcgccaagaacgaacgaaatttctcacttctttgtattgaagaacctgaagcacacctgcaccctcaacttcaacgggctgtttttgataagctctttaataatgccgataaggcgcagtcactgattgtaacgagccattccccaactctggcaagcattgctccgcttcgttcagttgtacgcctctgtagagatgatagtgggcgcactcacgctttttccctggctgaacttcctgtaacaactgatgaactcgatgatattgagcggtacctcactgcaaccagagcggaattactttttgccaaaggagttatatttgtggaaggtgatgctgaagaggttttaattccaggatttgctgaagccatgggactcaaccttgacgagcttggtatcactgtatgtagtgttgcaggagtgaattttgaaccttacgttaagcttgcaggcagtttaggtattcgcatggctgttataactgattgggacccacttgatggaagcaaacaacctttgggaaaagcacgagccattagtatctgggatgcattctgtgctgtccgtccagaaagctacaagcttagtgctgaatggaaggcttggtttgtggataaaggttttgaggagtgtagcgacgtatggaaaaaagtcggtatatttcttagtccacaaacatttgaagtttctgtagcaaataccccgatcctgaaagacgcgctacttaatattctcgatgcacagggttttggatcacttagatcctcaagaattgcctcttggcgagccgggcaggatcctgaccctgggcaactccttgcaatgatatctgatattggaaaaggtcggatggcggcaaaactcaagaaaaaagccatcggtttagcaccaccggaatacattgcagcagcaattcagtatgtggtgtccaatgtctga

SEQ ID NO: 80229 - DNA, 1782 bp, Enterobacter cloacae
atgtctgatcggcacgcactgtcaatggcgttaagtgagctctcatcgaataaagagcagtatggcgctgccaccgagcaaggacactgcgttgtcattgccggacccggtagtggtaagacaaaaacgctcacgaccgccatggcgcgagccctgatggatgatattactgaccctcgaggcgttgcttgcattaccttcaataatgagtgtgcagctgaacttgaagaacgtctggcttgctttagcgttgcctgcagcgaacgaaactttattggtactgtgcacagctttgcattaaaccaaattttaataccctattcgcgctgtatacctggtttgctacctaatgactttcgagtggcgacacgagacgagtgccgtgccgcagttgaggctgcttatctagcaaaatttggcgcaatcggggaccctcatacccggtggaaatttgcagaagaaaagcggcgtcgggacgttaaccgactgttaccatcgtggcggagtaacaatccggagcttgcagatttcatcgaattatatgaagcacatcttaggcgtttaggtcttattgactttgatgatatgccgctcatcgccttccgtatgatcagagagcatgactggatccgtaatggtattcggtctcgctatcccgtcttattcgtagacgaatatcaggatctgggacatgcccttcatgaactagtgttactgctgtgctttgatgccggaatacggctttttgcggtaggtgatgctgaccaatccatttatggattcaatggtgcaaatccacgattgttggatagcctcgtttcacgtgctgatgtgaaaacgttccgtcttcgcttcaactatcggtctggcgctaaaatcattagggcatcaatgggggcactgggagaagagcgtaattatcgtggaccagatggaacggcagaaggagaaataggatttcacggagtagaaggcgattatgaaaaacaggcacgttatatcgctcaggatttaatcccctccctgacagaacggggatttaaacctgagcgcatcggagtactttaccgggcagcttggctcggagataaagttgcggatgcgcttaaagccgagggcatcgcattcatgcgtactgacaccaatgcattaataaaacgcaattcacgccttgcccgcttcatcgaggcctgcagccagtgggtaacagggggatggaaagaagcgtcccctgcctttaatttgctgctgggtcaggcactttctttagtctatggccgccgtgcaagccgtactgaagaacaactgctcaccgtacaactcatcacatttttacgaagcggaattgatcaggctgaaactgctcatcaatggcttttgcgattcgacaaagaacttatttccggctggcagataatcacggagaatccccaggttgagtggaatgttgttaaagagctactgaaacgaaccgatcctgcattaaagcaagatatggctctgatcgtatttgccggaaaggaagaaagtaccagacgaattacactgagcactctacatagtgcaaaaggccgagaatttgatgtcgccattatgtttggcgttaacaagtatgattttccgggtaaacgcgaccttgtttcagacaatgcattacgcgaggcacggcggttgttttatgtcggcgttacacgaccacgcaaagagttgcacatggtttatagaaaaggtgaacattccccttggattgcggaactctatcatcgcagccagcagacttag

SEQ ID NO: 80230 - DNA, 1926 bp, Alteromonas macleodii; identical to SEQ ID NO: 72966

SEQ ID NO: 80231 - DNA, 1677 bp, Alteromonas macleodii; identical to SEQ ID NO: 72967

SEQ ID NO: 80232 - DNA, 1698 bp, Alteromonas macleodii
atgtatatcaaaaaggtaacgattaacaactaccgtagctttcgctctttcgaagccaagcttaatcagctaacacttgtcattggtgaaaacgatactggcaagacaaactttttcactgcactttcgttagcgttgagtgggaatcaaatagacttcaaacataaacgtttgagtgtttctgacataaataaagacgccgtaattgattttctgacgtctattatcaatgaagacactgaagagaatctgcttaataaaattcctaaagtatcagtcactgtagatttcgctgaccctaaagacgcttatgaaacagctctattagccaaatggattatggctcatggtgataaagaaacttacaaaatcagatacgactttaagcctaaacaagacaaagactttcttgaggtcgtgaagaaatcattcgctggtaaagggttagacgagattaactggtttactctacctgtggagctttacgactaccaaatcgtatctgtgaacaacgaaaagcctatcgcatacagtgacttaagacacgttagtgttcatagcatcaatgcagagcgagatgacttctctgaaagtagttcaatgaagtccaatagcattttcacaaagctgcttatgaatacactaagcgacgacgacaaaggtcagatcaactcagcctactctgaattttttaatgctattgaaaacactgacacattcgacaaagttattggaacgaatgaagattttgagaactacgacagtattatcaaacagcttgagtgcactcccaacttgcctaacttgaaaaacatcttatcgaacatcactttgaaatatggtgatgaatttctgtaccaaaaaggcttgggacaacgaaatcttatctacatacttgtcctctttgcttactataagtcatgtggtgaaacattcaacttgtgctgtatagaggaaccagaagcgcacttaagcgttaacaaccttcgtttaataagagactttatcgagaaaagcgcaaacaacagtggttcactcgtacaaacgattatttctactcataacccatcgattatcaacaaactaaagatctcgaatgttctggcgtttactggcgcgaaagcagtcagtttgtccgatactccaacaaagctagttgattatctaaggaagagacctaatttcgacatattaaagctgctgttcgctaataaagtcattctagttgaggggccgactgaagaaatgcttatcaacacttatttgtctaaacaaacaactctcaacgacattgatgttattccgattggtcaacgtggttacgccactttcttagatatatggctcaccttgaacaaagataataagaaaaagaagattggtgttatccgtgactatgacaattcagatgcagcgaaagccagacacgatgaatatgacacagcacacgataatgtaactgtgagaacaacgacaaattacacacttgaaattgatttggtagaagcagaagacaacctagccttgctaaatggtttattcaaaatgaatggcaaccttgaagaagtgtctgaacacatgattaacggtaaaacagcaagaatgctggatgtctgtgatgctatgattgatgagcataatcctctggatattaaactgccatctcatattgcagagattgttgagactctatcatga

SEQ ID NO: 80233 - DNA, 1374 bp, Alteromonas macleodii
atgatcgaagtccaaattgctggagccggtgcgggaaaaacttatggtttagctgtatcgttgatagagcatatcaaagcttgcgctagtcacaaaaagacattcgccctgacatacacaaactcagcaacagcgaagatagagcaagagataatcaaacgacatggttttattccgtcgaatctttgtatacagactgtccatagctttttgttgaacgaaatcatctacccgttttcgtcattcaccctcggtgatgtctacaacgacacatcaataatgattttgccacctcctaagtataaaaatagcctttttgcacgacttagaaaaacaaatgttattcatacagataatgtatacaacattgctaaacagattgttgataaaaccgtaagcaagcacaacaacaaagctaagaaagcaagagtacagagactacttgctattctcgaaagttgctttgacaagatattcatcgacgaagtccaagatttagatgacgatgctctccgattttttgagataataggcagtaacgatattgacgtatacatgattggagatccaaaacaagcaatcaagtacccccttgcacttgaaacttttattacaaaaatagctccgaaagagtacgcaaatatcttaccaatcaacaatcaaaccagacgactacccaaagagatcttagctgtatcaaacagcttctgttatgaagaccaacagcaagaatctctatcagaagtagttggtgaactcatgtatatagaatcggtggacgaacgatatgacgatctactaacgaattacatagatacaaaacaacttgtttgtatcgacaaaaagaatggtcgttatacaacttcgtctaaacacaaacacgcattcccacgagagattgaggaaatgattcgtgagtctaaccataagaaagacaaaactttaattgttaaagccgctttttctgactttatggacgctgtagtcaatggaggtaataaacgagccatacaagaactcattgttcggtattcattgacccttaataagcagcacttcgcccaattacatgagctgtgcaactcctgcgcaaaagatgacgttcaatttaaagttcaaagtattgactcaattaagggattggatgccgatacatgtttaatcatactcagctctaacaccctgaaatacctaacccaaaatggtattggcaaagcaaatcgttttaataaagaatggaaacgggtttacgtagctctaactcgtgccagaaagaggctcgtcttagcattggatcatgaattactcgcgaaagaggacatagtggcagttagggattcgataggtgaattagggtttatctatcacgattaa

SEQ ID NO: 80234 - DNA, 1926 bp, Alteromonas mediterranea; identical to SEQ ID NO: 72966

SEQ ID NO: 80235 - DNA, 1677 bp, Alteromonas mediterranea; identical to SEQ ID NO: 72967

SEQ ID NO: 80236 - DNA, 1926 bp, Alteromonas mediterranea; identical to SEQ ID NO: 72966

SEQ ID NO: 80237 - DNA, 1677 bp, Alteromonas mediterranea; identical to SEQ ID NO: 72967

SEQ ID NO: 80238 - DNA, 1818 bp, Sphingobium sp. TKS
atgtatctttcgcgaataaggattcagaatttccgtaacttccaggatctcgatgtcgctttgggtggtaacgtcgtcatcgtcggggagaaccgggtcgggaagagcaatctgctttttggtctgcgactgatctttgacccttcactaccagatagcagcaggcagctcggtctttccgatttctgggatggcctagccgcagtcgatgccaacacgacaatcaccatttccgtagagatcaaggatttcgaggatgaccccgacgtccttgccgtactcactgatttccgtctcgacgacgatcccgacacaatccgcctgacttatctgcttcgcgcccagcccggtttggggcacccgccagtgagcgacgatgacttctctttcgtctgcttcggcggggaaagcgaggctaagcggttcgggcacgacttgcgccgtcgcatcaccatggacctgttgccggcgctgcgcgatgccgaaggtgatcttgctacatggcgccgctcgccgctccgaccgctggtcgaagacgccttcgtctcgatcgacatggcggagctcaaggagatcggcgataagatcgctgaggctagcaaggctgcaatcgaattcgatgaggtaaaagcgctcgagaccaagattggggaattatttgtcgcgatggccggccccaagcagaacgtgcagccttcactcggattttccgctactgacgcaacccgcatcaatcgtcagattcggctgctgatcgatgaaggccggcgcggtgtcgctgatgccagtttggggtccgccaatctcattttccttaccctgaaactgctcgacctccagcggctgatcgagaacaataagcgcgatcattcgctgctcgccatagaggaacccgaagcgcacctccatccgcacctccagcgcttggtctataagcatctgttcgagacgatcgtcgatggcgatgcggaccaggatgaagacggcgacggtgctgggcccttgtcagtgatcctcactacgcattcaccgcatatcgccagcgtcgcgccgctggaatcgctgctccttctgcgcagtcaagatggcgagggcacaaaaggctattccacggcatctgccgatttcagcgaaagcgagaccgatgatctgtcccgctatcttgatgtcactcgtgctgagatggtgttcgcccgcggcgtccttttggtagagggcgatgccgaacgctttctcattccagcctttgccagtgacatgaacatctccctcgacgagtatggcgtgtcggtctgttcggtcgcgggaactaatttccagccttatgtaaagctgctgtgcgcgctcggcctcccctttgccgtcatcaccgactgcgactgggtcgacgagaagccgcgcgcctataatcgggcgctcaaacttatcgacaccattgatcgagcccgaggcggcgccgacacaaatgctttgattaagggcatcaaagacttggagacgtgggaagattctttcgtggaatgcaaggcattcggcattttcgtgaactcgggtacgcttgagactgagctcttcgaaggaaactatgccaaggagatgatcgaaacgctgcgcgagcataacttcggccagaagcgcatggccctgctcgacgcttgggaggccgatcccaaatcctataattccgacgagatgctcaagatgatcgagcagttgggcaagggacgctatgctcagcgcctcgccacacgcgtaccgggcaagctcgtccccgattacatcgccgatgcaatcaaccatgtaattgaccttgtctga

SEQ ID NO: 80239 - DNA, 1785 bp, Sphingobium sp. TKS
ttgtctgaccgagcgctctatctgcgggcagcagaagatctgcggccaaacgacaaacagtggcaggcgtacacgtccgccgagcactgcgtgctgctcgccggccccggcagcggcaagaccaagacgttgaccgtcaaactcgcgcggatgctgagcgaggatgtcgaagatccgcgcggcatcgcctgtattacctacaacaacgaatgcgcgcgtgagttggaaacgcggctcgatgcgctcgggatcgcaccgggcggccgtgtcttcatcggcaccgtacatagtttctcgctgacccaaatcctgttgccctattcgaaggtggcgggactgggtcttcccgatgatttttcagtagcgagccgccgacagacgcgcgccgcgcttgagatcgcgcatgctaaggtcattaagggagcggagaatccacaaacctgggaatttcggctcggagggcaccgacgccgtttcctcaatcgcgatgtcgaggcgtggaaaacgctcgacccgcaattgaccagactcgttgaggcctacgaagctgaactgcgaaaaatgggtgtcatcgacttcgacgacatgccgttgctggcactgcgtgcgcttgccgagcacgcttggctgcgcagggcgctggccgcaaaatatccgatccttgctgtcgatgagtaccaagatcttgggcgcgcattgcacgcgatggtgatggggctttgcttcagcgctggcatccgtctgttcgcggtcggggacgtcgatcagtcgatctatgggttcaccggcgccaatcccgagctgttgcgcaagctatcggagagaaaagatgtcgaaaccgttcggctcggcctcaactatcgctgcgggtcgcagatcgtcaccgcctcagaatacgctttgggcgagaaacgcggatataaagtacctgacggtgctcacgaaggcacgatctatttccatccttgcactggcggatatgctgggcaggcgcgctatctcatcgagcagttaatccctgaaatccgtgcgcgccgacccaacctcaatctcggcgagatcgccgtgctgtacccggctgccttcatcggcaatgaagtagcctcagtagcggcagataatggctatgcggtcatccgcaccgacggcaacgcgctctacccacgcggcagtcgccttatgcgctggctggagcagtgcgcgatgtggtgttgtggcggctggcgatcgggtcagcccaggatcagccgggtgattgccgagggcgcgcgactcttccatgaggttcttggcagcgatgatgatcggctcgaattgcagcgttcgttgatcgccgcgctttggtgccgccgcgacgacacgattggtttgcgcgactggctcattgccctacgcgacgagattattcggccgaatgtggggcaagcgcgatccttggctgatgagctggagactttgaacaccttcataggtcggctgggccccatgggcgatgttgatgattttccgctcggcgagttcgcgggcattggctctgggctcgaccgtatcaatctatcgacgttgcatagcgccaaaggacgcgagttcgatgccgttatcctgttcgggatggaagaagggcgcctgccaagaaacaacgccagcgaaacggaagtccgggaagcacgacggctattctatgtcggcttcacccgagcacggcacgaaatccacctgatgtatgcgcaagcaaatccctcacgcttcgtaagcgaggtcaagaaccgactcgaagaagcttga

SEQ ID NO: 80240 - DNA, 2067 bp, Sphingobium sp. TKS; identical to SEQ ID NO: 72652

SEQ ID NO: 80241 - DNA, 1773 bp, Sphingobium sp. TKS; identical to SEQ ID NO: 72765

SEQ ID NO: 80242 - DNA, 2091 bp, Chryseobacterium kwangjuense
atgtatatttcaaaaatatcgattgagggattcagaaatttccctcaaaatgaaattttatttaatgatggtgtaaacgtaataataggccataataattctggaaagacgagtttaataaaagcgataagccttgttatcaacagtgagaccccaagacgtcttgaacttgacgatttctctaaaagtactaccttagaaaatctacagcgcctgcctccgtcagttagtatttcattgacatttaaaaagagtaccgatgaaccgccaaatagtgaggatcttgtcactgtttccaattggctgacagttctaagtgccgactatgaagcaaaattaacctataaatttttccttccaattgaaaaacatgacgaatatatagattcactgcaagaatgtgataccaaagataaagcttggcaagttatcaaacaggattatctcaggttttatacttataaaatctatggtggagacccttctctattacagacagctgattcagaatctcttcagaaatttgattttcagtttttgaatgccattagggatgttgaaagggatatgttcaccggaagaaatacgatgcttaaggaaattcttgatttcttcttggattacgacataaaatccgctgatgaagccgttaaaacaagtgaagtaaaactcgccgaaatcaaagctgcaaaacaggcattttcagtgcaggccacagcattgataacggaactacagatcagaatgcgtgccgggaaagatcagatattaaattatgcacgacagaccggtgcaacctttaataatgcaacgcctgatttcgacggaggcatttctgaagttgaacttttttcggcattgaaactcatcattggatatactgggctggatattaaaattcccgcaactcataatggcctgggatataataatttgatttacatgtcgcttctattggccaaaatgcaagtgaattcagatggtaaatatcttggcagcaatgcaaaggtctttccagtgcttgctatcgaagaaccagaagcacacctccacccttctatgcaatataaatttttgaaatttttaaaggaaaacaggttggaacgtaaagtgagacaaatttttgttaccacccattccacacagattacctctgcagtatcccttgatgatataatctgcttacataacggaggtaatacaatcacagccggatatcccggaaaatgctttgctgcagatgccgctggacaggaatccaaagcgtatgtacaacgatttctggatgccacaagatcagatatgttattcgctcaaaaagtaatattcgtagaaggtctggcagaacagatccttcttccaacacttacaaaatatatcggtacagatatcgaagaccatcatatcgccatcgttcctgtaggcggaagacatttcgataatttcctgcgtatttttgattcaacacagccatttacaatacccaagaaaatagtctgcttaaaagacagagatcctgaaagaaaattaaaggctgcacgttcatatacaaaatgttatacatttgaatcaggacaagataatgtcctttatgactacgtaaaccatattgaaggaaaagttgtcgcacatgccactcatccaaatatccgtttttttggacaaaatcataaaaatggaaaaacatttgaatatgagcttatgctttccaaccttcaaaatgatgtacttataacaaattctatttcaaatcgggatgaactttccgagctgatagccttgtacaatacgggtagtctaatgggagaccttctgaataggattcatcacagtcccgctgcaacaaacttccgtaatgctattgaagcattagccgaccctgcatggacagaacaggaaaaaaatcagtcaatactggcccaaagatatctttcttctgttggcaaaggtgaaaatgcactggaacttgcaacatttcttgaagaaaacattctgcttcctgacgttcctgcaaatccgggagatagtataaaaaaagctttcaatgtacctgattatattcaacaagcaattcactggatatgccaataa

SEQ ID NO: 80243 - DNA, 1752 bp, Chryseobacterium kwangjuense
ataacaacaattacctcagaaaccataatcgatactgaagagcattttagaatatttgcaggacccggtgcgggaaaaacacattggcttgtcaaccatatgcgtcacgtgctacacacttctaagaagctgggtacaacaaaaaagattgcgtgcatcacctatacaaatattgccgttgaaactatcgttaaaagattgcagtttggagcggacagaatcgaagtttctactatccatggttttctctacagtaatgtaatcaaacctttcatcggtaatatcgcagatgaatttggatttaacgtagttaaaatggatggacatgaggaacatagacctagtcgtagcaaaattgtacagtggctaaaccaaagtcctggggcacaaagactcagaaatccctatacaataaaccaattaacatccttgccttattatattccgggactcgttaactggcttgctacaattgactataaattgtatggcgatgatatcaatatttttgcggataatagacaagcctactattatccagctaacggtgatagaagaaactttggatcagcaacttgtttaaacatattaacaccagaactattcttatacaagaaattattctggggaaggggaattctccatcatgaagatattctgtttttttcttatatcctacttagaagatatccttttattgtagaggtacttaaaacaaaatatccttatttcttcgttgatgaatttcaagacaccagtcccattcagtccagaattttaaacatgatcggtgaaaacggaacaattactggcataattggtgatcaggctcaatcaatttatagtttccaaggagcagatccagcacatttcacagattatcaactccaaggtttgaaggattacagaattattgacaaccgtcgaagtacaaacgaaatcgttggagttctaaatcatgtaagaccagatatggaccagcggcctcttagagatgttcctggagacagatgtactcttctgatcggaaactacagactagcaagtgaatatacaagaaacatttgtggggaaaatcttacaattctatcatgggacaatcttaccgcacgagaactacgaacgcaaatgactgcagatagacctgaaacaaacctcattgaagaaatgtcctctttcgataattccgacagacgaaatgctctcatctcaagccttcgagcggttgaatttgcgagagaaaaacgatttaaggaggcaatgaaagagatgcagttcaattatcgccatgttgtcaacaaaaatgatcgtaaggctatggccctccagggtctttctagacttctgtcaaattttgaagaatttaaagatcgatcattttttgaattctatagtcatgtccgaacaaacatcagtactaattttcctgctgcaactagaggcaaagcaaaagaattttatgataactatacttatcaacagatctctgtctgtttgagaatagacgatgaaaaatcccccagtaaaacgatccataagtcaaaaggtgacgaatttgataatgtacttgttgttctcaaaaaagaggaacattgtgattttttgataaatcaaaccttacataaagaggaacatcgaatcttctatgtagcagttagccgagcacgagaaaggttatttatatcagttccaacattggaagaagacaaattgcggcaaattgaacatcttttcgaggtaaataatctataa

SEQ ID NO: 80244 - DNA, 2067 bp, Bacillus sp. JH7
atgtacatatctaggttgacactaaagaattttcgaacttttaaaaatgagactactgtccaatttcatgaaggaactaatgtgattgttgggcataataatgccggaaaaacaactattataaaggcactagaattgctttttgatgctaataaaagcaaacgactttctattgatgactttaataaaaatacaacttgtgaccaattaaaagaatctgctcctaaaataaccatttctgcgactttagtagaatcagaaaaagaagaaatctattcagatgatttagttacagtatcaacgtggttaaccaaattagaaaaaccatatgaagctaaattaacttatgaattcttcttaccagaaaaagaattagaagattattataaagatataaggaagatagaaggaacaaatattaatgattattggaatgaaataaaaaataattatttacggaaatatgttcataaaatctatgtgggcaatattgaaaataagactttaatagatacagatagtataaataagtttgcatttcaattcttaacagctattagagatgttgagcgtgatttatttactggaagtaatacgctcttgaaagaagtaatcgacttttttatagattatgaaataaaaacagatatttccattacggatgaagagaaaaaaattaaaattagggaaaagaaagaattattttctaaaggtgcccaatctctcattcagtctcttcaagatagaatgagagaaggaaaaaaacatatgcttcaatatgtagaaaacaccggagcagcctttgataagatgcaaccttcttttgaaggaggaattctagatacagaactgtattctgcactgaaacttattgttgaaaatgaaacaggaattaaactaccagcagttaataatgggctaggatataataatttgatttatatttcattgttattagccaaaatgcaaaaagatgcttcaggagaatatttaggaacgaatgcaaaagtatattcaattttagctatagaagaacccgaggcacatttacatccaaatatgcaatataaatttttgaaatttttaaaacaaaatcgagaaacagaagtaaggcaaatctttataacttcgcattctcccagtattacagcggctgttgatttagatgatattatcgttttgtataaaaatgaagaagagacaaaggttgcatatccagggaaggtatttaatgagagtctagatgatataaaatcgaaaaaatatgttaagagatttattgatgtcacaaaggcagatatcttttttgcaagaaatttaatatttgttgaaggattagcagagcagctagttattccagaatttgcaacagctttaggatatgatttaacggatactcatacatctgtaataaacattggagggcgttattttgaacattttttaaaattgttcgatacttctaaaaatcctaacgcaattgaaaagagaatagcatgtataactgatttagatcctgttagaaaagagaaaggtcgtaagggtgccaaatgggttacttgctcagtattggcattaaataacgatatagaaaaatatgattataattcatgttcaaatctttttgttaacaaatctaaaagtaactctagtaaccacataaaaacttttacccaaaaggaaaatgaaagctgtacatttgaatacgatcttatacttcataatataacttgcgagaaattgattacagattcaacttctaatcaagaagaaataagagatttaatgcttgcatataaagaagataaatcaattaacgatatgttagagtatataaaaaacaaagaatataaagcaaaaaaggagattgagctgcaaaatactccaattttagatgatgataagaaaaaacatattattgctgatagatatttaatgtcaatatccaaaggtgaattagcacaagagcttgcacatgaaatttcaataatggaaccatcagataacatgattgtttgtccaaattatataaaagaggcgataaaatggatttgtcaaccgcaataa

SEQ ID NO: 80245 - DNA, 1716 bp, Bacillus sp. JH7
atggatttgtcaaccgcaataaaacttaaaagtagtaatgataaaattcagatagacaatcattttaaactatgtgcaggtccaggtgccggaaagacgtcgtttttaataaatcatataaataatatactttctcattctacaaggttatcaaaatcaagaagagtagcatgtattacttatacaaatacaggggtagaaactattcttagtcgcttaaataatatgactaatgagattgaagttagcactattcatagctttctgtataaccatattgtaaaaccttatttatggttactagatgatattatatttcctttagataagttagatggtcatgatgatattaaacccggatacactttattaaagacatataaagaaaagagtaatcaaaattggattacagataatcaaaaactttcaaaagcattaaataaattaacttggtatattaatgaacaagatgtaatagaattaaagtttttaaaatcttatcatggaaaattatcggaaaaaacaagtgtaaaaagagattcttatatgttatataaaaagctttgttgggaacaaggattattgagtcatgatgatgttttatattttagttatcttcttataaaacgaaataaaaagattagagaaattataagagcaaaatttccttactttttaattgacgaattccaagatacaagtcctttacaagtagctataatcaaattgttagctaaaaaagaaatggtagttggggttattggagatccttgtcaatccattttctctttccagggggctaatgtaagtactttcagtcaattttatttagagaacatgagtttatatgtattagagaataatcatagaagtactgagcaaatcatatctgtattgaattatgtgagaaaagatgaacattttgttcagcatagtccggataacaaattaggaaacaatccaactatattagttggggatgctcttacatgttattatcaatttaaacagaactgtaatgatgaagaatggtgtgttttagcttatcggaatgaaacaactaatggtattgaattcggtatagaagatttactattagatgatattaatgatttattatataaagatggaaaacgagggaaaatgatttattttctaatacatggaattgaatatgggagacagttaaaattaaaagaggcactcaaatttataaaaaaagcgtataaagatgagaaggggtttatggaaaaagatgcgattaaggttttaaagaatctgctcaatgaatatgaagtttttaattctatgagcattaaggaattttataacacatatatttttaatcaatatggagtgaaaaaacaaattaagtctggtaatattagtgatttttatcaaaatctgaagtatataaacatggctgctctagtaaatgttgctgatgatgcaagtcttttcaaaaccattcataaatcaaaaggggatgaatttgataatatattattaatcattcctgaatctaaatatccgacgtttcttacttttttattatcaccagatatgaataaagaggagcatagagtatactatgtagctttaagtagggccaaaaagaatttatatgtgaatcttcccaagcttactgaagaggaaatgaaattaataaagaattttgataaaaaagtacttagtaaggaattagtatttaattaa

SEQ ID NO: 80246 - DNA, 1584 bp, Listeria monocytogenes; identical to SEQ ID NO: 73566

SEQ ID NO: 80247 - DNA, 2382 bp, Listeria monocytogenes; identical to SEQ ID NO: 75887

SEQ ID NO: 80248 - DNA, 1917 bp, Listeria monocytogenes; identical to SEQ ID NO: 73702

SEQ ID NO: 80249 - DNA, 1908 bp, Listeria monocytogenes; identical to SEQ ID NO: 73703

SEQ ID NO: 80250 - DNA, 1917 bp, Listeria monocytogenes; identical to SEQ ID NO: 73702

SEQ ID NO: 80251 - DNA, 1908 bp, Listeria monocytogenes; identical to SEQ ID NO: 73703

SEQ ID NO: 80252 - DNA, 1917 bp, Listeria monocytogenes; identical to SEQ ID NO: 73702

SEQ ID NO: 80253 - DNA, 1908 bp, Listeria monocytogenes; identical to SEQ ID NO: 73703

SEQ ID NO: 80254 - DNA, 2073 bp, Listeria monocytogenes; identical to SEQ ID NO: 72152

SEQ ID NO: 80255 - DNA, 1734 bp, Listeria monocytogenes; identical to SEQ ID NO: 72165

SEQ ID NO: 80256 - DNA, 2073 bp, Listeria monocytogenes; identical to SEQ ID NO: 72152

SEQ ID NO: 80257 - DNA, 1734 bp, Listeria monocytogenes; identical to SEQ ID NO: 72165

SEQ ID NO: 80258 - DNA, 1917 bp, Listeria monocytogenes; identical to SEQ ID NO: 73702

SEQ ID NO: 80259 - DNA, 1908 bp, Listeria monocytogenes; identical to SEQ ID NO: 73703

SEQ ID NO: 80260 - DNA, 1584 bp, Listeria monocytogenes; identical to SEQ ID NO: 73566

SEQ ID NO: 80261 - DNA, 2382 bp, Listeria monocytogenes; identical to SEQ ID NO: 75887

SEQ ID NO: 80262 - DNA, 2034 bp, Bacillus subtilis subsp. natto; identical to SEQ ID NO: 72372

SEQ ID NO: 80263 - DNA, 1884 bp, Bacillus subtilis subsp. natto
atggtgatctttctgaataactatgtaaaaaaagacaattggatcccaaaagactctgtaattttagaaagcgctgcggaagatgtaataaagtatgagaaaaatgcttacgtactagctggccccggagcaggcaaaaccgaattgttagcacagaaagcttgttatttgttagaaacaaacatcagcacatatcctgccagaatacttgctataagttttaagaaagatgcagcaaaaaatttaaaagaacgagttgaaaaacgatctggtaaagaatttgcaaataggtttgtctccttaacatatgactcatttgcaaaacaactaatggatagatttcatttagctatacctgacttttatagaccaactctagaatatgaaatagttaattttaatagaagagatgtaactaagcttagagaagaagcagaagaacctatcggaaaaataggttggaattactactttgattatgacctttttgcaaagacatacgcaaatgacaaactaccattaataacggaaaaaatagattcaatagaatcttggtataagtatcaactttggaaaagctatattaatgataaagaaagttcaatgttgacattccccatgatctcaagaattgtggaatacttatttagatcaaaccctaagattctaagagcaatcagagctacatatagtcatgtttttttggatgaatttcaagatacaaccttaattcaatatgacttagttagaacaattttcatggattcaaatgtttcagtgactgctgtaggtgatcttaaacaaaagattatgggttgggcgggtgcaatggagggtgtatttaatcaatttaaggaagactttaaggctaaagattttgagttggttttaaaccataggtctgcccctaatttagtccgaattcaaacatcaataataaatgatatgatggggggttcaacagtaatatcaccctctgacaaatggaagaatgaagaggtgggaatatgcgaagtatggaacttcaccaatgcttctgaagaagcaaaaacattggcattagaaattaaaacgtggattgatcaagaaaaacttcaacgaagagatataggtattttagttagacaacgggcagatatgtattgtgacatgcttataaatgaattaagtaatttaggaatacactcaaggatagaggatcaatggcaagacttactagcggaaaatttcatgaaatatgtaatcgacgtattttctttagccacaactgatcgtgaccctaatgcgtggtctagtttaatatcgaatgttttaaatttacgtggtgaaaatgaaacaaaatcttaccaaatagaaacagaaattaatagcttcattgttgaatttaaaaagactcttaaagatgagacattgaaagtgaccgaaaaagtagtagagcaatggttattcaaaattttaactctggtaggattagaattaattaaaggtagctatccagaatatagaaaaggagattatttagaaagaaaagtaaaacaaactgcagagtttcttttttattcatttgagaaacataaagtgtggaataaagcagtagacgattttctgggtattttttcaatcccaattatgtcaattcataaaagtaaaggtcttgagtttgaaactgtgattttattgggactagaagacggggccttttggaattttgagaactccccagatgacgaaacatttactttttttgttgcattgtctagagcaaaaactcgaatgatatttactttctgtaaaaaccgcttctatggacaagataaatctaagataaatgttatctatcaaatgctggagaatgcagacgttaaacaattcgaatggacgtaa

SEQ ID NO: 80264 - DNA, 1926 bp, Salmonella enterica; identical to SEQ ID NO: 72180
  subsp. enterica serovar Typhimurium str. DT104

SEQ ID NO: 80265 - DNA, 1662 bp, Salmonella enterica; identical to SEQ ID NO: 72181
  subsp. enterica serovar Typhimurium str. DT104

SEQ ID NO: 80266 - DNA, 1926 bp, Salmonella enterica; identical to SEQ ID NO: 72180
  subsp. enterica serovar Typhimurium str. DT104

SEQ ID NO: 80267 - DNA, 1662 bp, Salmonella enterica; identical to SEQ ID NO: 72181
  subsp. enterica serovar Typhimurium str. DT104

SEQ ID NO: 80268 - DNA, 1926 bp, Salmonella enterica; identical to SEQ ID NO: 72180
  subsp. enterica serovar Typhimurium str. DT104

SEQ ID NO: 80269 - DNA, 1662 bp, Salmonella enterica; identical to SEQ ID NO: 72181
  subsp. enterica serovar Typhimurium str. DT104

SEQ ID NO: 80270 - DNA, 1926 bp, Salmonella enterica; identical to SEQ ID NO: 72180
  subsp. enterica serovar Typhimurium str. DT104

SEQ ID NO: 80271 - DNA, 1662 bp, Salmonella enterica; identical to SEQ ID NO: 72181
  subsp. enterica serovar Typhimurium str. DT104

SEQ ID NO: 80272 - DNA, 1926 bp, Salmonella enterica; identical to SEQ ID NO: 72180
  subsp. enterica serovar Typhimurium str. DT104

SEQ ID NO: 80273 - DNA, 1662 bp, Salmonella enterica; identical to SEQ ID NO: 72181
  subsp. enterica serovar Typhimurium str. DT104

SEQ ID NO: 80274 - DNA, 1926 bp, Salmonella enterica; identical to SEQ ID NO: 72180
  subsp. enterica serovar Typhimurium str. DT104

SEQ ID NO: 80275 - DNA, 1662 bp, Salmonella enterica; identical to SEQ ID NO: 72181
  subsp. enterica serovar Typhimurium str. DT104

SEQ ID NO: 80276 - DNA, 1926 bp, Salmonella enterica; identical to SEQ ID NO: 72180
  subsp. enterica serovar Typhimurium str. DT104

SEQ ID NO: 80277 - DNA, 1662 bp, Salmonella enterica; identical to SEQ ID NO: 72181
  subsp. enterica serovar Typhimurium str. DT104

SEQ ID NO: 80278 - DNA, 1926 bp, Salmonella enterica; identical to SEQ ID NO: 72180
  subsp. enterica serovar Typhimurium str. DT104

SEQ ID NO: 80279 - DNA, 1662 bp, Salmonella enterica; identical to SEQ ID NO: 72181
  subsp. enterica serovar Typhimurium str. DT104

SEQ ID NO: 80280 - DNA, 1926 bp, Salmonella enterica; identical to SEQ ID NO: 72180
  subsp. enterica serovar Typhimurium str. DT104

SEQ ID NO: 80281 - DNA, 1662 bp, Salmonella enterica; identical to SEQ ID NO: 72181
  subsp. enterica serovar Typhimurium str. DT104

SEQ ID NO: 80282 - DNA, 2079 bp, Bacillus cereus
atgtatatttcaaatatcaatataactaattataaaaacttccgtaccaactctatagattttaataatggtataaacgttattttaggacataataatgctggtaaatcaaatttattacgagcattagcattaatttttaattctaatagtaaaaagcatttatcaattgatgattttaataaaaacataccaatagaagaattaaaagaatatccacctagtattaaaataactgctacattaaagcaagacgactgtgaagacttaatgagtgatgacttagtgactgtaagtaactggctaactaggttagaagaaccttatgaagctaaactgcaatatgaattttatctcccaactaagtttcatgaaaagtatcagagcgtaataaatgaagcggaaaatatatttgaagtatggcaagttattcaagatgaatttctgagactgtatacatataaaatttggggtggagaatctactaatcaaataactgctgatagtgaatcattacaaaaatttgattttcaatttttagatgcaataagagatgttgaacgagatatgttcagcgggaagaatacgctgttaaaaaatgttttagatttcttcatggactataacataaaatctgataaaactttagaaaaggaacaaaaagaagcggaaattaaaatcaaaaagaaaaaattcggagaatccgcaggagatttaatttcactattgaatgagcggatgacagaagggaaaaaacatattttatcatatgcacaagatataggtgcttcatatgataaatctactccaaatttcgatggaagtataacagatattgaactttattctgctttaaaattaatagttgaatataagacaggtattaagatgcctattattaataatggacttggatacaataatttaatatttatgtcgttattacttgcaaaaatgcaggttgatgcaagtgaagactatttaggtagtaatgctaaggtatatccaatgttagttattgaagaacctgaagcacacttacatcctacaatgcaaagacaattattaaattttcttaaaaaaaatttaaagaacaaaaaagtgagacaaattttcgttactacacattccactcatatagccggtgctgtgaatttggatgaattaatttgtatatataaaaatcaaagtgaaactttaattggttatccaggaaaaactttcggtgacaataaaaagagtaaaaaatacgttcaaagatttttagatgctactaaatccaatatgctattcgccgaaaaaattattttcgtagagggattggcagaacagttactcatgtatatattcgctgaatatttgaatgtttctctagaagataatcatatagcagtaataaatgcggatggaaaatattttgatcactttttacatttatttaatatttcaaatccaaatgctattagaagaaaaatagcttgtataacagatagagatccagagtggaaaaatttaaaccctagcgataagtctaaaaaaatatcatttaaaaagtgttatccatttgaaatgtatatagaggaaactgggtatgagtataaacgaaatgaagagaaaaatggttatcctgataatattagattctttatgcaggatgaaaactatggtaaaacattggagtacgacttggttcgttttaacccaaaatttaagggattggttacagagtctactaccaatagaacagagatttttaagttaatggatcaatatagtgagggtaaatcattagatacaatgcttgggagtttgaatacttcagaagaaaacgaacggattagaaaagcattagcagatgaaagattaaaatggaaagacgaagataagaaaaaagcattaattgcttcaagatatttaaattcagtgggaaaaggagaaaatgcattagaattagcttatgaactagaggaaaacttattgaaaaaaaatatagctggagaagaagaaagcactaaatttaaagagtttatcgtaccagattatatcaaagaagctatagaatggatgtgtgaagaatga

SEQ ID NO: 80283 - DNA, 1743 bp, Bacillus cereus
atgattcttatttcttctgaagatacaatagatattgagcaacatttcaaagttactgcggggcctggcgccggtaaaacgcactggctaattaatcatattaaaaacacattaaaaaattctaagagattagagaaaactcgaaaaatagcatgcataacatatacaaacatagctgtagaaactattttaaacagactaggaactcaatccgtcagtcaagtagaagtttcaactattcatagcttcttatatagtcatgttgttaaaccatatcttactcatatagcagaactatttgacatagaaattcaaaaaataaagggtcatgatacgatcgaacctaaacataataaagttcaattttggttagaaaatcattctatgaatgataagttaaggcacccatatacaataaatcaattgataaaattaccagaaaataaagaagcactattcgattggttatcgagtgttaaatatagttttaatagtgaactaaaattaaatttaagaggtaaggatagtaaggctaagcagttacgtaagatagtaaaaattttagaaacagatttatttagttataaaaaaatatattggaaggacggtaaaatcgatcatgatgatgtgctgtattttagttatgaattgattacacggtacccctttattttaagtgtgttacgtgctaagttcccttatttttttatagatgaatttcaagatactaatccgattcaagctaagatagtatccttattagcagaagaagaaactattgtaggggtaattggagatcctgcacaatcaatatattcatttcaaggtgctagtatagaagagtaccttaaattcaaaattgaaaatcaaagtgaatatactattacagaaaatagacgaagttcaaatcaaataatagatttattaaatgaaattagaacagatattgatcaaactacaattagaaatgtagaccatgatagacctatcttatttgtagggaatagcatggaggcatataatgaaattcaagaaaaatacggtaatggcatgttcattcaaaccttagctagagataatccaaccgcaaatgcaatgaaatttgcggtagacaatagtaagctaaatactaaactattagatgaattagctttaaaggataataccaagcgctttaatattataaaaaattcaatggaagctctagagtttgctaaacatagtgattataaaaatgctataaaaataatgagtgctaattttattcgttattctgaaaaagagcaattcaaaaaatccgtcttagtcttacaaaaattaatacaaagacaagggacacttttggaagagcctttaatggaattctatcaattaattagagaagacatagagatgcctggttttagaaaaggtgctagccaagatttttataatacatattcttataaagaggtagcactatgtataacctataaagaagatattagtcagcatcggactattcataaatctaaaggggatgagtttcaaaatgtcttattgatagtagatacgatagagtttcttactaacccaaacttagctgaagatgaagaacaacgaatttattatgtaggtataagtagagctatggatagactatttatagtgacgcccgaattatcaaaagtgaatcgagcaataatagagtctaaattcaattttcaaataatagatttagaaaaagaaccgcaattaatttaa

SEQ ID NO: 80284 - DNA, 2007 bp, Bacillus cereus
atgaacataccaaatgccccatatatatcgagagtacacatcgaaaatttcagaaactttcaatacgttgatgtaaacttaactcataaacaagttataatcggtgaaaataatgccggtaaaactaattttttaagagcaatccaactaattcttgacccaaagttatcagacgaagaccgattcttaaatgaatctgacttctttgaaggacttgaatcaccgatggaaaatgggaaagaaattaaaatatcgattgatattaaaggctttgaccacaataaagtattattagctacgctatctgatgctaccttaaaggatgagccagcaacattacgattaacctatcactactttgcgacaaaaagaactgatggtacgtatgaatatcaatatcgaatttttcaaggcacaagagaagacgttccatttaatcattatcatcgacgatatttaaaccttaaaatcattcctgctataagagatgttgaaactgaaatgaagaatacaagaaagtctcctattaatcagcttcttaaaaattacgatattagaaaagaagagctgaaagatattgccgacagattaaaggaaacaagtgatgaggtactctctatagacgaattagttcatctaactaacaacattaatagtagattttctacgataatcggacagcaagtggattcatctgtatcacttgaaaccattgatttagaccctaatcgtattttgaacacgttaaaaatcatggttgggcaaggacaaagacctataagcgatacaagcctaggacttaacaatattctttatatctcattaattttattatcgttggaagataaaacaatacccgccatattaaaagaagatacatactcaaaactattagaagaagaaaacagcgaaattttaaaacaatgttatgagaaaaacgataatggcaactacatattaaaagatgagctaactctcgaaaatcagaatagcctgtatacgtttatggataccaattttggtgataataaggggttcacaattttagccattgaagagccagagtctcacttacaccctgcacttcaaagacttatttataaagatgtaatgaaaaaaaatacatcggtgttaatgacaacacattctcctcatattacttccgtcgcaccgataaactcaattgttcatctacgctcaatgagtaatggaacaaatgtaagaactacagcttccttaggcttaagtgaaagagagtgtaaagatttagaaagatatgttgatgttaaaaaaggagaaatctatttcggaaaaggtgtcatcctcgttgagggagtggcggaggaatatttaatctcaagctttgcagaggctcttgatatgcctttagataaaaaaggaattatctgctgtaacattaactcaacgaactttaaaccctatgtgaaattccttgatgctctaggtattccttatgtagttattacagatggagactattactacttccgaaaaaatgaaaaaggaacattagaaagagtatttggttctatgtatgaagacacacataaatcattgggatatggatatgatggcttagatagaataaaaaagatattggttgaattaaaaaaggtcgatgaaaacagtatctctaacgatttccaaaagcaagatgaattattttctaaatatggcttcttcattggggtacatacattagaaatcgatatgatggacacatcctatgaaaataaagtttctaaaattttcactcaagttttcaatgacttgacatcagggggctcggcacaaaaaaagaactttaaagatgcattggatacagggaactatgtcaattgcctaaaaaaaatagaaagtaagcactcacgtattggaaaaggtcgtttttctcaagcactttctagtgaatgtactaaagataatatccctccttatatcgcaggagccattcaatcaatttattcaaaggtaaataaattatga

SEQ ID NO: 80285 - DNA, 1812 bp, Bacillus cereus
atgatagacctctattcattaaagctggagcaaattaaaaaggaccctgaccaatatgctgcatttaagtctaacatgagtacagtagttaaagcaggacctgggagtggtaaaaccactgtactctccctaaaaattatgcacttgttaaaagaaaaaattaaacctcccagaggacttgcctgtatcacatatagcaatgaagctgctaaagaatttacaagcagactaaaatcttttggatatcaaaaaagacaaaatgttgtactcgatactgttcattctttttgtatttctgaagtaattattccattcgctcatctttatgatactgatatttccttaccattaagtatcatttccaaaaacgaaaaagataagttatttacagcaatactaagcgaacgcgggattaggaagaaagatttaaaaattgaagctatggacaaggaaagaaatcaactaattggtgggcagagttcagttgagacggaatcaaacaattccgcaagggaagttgccactgaatatgaagaacggcttcacgccaggaaacaggttgattttatagagataattaaatgtgctacaaaactgattacggaacaagagtatgttagaaagtgtctagaagctaaattcccatggattcttgttgatgaatatcaagacttaggaaagccccttcatgaaatgatactaactttatttcacaagactaatattaaaatctttgcggttggcgaccctgaccaatccatctacggctttcaaggagctatccctgattatttattagagctatatgataatcggaatattatgtccattgaccttaaaacgaattatagaagtaatcaagatattatagatgccgctacaattgctttaaatatcgatgatagggagtataaggcaggaacaagactcgaagaaaaagctgagtttcactttatcacttgcgaaaatgaaatggatgcgcaatatgaacatgtggttagtaatataattcctgattgcttagctaagaatataccattagaagaaatatgcgttcttgtcagtaacgggagccaagtgaaggcattaagtaatgtcatgaatgacgcaaatattccccattatttagctaaacatgaatttctaaaaagtaaacttattgtttggattaaagactgtgcttcttgggttctagacaattcatctatatcgttcacagatatatcagacttttggataaatattttgtctaacaaaaacggagagttatctgaagaaaataaattatatgagaaaaaacaattcttatcactattaactcaaagtatagattatcaacataatctacacctttggttctcatatttatttaataaacttaatctagaacacattatagctgattctcaaatgtatgttactgagaatgaacatatagtttcgttccaataccaaataacagatggggaattaaaagattatgatttaattaaattctcacaagttggaaaaccagaaaatcaagtaaccatatcaacaagacatagttcaaagggacttgaatttgaggttgtcataatgttagggatggaagagggaattttccctttttattctacagtccatattccaaaagaactgaatgaacaacgtcgtatttttttcgtttgtattacacgagcaaaacgagtttgttacctgttaaggtctaagcgaattacaattaaacctggatggacgcctactaaaggaccatctatgttttggaaagaactttatgaagcacacaagtcaaaaactgtacttcactaa

SEQ ID NO: 80286 - DNA, 2091 bp, Bacillus cereus; identical to SEQ ID NO: 75748

SEQ ID NO: 80287 - DNA, 1896 bp, Bacillus cereus; identical to SEQ ID NO: 72175

SEQ ID NO: 80288 - DNA, 1779 bp, Bacillus cereus
atgtatattagcaaagtgaaaataagtaattttagaaattttaaagaaacagaagtagaattaggaaaacaaatggttattgttggggaaaataaagttggaaagtctaacttcatgcatgcgctaagactggttttagatccaactttatctgaatcaagccgtttattacagctttcagacttttgggatggtctaactcgaccattaaatgacgaagaaataagaatagatattgaactcactgagtttgaacaagatgataaattaaaatctgtcctttctgattttttagtgaaagcttcgccattaactgtaggcttaacgtatagattttttcctgtagatgaaaacggaaataaaatttataattttaaagtttatggaacagaaacagaaaatatttttagttatgaacaaaggaaatggttaccgcttgaggtgttatcggggttaagagataccgagagtgatttatcaaattggaggaaatctcctttaaggcctttaattgaaagagcaatcgaaacgacagataagcaagaactagagaacgttgctgaggaaattactcgttcaacagattctttgaaagaattagacgaaattggatcattaactgaaagaataaatactcaattagaaaatattgtaggagatagacattcgatagaaaccagcctaggtttttctcctgctgatgcttcaaaactttaccgtgcaataaagatgtttattgatgatggaaatagaggaattaatgaggccagcttaggatcttccaatttgctttatttagtgctgaagcttctctctctagagcaatatgtagatgaaaatgaaagagctcatacttttttagctattgaagaaccagaggcacatctacatcctcatttacaaagattactttacaaatatttgttgaatcacgataagataatagttgagggttctcaagagcaacataaaatccatagtgtttctaatattttaacaactcattcaccgcatattgtaagtgttgctccattaaaatctatcgttttattaaaagaaacgcatggagaagataaatctacaaaaatagtctctaccgcaaaagtttctttagatgataaagatgtgaaagatttggagcgctacattaatgtcacaagaggggaaattcttttttctaaaggggtaatattagttgaaggagacgctgaagaatttctgttaccttcactgtcagaattgcacggaattgatcttgataaacatggaatcactgtatgctcggtatctggcactaatttccttccatatatcaagcttctgggaagtggaggattagatattccttttgcaattcttaccgactatgatccaggagataagttacctcaaattcataatcgcttaataaaattattgaattttatagatgaagaatatgagtatggcgaggtaggaactgaagatctaattacctatggaaaagaatttggtatttttacaaatagccatactttagaggttgatctatttgatacaatgcctgatgaaattacagaaactttaactgaattgacaacaaatagtaaggcaatcagtagagcacaagactggaagttagcaagtagtattaaaggagatgaaaaaagatatctttccgacatagaaagtattggtaaaggaagatttgctcagagattatcgactaatcttacaaatttatcagttgttcctgagtatgtgaagggagccttagattatgtcatcgctaaagtttga

SEQ ID NO: 80289 - DNA, 1827 bp, Bacillus cereus
atgtcatcgctaaagtttgacaagctactttatagagaagcttctaaagatttatcaaataatgaagcacaactaaaagtttatgattctacagggaattgtgtcgttcttgcgggtccaggtagtggaaagtctaaaattcttacattaaagttagcaagaatcttgaatgaagatatagaagcacctcaaggagttgcttgcttaacttacaataaagaatgtgcaagagaactaaaagagaagctatacaatttaggaatcattgaatcatctacaatttttattgatacggtacattctttttgtttaaatcatgtgattagaccatacaaacatttagtgaacgctaatttaccaaaagaaattaaagttgctacttcaagggaagtaagggaaacaatgcttcgaacattcaacttaactattggacagaatgaacgatatacttcaagctggtcaacagcgtttaatgtttatagaagaacgtttatagataggaaatcatctgaatggaaaactaacgacagcgatatagcagaatggattcttaattacgaaaactcattaagacatcaagggttaattgattatgatgatatggttttgcatgggttgtggatgattgaggagaatcaatggattcaaggattacttcaagctaagtttcctgttattgcagttgatgagtatcaagatttaggtgcatcattggatagaataataagagttctctgtatagaaaatgacactcgtcttctagcagttggggatcctgatcaatcaatatatgggtttacaggagctcaacctagtttattaaatgaccttgctcgacaatcaggtgtattaaaaattagactaaaaaagaattacagatcaaaggggaatattgttaaggcatcaattgcttcgttattagaagaaagagattttgtttcaaacagagatgacgaaggaagtattaagttttatggtattagggatggtatagatgcgcaatgtgattatatttgcaaagaaataatccctaaaattcttactttagatccttccagtacgcttggggatattggagtattgtacattgataaaaatgatggagatcgaattgctgagaaagtagcaaaagaaggtctacaatatattcgagtggatggaaatgctccttacaataaaaatcagctaactgtgtggatagaaaactgtgcaatgtggtgttctggaggatggttaaagggaagtccccaattttctgaaattgagcgtactttcagttcattttttttaaattcaaatatgtcagaagcaaaactagaaagtaagaaattaaatctattcaattttttatttcgaagcagagatgttgaacttaaactaagtgattggcttgatgaatttaataaaagtactgtttctgaattattagatttttttactgaagagccagatatagtaaaagaatatgataaattaattgaatcggcaaaagatggacaactaaaagactttaaagtatcctctttatctcgccaagtaggatctgaaagtcatttaaatttatatacattgcatagttctaagggattagagtttaagtatgtcattatgtttggtttggagcatggaaggataccttggttgaatgctagtgaagataagataaatgagtcaaggagattattttacgtaggtctaactagagcaaaagatgaaattcatttattatgttcaggatggtattgtgattactatgacaggtatcaaaattatgggccatctaaatttgtcttagaacttaaaaagtttgtagataataatttgtaa

SEQ ID NO: 80290 - DNA, 909 bp, Salmonella enterica
atgacgagtaacgaggatgctcaggccctagtcgctacgcatgctccgtcgatgttgcgacgtgtcgatccggaacatattcgatatcttcgacttactgaaacccggcaatcaagaattaagaaaatccaattacccgctaaaaccgatgaagcgcacaaatttgtacgtgaggctgtccaggcatttcctgagatctacttctctcgtttgattgtgttgggtgaaggggatagcgaagaaattgtattaccgcgccttttccaagcaaagggtgcgccagttgatgaatcagcggttacgattgctccgcttggaggtaggcatgtaaaccatttttggcgtctgttatccgaactgcaaatcccatttttgactcttctagatttagatgtgggcagatatcaagcgggctggggaagaataaagtatgtaaataaccaacttggtttgtatcaacctgaaaaggtactaccaactactttttctttatcagattggaatgatgacaaagtacctgttcgtacacatcatttctttgaaaacggcactaagagtgtatttttagagctggaaacacgtggtgtttttttctcatttccaatggatttagatttttcaatgcttcttgctttccctaatgcgtacggtgttcagcaggaggtttcagatgagtctacgattaaagccgttttgggtaagagccatcatggctcataccaatacagcggagacgagttaaatcttttctctacgtatcacaagctttttaaactgggtagtaagcccgctgcgcatatagatgctcttgctcaactgagcaacgaggaattgctggcgaacatgccaggatcatttggacgacttgcagatgccgtgatagccaagcttgcggagctgcccgagtga

SEQ ID NO: 80291 - DNA, 1662 bp, Salmonella enterica; identical to SEQ ID NO: 72181

SEQ ID NO: 80292 - DNA, 909 bp, Salmonella enterica; identical to SEQ ID NO: 80290

SEQ ID NO: 80293 - DNA, 1662 bp, Salmonella enterica; identical to SEQ ID NO: 72181

SEQ ID NO: 80294 - DNA, 909 bp, Salmonella enterica; identical to SEQ ID NO: 80290

SEQ ID NO: 80295 - DNA, 1662 bp, Salmonella enterica; identical to SEQ ID NO: 72181

SEQ ID NO: 80296 - DNA, 909 bp, Salmonella enterica; identical to SEQ ID NO: 80290

SEQ ID NO: 80297 - DNA, 1662 bp, Salmonella enterica; identical to SEQ ID NO: 72181

SEQ ID NO: 80298 - DNA, 909 bp, Salmonella enterica; identical to SEQ ID NO: 80290

SEQ ID NO: 80299 - DNA, 1662 bp, Salmonella enterica; identical to SEQ ID NO: 72181

SEQ ID NO: 80300 - DNA, 909 bp, Salmonella enterica; identical to SEQ ID NO: 80290

SEQ ID NO: 80301 - DNA, 1662 bp, Salmonella enterica; identical to SEQ ID NO: 72181

SEQ ID NO: 80302 - DNA, 909 bp, Salmonella enterica; identical to SEQ ID NO: 80290

SEQ ID NO: 80303 - DNA, 1662 bp, Salmonella enterica; identical to SEQ ID NO: 72181

SEQ ID NO: 80304 - DNA, 909 bp, Salmonella enterica; identical to SEQ ID NO: 80290

SEQ ID NO: 80305 - DNA, 1662 bp, Salmonella enterica; identical to SEQ ID NO: 72181

SEQ ID NO: 80306 - DNA, 909 bp, Salmonella enterica; identical to SEQ ID NO: 80290

SEQ ID NO: 80307 - DNA, 1662 bp, Salmonella enterica; identical to SEQ ID NO: 72181

SEQ ID NO: 80308 - DNA, 909 bp, Salmonella enterica; identical to SEQ ID NO: 80290

SEQ ID NO: 80309 - DNA, 1662 bp, Salmonella enterica; identical to SEQ ID NO: 72181

SEQ ID NO: 80310 - DNA, 909 bp, Salmonella enterica; identical to SEQ ID NO: 80290

SEQ ID NO: 80311 - DNA, 1662 bp, Salmonella enterica; identical to SEQ ID NO: 72181

SEQ ID NO: 80312 - DNA, 909 bp, Salmonella enterica; identical to SEQ ID NO: 80290

SEQ ID NO: 80313 - DNA, 1662 bp, Salmonella enterica; identical to SEQ ID NO: 72181

SEQ ID NO: 80314 - DNA, 909 bp, Salmonella enterica; identical to SEQ ID NO: 80290

SEQ ID NO: 80315 - DNA, 1662 bp, Salmonella enterica; identical to SEQ ID NO: 72181

SEQ ID NO: 80316 - DNA, 1770 bp, Paenibacillus amylolyticus
atgttaattgaatggattaaaataaagggtcttcgaaattttggtgatgagcttattaacttctctaatcaaactttgataattggagcaaatgatgtggggaaatctaatttgatttttgcgcttagaatattatttgatcgagggttgagtgataaagatctagatttactggatagtgattataatgtttatacaaaagctaactcaatagaaattacagtgaagatcagtaatgtaacggaagactgtttgataagcacatttaaaggtgatatccaaaatggaactgtttatgttcaatataggaactccaaaaatggcgagttcagcacttatgctggtcattcagtagatgcattggaactgaagtcgcctcgtttttatatcaaaagacttaatatggaatgtgttaattctaatagaaatctatcatcattcataaaaagagaaaaaaatcaaatattagagaatgcgaagtcacaactctctgcggaattagcagaagaagataagatctccattgataaactaaaagtggtactaaacgatgtgagttcaggagtggatgagttaaattatataaaaaaatccttggcgagtgtgaatcaagaattgaaagatttagctatacataatgagaatcaagacttgagttttaaaaacgcaaactccgacgtaaaaacgatgcttgaaaatttagaattaacttacgcatctgaaggtgaaactctcacattaggtggagatggaagaaataaccaaattttcttagccacttgggtaactaagcaaaaaagtaaaataacacttgagagagttaccttttttgctattgaggaaccggaggcacatttacatcctcaccaacagagaaaactctctagctatctattagataatttcaaagaacaagtttttataactactcattcacctcacatagctgctgacttccgtccggataaaattgttaaattgaaaacaaataataaaaaaactagtgctgcaaacggaggatgtagtgaagacataagcctgaaatttgatgattttgggtatagattagatgctattacttcggatatattttttgtgaacgccgtgtttttagttgaaggtccctcagagaaacttttttatacagctgtgtctaagaagaaggatatagatcttgatcgtctcaatgcttcaataatttctgtaaatggagttggatttaaaccatatataaaaatatgccaagcattggatataccattcgtatttaggactgataatgatattttcagtaagaaaaagactattggaactaagcctcaggagttttcgtttcaagcgggtgtgtcacgaataatggggatatttaaggaagtgttagataaagacgaaaatgctgtccttcttgaatattgggggaaaaatgagtcatacaacgaatggcctaaggactctaagattccccaaaaagcagttgatattctaaatcatattacacaggaagtagaaaaaaagaatatttatttgtcacataaagatttagagaatgatttagtagaaagcaatctatatagtaacctgaaaagtttctataacacgagagcaaaaagtagcacggttaaaattatgcaaaaagctaaagcagagaatatgtttgaatttttgaaaaataattatgatgctttggattgcttggaaaaagacgatattgttaagcccttaaaaaaaattaaagaattagctgaaaaggtcgtgaaggagaatgggtaa

SEQ ID NO: 80317 - DNA, 1671 bp, Paenibacillus amylolyticus
atgggtaattcttttcctcccactgatgagcaaaatataatcattgaagaaactggaaatctagttgttactgcaaaacctggaagtggtaaaacatttacggttgtagaaaagataagtgtgatttctaagacgttattaaattatcaaggtgtaattgcaatttcatttacgaacaaagcaagtgacgaattagaacttcgatgcagaaaaaaaggggttaaaaagaataataacttctttggaacaattgataaattctatatttccgagataattattccttttgcaaagttgttaattggaaaaaatgttacatgggaagtaaaaaattcggtggatgattttccgaagtatgcgagactaaaagatcttaataaaaaatttaatgatgaagaattattggaactacttcaaaaatcactgagtgaagggtatgtatttttagaaatatgtgctgaaacggctcagtacattttaaatgttgttcctgaatgcatatcatacttgttagcgcgttatactcatatctttatagatgaatatcaggactgtggcaaatttcaacatcatatttttctgaagttagtggacgctggaatggttggtatcgctgttggagatctaaatcaagcaatttatgcatttagtcagagatactcgaagtttttattttcattaatttcaaacgaagatttcagatatttagaaataactaagaaccataggtgtcataaaagcatttcagattattcattagctcttatgggaattcctaatattaacttatcggatgatccaagagtcttcaaaacgtatattccaggaacagatcataatatttttgaatcgatagattttaatttacctttactaaaagagaggtacaatcttgagaataacaatgattttgcaattctatgtagagggaatgagacagcaaaaagagcagcagaatttcttcgtactccgaataaattgtttgttgagactgccttagatagaagcaattcacattggggaattatatttaatgatatgttatcttcttattttatgtttggaggtggactcacgacaaaattagattttgtacagagctactttaatgaggatttagatatgcggaaatttgaaagagcacttaatgtaattcatgcaatttttatattaggcgaagaagaattaatcagtaatattgatttatttatatgttttgcagaaatggttcatccagacgatagagatttagaagtatgtaacgaattaaagcttattctaggagatactcaaaaactaaatagttttaagccggctacagagaatgaggttaatataatgacgctccataaatcaaaaggattagagttcaaagttgtatttcatttggatttatacagatggatactaccctttgaaggagctaggacgtcagaagaagagtatatccaagcacttaatttacattatgtgggtgtaactagagcagttgaggcttgctatattatgcaagctactctccgctatcgcccagcgcaaggagatctttggtcagcggaggaatcaccctttttacatctacacaatacatctagtcttaggcaagatatttattgttcaatccctcaagttccttttcatactgcaatcagtaagattctagtcaaatag

SEQ ID NO: 80318 - DNA, 2310 bp, Pseudomonas monteilii
atgccagaagcggttgtcaccacgccggtagctggaagcatcacccttcgattcctagagctttgtcagttccggcggcttggcaaggtccagctagatgtcgataagaaaactactattcttgtcggagccaacaatagcggcaaaacatcggttcttgcagcgctacgccacttcctttcagatggctctcgcttcggcgctttcgatatcagtctgtcgcagtggccgaagttgcgagcgcttggtaaagcttgggaattgctgaaggaaaacccgtcgacagggattggatccgaagagcaatggatcgagcagcttggagtcattcactcggctatgccgacgttggacctatggttcgatgcggaggctggcatgttccactatgtcgccccgtttctctcaaaattcagctggaaaggaggggccgttggggtccggttgcgtctggagcccgctgcaagcgttgacgagttgaagcagctggcttgggcataccacaccgcgcgactgccggtgaaggatatgggggcggattcgcttgcctggcccattgacctcctcgacttttggctgcgcgagccacaaaggttgggtcaagtccgagcatacaaattagatgcagacaaaaatccactggacagactcgagacctatgccactcagactctgcctgcagacgccagtccaattgagcgcaaaaatctacagaaattgatacatgttgacttcgtagcagcgcagcggggtcttggaggtgaggaagctgattctcgatctgcttctggcccccatcgtatcggcatgttctccaatcaacttctcaagtttgctcgacaacacctaaatattgctacaacaggtcatgggcatcgcgcagaccttattaaggcggtcgcggaggcacagcaggaactggacaagaaaattcacgaggcgatcgctccgtcggtggaagaggtcagagaactcggatacccagggctgcacgatccccaagaaattcgcttccgcacgcgcatacagacagctgatttgctcgaccatgggactgcagtccaatacagcatgcagaaggactcactagaagagcttcttcccgagtactccataggccttggataccaaaatctccaatcgctcagctatcaactggtttctttcaaagcggctcgactcaagcctgaaaaaggtgccccggtacccgttcatctagtattggttgaggagcctgaggcgcatcttcatgttcaagtgcagcgtatcttcccagataaggctcacaagctgatcagcccgaacgaaaaagaagcgtcaggacttaaaagccagttaattatcagtactcactccagccatctcgcgcacgcagagagttttgatcgattacgatacgtccgtcgcatagcaaagagcgcagaaaatcccatgccgaccactgaggtggttaatcttgggaaaattttcggtgatgaccaaaagacccgtcaattcgcagagcggtatttccgcgttcagcatactgaccttttgtttgccaatgctgcaatcttcgttgaaggcgtagctgagcgcatgctggtcccgcttttcatcgaacgagattttgaagttctcaacagccgctatctgtcgttcctagacatcggcggtagtcacgctcatcggcttaagcctctcgtggaaaagcttcgtattcccacggtcatcatcaccgacgtcgaccccgttgaggagagagctgggaagccgacgaaggatggtgagccgaccaccactctagttgcagtggctaatactggccaagccgggctgcaatgcgggaacccgacgctgcgcggttggcatccgaaactgcagcagctcgaagatttcaaaaacccagtagaggtacaacttgtttggagcgaagtctctgaatgtttagtgcgcttcgcctggcaactgcccgtcgctgaagcgggcgaccattggcctagcacctttgaagactcacttattctcaagaacattccttggttcaaaggtcttatggatgagaaggtcgacggctatggcaacaaaattaagccgcccaaaggcgcacttggctccgtagctcgacgcgttgccgaccatgaaaacatttcggacttggtcgcatctctacacaaactcatgcacggctcattcaataaaggagacttcgctgcaagcatctttgagatgattgcggcggccgaaccaattgcttgccctaagtacattgcggatgccttggaatggcttcaaaaacaattggatcccaatccggagttgctgccatga

SEQ ID NO: 80319 - DNA, 1950 bp, Pseudomonas monteilii
atgactgcggttccgacccttggcgacaacgatcgcgatgccggcgtagttgatgaaatctgtggctaccttactgaagaaccgccgcgcagctatttcctttttgcgggtgccggttccggtaaaactcgtactctggttgaagttcttcggcggcttaccggcgtcatcgaacacgataaaggcaataagttagcacggcgtctgcgaatgtacgggcgctcgattagggtggtgacatataccaagaatgccgtctcggtcatcaacggacgcctcggcgacaacgacttagtctgcgtatcgacgatccactcattttgttgggagctcatcagcggcttcaacgatgatattcgagaagcacttgttgctgttaaagaagctcaacttgcgaaagaaactgccgaggcgcaagccaagccgagaggcattacgccagctaaacagcgagatcttgacgaaatcaaggatgatatcgaggcctttagagcgaccgaagtgttcatctaccatcctgatcgcaacacgtacggccccggcgcacttgcgcacaactatgtcctcgacgcgacagcgtggctgctccgaaataaacttacgctccaaaccattctcaaggaccgtcaccccataattcttatcgatgagtcgcaggacacaatgaaaggcatgctggacgctttgatggggcttgcagagcaggaagggagcgacttgactcttgggctgctcggtgatcaccggcaacgcatttattcgcacgggcacgccgatctttcaagtcttgtcccgcaaaactgggcaacgccagagctgcagatgaaccatcgcagccagcgccgaatcgtcacccttattaacaaagtttgggaagctgagcttgatggccggacgcagcctataaacggtgtggagcagcatcctagaactgaaaaggccggaggagtggttcggatcttcgtgggggatacttcgcgttctccggaggacaaagtgatcggtgaacgttggtgctcagatcggatgcacggagccactggggacgccgcgtggtatcaaggtcagtatcagttgctcgcgctggagcacaagctcgtcgccactcgtggctcatttcttgatgtgtatgaggctatggtcctgctagatcctgacgccgcagcgccttctggcagtggtgataacaaggggccttctgccgtgcaggttctcctaaacgagcttgctcagcttgaagcatgcgtagatattgacggtgccgtaaacgagttaaaggtcacagaggtatttcgtcggtatggacgcctcgacaacctaccggaggaatgtgccgcacgagcgagccgcgtggaggagatgctgaatgctatcactgcatttgccgccgcctgcggcaatccgaagtcaactattgcagaagtgcttgcaccagtcttgagcgcacacttatttgaaatcgatcatcgcctctcggaagcatatgccgacaagtcgccacttcttccggcaccgggccgaggtgaggaggagtccaaacaggccaggatgcggcgcgggtggtgtgcgctgttcgccgcaccctggagtcaactcagactgtaccgaacttacctcgccgggaattcagtgcttgcaacgcatcaggtggtcaaaggttctgagtttatgcacgtcatggttgtgatggatgacgctcttgctggtggttcccttatttcctacgacaagatttttggtggtgtggagcttaccaagcgggacaaagagaacgcagagttgggcaaagaaacgactatcgaccgcaccttgcggttgctttacgtaacctgcagccgcgctcaggagtcgcttgcccttgtgctctggtcgtccgatccagcagcggcacttgatagaatcaaggagagcaactggtttgccatagacgaagttgagacaatcccttag

SEQ ID NO: 80320 - DNA, 1752 bp, Enterobacter aerogenes; identical to SEQ ID NO: 73074

SEQ ID NO: 80321 - DNA, 1776 bp, Enterobacter aerogenes; identical to SEQ ID NO: 73075

SEQ ID NO: 80322 - DNA, 1824 bp, Escherichia coli
atgaatatccaaatagatactgttcgtatcagcggatttcggggtatatgtaatattgaagtgaccttaccgagagttaccgttttactagggcaaaataatgccggaaaaacatcgattgtaaaagctctacaactagcattgggggactactcacggtacttagctgacgaagattttcatataggcgaagatgaaaaacgccaagagacgattacagtagaccttcgatttatagctgttgatagtgatgcgagagcaagagagttttcagagaactggcaacaggcatttggcgataaaattcagtcagagcctgatgggaagcaatttgtagcaatacgtactactgcaaaaccagatcgagtgaaaggcggttatattgttgagcggttccatttggatgagtggccagaacttagtgggtggcaagacgttcgagttggcagcaagaacagattgggcaaacgattggagtctgtacctttcatttcgatcgatgcacaaagagacatccataatgaactaaaggaaaaatcttcttttgttggtcgtgtgctatccagcgttgagtatgacgaaaaagacgtggctgaactagagcggctggtagccgaagttaataaagaggccatagaaaaaagcgagccgcttaaacgattgaagactcatctggataacatgaatcaatcgtttgagggttcaggccaaacagagcttaccccatttccaaagaagattcgtgacctgtcaaagcggtttagtgtgaattttggtgaaacggataaaagctcattttctatggaatatcacggcatgggtacacgcagttgggcatccatgttaacagtaaaggcctttaccgaactgctggccaaaaatcacgaagaggaagccgagccatttttcccagttatggcagctgaggaaccagaagcacatctacacccgaacgcgcaaaggacattgtatagacaactcgtggatgtgccaggacaagtgattataagcactcactcgccgtatattgctggcctagccgagttgcacgaaattagatctctgagcaaacggaaaaattcagtccaagtatatcagttgagagatgagtttgaagatgatgatctgaggagattgaaaagagaggtagtacactcccgtggtgagctcttattttccaaagcaatagtcctctctgaaggagaaaccgaagaacaagccctccccgagctatttggagcgtatgctggaaagcatcccttctcacttggaattaattttgttggtgtcaatggctcaggggcaaaatatcgtccattcctcattttggcgaaagaccttaacattccagtctttatatttagtgatggagagcctaaaacgattaaagatctcaagaaaaattatgaaaaagttttcggagttactgatatcgagaaagccaataatatcacaatacttgacgggactgattttgagggatatctattaagtcagggccttcgcgatttgatagaaaaaactatcaatgaagttgaaggtgaggataccatagacaagtggattgagaaaaaagacggcatgcttttaaaacgagtcaaaactgataagccaagttgccaaacctgtcatcagcatatttttgaggatgtgctacgagattacaaggatgatgctggacgaattcgcgcaatccttgaaattcttgattcaagcaaaccgctttatgctaaggcaattacagacaacctgattaaattgtcagcagataagtttcctgagaagatcattgaattattcaaaaaaattgaatctggagtctga

SEQ ID NO: 80323 - DNA, 1896 bp, Escherichia coli
atgaatctatcaaatgctcagcgtcagattattgaagctccaataaactctgctgttcaagtgcttgcatcagctggctctggtaaaacacgtgtgttaacagagcgtgttcggtatattttggataaaactaaaaaagaaggtatcatcgctcttaccttcacaaataaagcagcggaggaaatgagtgcacgtttagctgatttcgagcaagtagaagatagggtttggatcgctacgatacattctgtcgcacagcgtattttggagaaatatggacacaccgttggtttacccacggagttacacatatatgatagagataaagaccgaatggaagtcttcatacagtctttacgtgaagatggcattaatatagatgagtatctaaatatcactgattcaagagaattgaaaagcagagaaaaaaatctgcaatcctttatggatattttctcgaaaataaaacgagagttgttgactgaccttgaagttgccgaattatatccaaataataatatttggaaaatataccaagactatcaatctgcactgcttaatagtggcggcatcgactacgatgatattttggtatatgcacataaaattctactaacacatgattgggtcgcaaaaatataccgatcccagtataaacatatttgtgttgatgaagctcaagatcttaataaagcgcagtatgagtttatcagggtactttgcggtgatgctataaaaagcattataatggtaggagatcctaatcagatgatttatgggtttaacgggtcctcgaaagactatctctgcaccaactttgtagatgacttcaccccacaatgctttgaacttaaagaaaactatcgtagcactaaagccgttatacgtgcagcaaacaagttgcggccaggctcacaagcagaaattgattatgccttagaaggcggtgtatggatttcagaatttgatacggaagaggatgaggctgcggcgattgttgctactgttaaaaaacttttggatttgagagttaacgatgaaatagaaggtgagatttcactgaaaaatatggtagtgattggccgcaatcgttttgtttttagtaagcttgaaagttctcttaaagacaattcaataccttactctttgagaaaaggtgaaagacagcttgagccttcaactagattcggcaagatattagattatgccattcgggtgaaacttaactctaaagattgggtggatgggaagaagttatgccaaatattgaatattgctgagccaaaaaattggacgacctgtgtattgcaggaaatagctgctcaagtttcatcatcagttgacgagtactctgatgtattcgcaaaacttcttttcgctgtcgatggattggatatagaaaatccaaaaatccctaagcttgtaaaggactttaactgccttctcacttcattggttgaaagacatagcagtatttctgacggtaaaatagaagatgttaagctcagcattgaagaacttgatgaatttaatcgcacatggacacgctttaaacggaaaggaattggggattccctggttgcatttcgcaatgcgttagctctgggacagctttcgcaagatacccttgaaaacggcttaacattaagtaccgtacacacaatgaagggtcttgagaaggatatcgtgtttttaattggtatgtgtgaaggcgttttcccagactacagagccaatacagtaaaagaacttgatgaggaaagaaataacgcatttgtcgcagtaacaagagccaagcgatggctttatatatcttatcctaagcaacgaatgatgccatggggcgacaaaaaatttcagcgaaaatctcggtttgtaatggagatggaatcatga

SEQ ID NO: 80324 - DNA, 1824 bp, Escherichia coli
atgaatattctgatagataaagtacgtatatctgggtttagaggaatatcaaatattgagataactctcccaagagtaactgttttactgggacaaaataatgcagggaaaacatcagtaataaaagcaatgcagttagcaatgggagactattcgcgttacttatcggatgaagattttcatataggtgaagatgaaaaacggcaagaggctatcactgtagatcttcgttttatagctgttgatggtgagactaggattaaagagttttcagaaaactggcagcaagtgtttggcgagaaaattcagtcagagcctgatggaagccaatttgtatgtatacgaactactgcaaaaccagatcgagtgaagggggggtacgttgttgagcggtttcatttggatatttggccagaacgtatgaactggcaagatgctagggttaataataagaatagattaggtaagcgattggagtttgtaccttttattccgattgatgcgcaaagagatatacatagtgaattgaaagagaaatcctcattcgtggggcgtgtgctatcaagtgttgagtatgacgataaagatgttgctgagctggaaaggatggtggctgaaataaataaagaagctatcgagaagagcgaaccactcaagcgtttgaaaaatcacctagataatttaaaccaatcatttgaaggttcagggcaaacagagcttaccccgtttccgaagaagatacgagatctgtcaaagagatttagtgttaattttggtgaatctgataagagttcgttttcgatggaatatcatggtatggggacacgtagttgggcatctatgttgacagtaaaagcctttactgaactcttagttaaaaatcacgaagaagaggcagaaccgtttttcccaataatggccgcagaggaaccagaggcacatttgcaccctaatgcacagaggactctatatagacagctcgtggatgctccagggcaagtgattatcagtacacactcaccttatattgctggtttggcagagttgcatgaaattagattcctaagtaagcaagagaattcggtatgtgtatatcagttaagggataaatttgatggtgatgatctaagaaaattaaggagagaagttgttcactctcgtggtgagttattgttttcaaaagcaatagtattatcagaaggagaaactgaagagcaagccttacctgaactttttgaagcctataccggaaaacatcccttctcgcttggtataaacttcgtaggagttaatggttccggagcgaaatatcgtccatttcttattttggcgaaagatttcaatatacctgtattcatatttagtgatggtgaagaacagacagttaaagatcttaaaaagaactatgaaaaagtgtttggggttactgatataatgaatgcagctaacattaccatacttgaagggactgattttgagggctatttgttaagtcaaggtttcgatcagttgattgaaaagactatacatgaaatcgacggtgatgatgcaatcgataagtggattgaaaaaaagaatggaacatcgttaaagcggattcgaactgataagccaaactgtggcacttgtaatcaaccaatctttgaagatgtgctgaggaattacattggtgatgatggacgagttcgtgcaatcctcgaaatccttgattcaagtaagccgctttatgcaaaagcaatcacagataatttgattaaattaccgaaagaaaaatttcctcagaagataattgaattattcaaacaaattgagtcgggagtttga

SEQ ID NO: 80325 - DNA, 1893 bp, Escherichia coli
atgaatctatcaaatgctcagcgccagatcgttgaagcccctatggatatagctattcaagtgcttgcctcagcaggttctggaaaaactcgtgtcttaacagagcgtgttcgatatatattgaataatacaaagagagatgctgttattgccctgacctttacgaataaagcagcggaagaaatgagttcgcgtttaagtgattttgatccagatgaagacagggtctggattgctacgattcactctgttgcgcagcgtattttagaaaaatacggacacaccattggtttgccatcagatttgtatatatatgatagagataaggatcgtatggaagtctttatgcagtctttgcgtgaagatggtattgatatagatgaatatctctccattgcagattccaaggaattgaaaaatagagagcgaaatctgcaatcgtatatggatatattttcaaaaataaagagagagttgcttactgagtttgaggtatctgagttgtatccagataataatatctggaaaatatatcaagattatcaggcttcattacttaatagtggcggtatcgattatgacgatattttagtatatgcacatcggattctgctcacgcatgattggatagcaaaaatatatcgttcaaaatataaacatgtttgtgttgatgaagctcaagatcttaataaagcgcagtatgaatttattaaggtgctgtgcggtgatgtgataaaaagtattcttatggtaggtgatcctaatcaaatgatttatggttttaatgggtcatcaaaagactacttttgtgaagaatttattaatgatttttttcctaatcagtttgagttaaaggagaattatcgtagtgccaaagctattattcgcgcagcaaataagttaagaccgggatcacaagcagagattgattatgccttagagggaggcgttagaatctcagaatttgcttcagaagaagatgaagctgatacggttgtcgctactataaagcatcttctggaattgaaagttcacgatgagattgagggggatatttcactaaacaatatggttgtgattggccgtaatcggtttgtttttggcaagcttgaaaaatgccttaaagaaaatttgattccttactctttgaggaaaggagagagagcgttagaaccttcgactagatttggaaaagccctggactatgccattagagtgaagttgaattcaaaggattgggttgatggaaaaaaattatgtcaagtactttgcatatcagagccggctggctggacacctgatgtattgcgagagatggcggttcaaatgtcatcatcagatgatgattactctattgtatttgaaaaacttcttactactattgatagcttaaatattgaaaatcctaaaattcccaagctaataaaggaatttaatgctcttcttacatcgttagttgaaaatcacaatggtatttcagacgataaaatagaagacgtcaagttgagtattgaggagcttaaagagtttagtggtatgtggactcgatttaagcgtaaggggttaggtgattcattagttgcatttaggaacgcattggcattggggcaactagctgaaagtagtatggatgaaggcttaactttaagtacagtgcatactatgaagggactggaaaaggatatcgtgttcttgataggtatgtgtgaaggggttttcccggattacagagctagaacgcccaaagagcttgaagaggaacgcaataacgcttttgttgcggtgacaagagcgaagcgttggctgtacgtttcttatcctaggcagaggatgatgccttggggcgaccttaggtttcagcaaaaatcccgatttgtcagtgaaatagaataa

SEQ ID NO: 80326 - DNA, 1824 bp, Escherichia coli; identical to SEQ ID NO: 71786

SEQ ID NO: 80327 - DNA, 1893 bp, Escherichia coli; identical to SEQ ID NO: 71787

SEQ ID NO: 80328 - DNA, 1923 bp, Prevotella bivia
atgtatctaagtaagatctatataaagaactttcggggaatcaaggaactattggtggagctcgataagaatttaaacgtaattatcggagctaatgggcagttgaaaacatctttgatggacgcgattcgccttttctattcatggggtgagcctaatcgagatatagaaataacaaaagaagatttctatgttgagattacacaaaacacaaatggtactaaaatggtaaatccttcgacgaggattgacatatattatttatttgaaggattatcatcacaacaagaaggtgcattttatcaatatttggatagaaaagatgatggtactatggttgccagagtccatttgagttttgaaataaaagaacaaggtagaatttattcatcctatattacaggaaaagaagagaatggtctccgtgctgattgggatactttccattattttcatccttattatttgggggcattacgtgacagtactcgtgacttgatgagcactcgaaataacttgctgggaagagtgattaaaagaaagatagacagggcaggttcggaagaagacgtaaaaggaatagtaaatacagcaaatgaccagctgttgcaaagacaagaggttaaagcaactcaaactggtataaacgataacttgaaccaaataaacaggtcagaccttcaggatgttgagttgcatatagagcagaatcgaatagagtatatcgttaatatcataaaacctttcttgccattttctaaagatgacaaggatggatttgtgctgactcaaaatagccttggatacaacaacttgatatatatagcttcggtattgagtgacattaaagattgtcacacggatgataatgtgagtatatatgcattactgattgaagaaccggaagctcaccttcacccacaattgcaggtaaatctatataactttcttaagaatgcagataccagtgagaatagtcagacatttatcactacccattcgccgactttaacatcaaagataccattggagaatctcattctgctgaaaaataatgctgcatatcatgttgggaagtgctttgaagatagacattcagagaatattgttcgcgacgttgcagctaataacagactgttgaagaataatgaggtaaaaagctaccgtaatatgatagcacggtattttgatgtgactcgctcacaattgcttttttctaatggatgcctgtttattgaaggcatatcagaatgccaattggttgaaacattttctaaattgataggcaaatcactcattgatcatcagatagaaattgttgatacagatggaacggcattctaccaattcctgatgctgttcaattcatctgatgataagaaaaggttgccaattcatgcggcttttgtgacagacgaagaccaatttacagaatctaaggataaagagtttaatcttgacgctctcatagcagacaattatgcacaactgaatgtcttaagagatagtattaacaatgggcataaaactggcagggtcaacaatatgacagcaatggctaacgggcaagcaggaataaagatatgttcaggaaagaaaacactggaatatcaaatatgtaaagctaacgtaacaggaaacaaagatgccatcaaaggtaattggctttacgaacttataaaacgagagaatacagatggtattggtagggttgaagcctatattgatagtataggtgagcgtgatttgaatgatgtggaacagcagaatgttgcgttactcatgtggaaatgtttaccgggaaaggcaaggtttgcccaaacattgaattcattcttgatagataagattgaggcaggtggtgatgtgaagtttacagtgcctacatatattcaagaagcaatatctcatctggttctgtaa

SEQ ID NO: 80329 - DNA, 1827 bp, Prevotella bivia
atggaatacgatttaacaccacaacgacaggcatatcttgatgcaagagggtataccatattgacggcttgccctggaagcggaaagactacaagtattgtaaagaaactacgtgcagtgtcgcaatattgtgcagaacattatggaaaacatactggttttgcttgcctttcgtttactaataaagcctgtgctgagttaaagcagaaatatagggaaatgcatgatgaaaggttgacttttcccaatgaagtgctgactattgatagttttatcatgcaatatgtagtacttccattttggtatctttgcgatgcttgtaagaagaaaccaatagtcgtgaatgaggaagagatacttaatccaatttatttcaacaatgtgtttaggaatgggaaatggaattcttatccaatacaacctttgagtaaatttggtaaaaagcaatatgacaaggtactttataagaaaagccccgccttggtttctagagaaaagaacgggtatagatggaatcataatacaataaacaaagcaaaagaagttgaatactgcgagaccgtatttacttatcgattaagtaaaggctttattacaagtggcgatgctttatggatggtctgtgatatattaaaaaatcatcaggaaatagcgggggctcttgtcgctcgtttcccatacattattgttgatgaggcgcaggataattcagaattacactttgatttttttaagctgttgaagcgagcaggattgcagaacttggaattcgtaggtgacgtatgccagtccatatacggttttaatagtgcgagacctgaattgctgcaagacatgatggcggaagaagactggaacgtgttgcctttgtctgaatgcagacggtctaaccaacgtatcattgacctatatagcaaattgaagtcaagcgatgtacctgcaatttcatctcatggtgtggaagataaaggcattcctattgtggtgtataaatatgatgacgagaatgtcagagacgtcataagaaatttctatcaagagtgtgatacaaatgagttaccaagtaggatcatattagcacgaggtgtcagaaaatgcaagaagttggcaggggtaaaggatgtagatttcaagtattggaaaaccgatttgccatatttgctgattgatgccgtatttgcatcggaagctaatgatatggattatgccttccgaaaaatacgtttggtcttgtcaagattaatgactgaagatagccctgatgcaaaacggcagtttattcatgaaatagaacataatatcgactggaatgcaaggatatttggatttctgaaacaaattccatctttctccttgagctttgaggagtggtctgaacaaacatgtgtgttattgcatgatttttgggaacttgatgagcaacctaggtttgtgccatatcagagacagaagggctataagatgaaagaaatgggaaatgtgccagtcgagcggtttcatcagtcaagggatgaaagtagcgactatcataagaacattgatactatacatgctgttaagggtgctacattagatgcagtactattgttcttatcttcaaatagtacagggcagggtatttcgctaaatgatttcccacgaagagctataagaaatatgactgagagccagcgtatgatatatgtagcttgttccagagctacgcaatttctggcatttgcagtaccgaagtctatcgcagatgaaaccattaggagaaccttggctggggtgagcatagatatacgttatatcaacctacaaggagaattaggttttacagattaa

SEQ ID NO: 80330 - DNA, 1701 bp, Escherichia coli
atgagaattgaaactgtttatattaaaggattcaggaattactgtgatgctgttattaattttaatgaaactaatttgattataggtgcaaatgatgttggaaagaccaacctattatatgccattcgattattacttgataaaagtttatctgaattagatctagaaccaaaaagcaatgactttcatgtaaattcggcaggtgaacaggttgaaaatatagaaatcactatcaagtttacagatgttagtgaagatgctgtaatatctaaattaggagggtatgttagcgatgaaggggaaacatacattaagtatcttgcttcatcattaactatggattacaagatattacttagtcatgaacataacaattttgatgaggttcctaatagattttacttaaagtgtttaagtctaaggtatataaattcgcaaagagatcttgaaaaatacattaaaattgaaaagaagcatcttttaagattggcgcaagaagttcgtagtgaaaaggatactgaaaatgatggggcggtttttactgaattaaataagctacttactgaagtaaatgaaaaagttaaaggaataagttatgttgcatcagcaacagaagagcttaacgaggaacttagaaagttatcctatactcatgatagattaactgttcaacttgatactggtgcaatagggattgaccagtttatagagaaattagaattaagtgcgaatacaaatgggaagaaactaatgcttggtggcgatgggtttaataaccaaatccttcttgcgttatggaaagcaaaaagtgttcgcgagcatgatgttgatagtgaagtagtgatctattgtatagaggaaccggaagcacatctatttcctcaccagcaaagaaaattggcggcctatttaatcgataaacttccaggccaagcaatcgttacaagccactcacctcaaattgcagtgaattttaaacctgattcaatcataaaactatactatgatgatggagagactctagccgcaagtaatggatgttctgattgtattagctctgcatgggatggaatgggctaccggatgagtattattcctgctgaggcattttttgctaacgtggtttttttggtcgagggaccatctgaggtgattttttacactgaattagcaaaagcattaagtattgatcttgattattataacatcagcattctttctgttgatggtatccaatttgaagtttatagaaaaatattaacagctctaaatattaattggatcgtaagaacagacaatgatgcttcaaaagtacctcataagaatgaatggcaatatgctggtgtaaatagggcgttagcactgtgtggagagaataaagaaccaaactcaagtattcctatagatagtaaagctttgcatgctaagtggggaaccatttcaccaataataaatcctaacggcgtttatatatctttttttgatcttgaaggagatcttgctaatgacttttcgaagcatgttcttgattatgcaagtaaggataatctagatgatgccgctgattatttgagaggaaaaaaagctatacgtatgcgtgagttaattaaagagaaaaaagcttttttaactgaactgaagagcaaagatatagccagacctctaatacatgcactgaaaattgctagaggtgaattatga

SEQ ID NO: 80331 - DNA, 1623 bp, Escherichia coli; identical to SEQ ID NO: 75601

SEQ ID NO: 80332 - DNA, 1926 bp, Salmonella enterica subsp. enterica serovar Typhimurium; identical to SEQ ID NO: 72180

SEQ ID NO: 80333 - DNA, 1662 bp, Salmonella enterica subsp. enterica serovar Typhimurium; identical to SEQ ID NO: 72181

SEQ ID NO: 80334 - DNA, 2100 bp, Acinetobacter pittii; identical to SEQ ID NO: 73278

SEQ ID NO: 80335 - DNA, 216 bp, Acinetobacter pittii
atgagtgagattctagacaatccagcaataattgcagctcaactagctgaagcaaaaattaatgcagctataaaagcaggacgaagtttccggctagaagctggcgcaggtgcgggaaaaacattttctttagttcatgctctaaaatccattattaaagagcgtggtagtgatcctagacagtatcgtggacaacaaatccctctaaattcttaa

SEQ ID NO: 80336 - DNA, 2097 bp, Halanaerobium sp. T82-1
atgaaaataaaaagtttagctgctgagaattttagattgttatctaagaaaaataaaaatgaaatttttttagatgatgattttactttaatggtaggaagaaataatactggtaagacaagttttattgaattggtggacaaattcttagcagataatatttcttttgagtttgctgatttttctatttcatcttataaaaattttgaagaagcatatgaaatatttaaggagtatattgaattatctgcagaagaaaatgaagaaaatgctgaggaagtaaataaattaagaaatgacttagaaaatgaattaccttctataagcttagaaattactattgaatataaagacgatgatgatacttctcatctgcagccatttttaactcaactaaagtcagattgtacagaattgatcctgcaatacgaatattactgtaaggacccggttgattttttaaaaaaatatgaaaaacagaaagataaaattgacttaataaaatttatagaaaaaaatttttctaataattatagtaatagaatttggactgtagatccgactgataaagataatagatttttaatagataataaaaataatagaaaaagtaagcttaaaaaacttctttccgcctcgtttatttttgcccgtagagatcttgatgataaggcaaatgacaaaagtaaaaacctgtctaatttatttgatgactattttaagttgatagaagataaagatcaagaactattaactgatctggaaaacaaattattaggagtcagcgaagattgggatgaagagtatgatgatatttttggagattattatgattctttagaacagtttggttatccgggcttgaacgaaagaaaaataaaattaaagtcaatattttcaccgaaaaaaataatgaagaataatacagaagtttattatgataatgatgacggtaaaaatttaccagaagcgtataatggtttgggttttagcaatttgatttacataatattgaaattactatattttcatagagaatttcaggagaaaagtacaaagttgcagatgatttttattgaagaacctgaagcacatcttcatcctcaaatgcaaaaaacatttataagaaatattttagactttattgatgataaaataaaaaaagatgatgatcctttagagtggaatattcaaattataataactactcattcttcttatataatttctgaaggcaattataataatattcgctacttaaaaaatactgatcattcaattgaaactaaagatttaatgagatttgctgaagaaagtaatgagagtctaaagtttttagagcagtatttgaaactaaacaaatgtgagttattttttgctgataaagtaatactaattgagggaacagtggagagaatgctattaccattaatgattaaaaaagtgagtaataccgaagatgagaaaagtttaattaatgaatatatttctgttgtagaagttggtggtgcatatgcttataaatttaaaaaattattaaaatttatagaggttaaaacgcttattattactgatttagactctgttgatcccgaaaagaattatgccagcgctgcgccattaattgatcatgattacaaaactagcaataaaactttgcaggagtggattcctaaggaaatatccgtggatgagcttttacagttaccagaggagaataagataaataaatgtggaaaacaggacgttagagtggcatatcaatatcctgtagaattagatttttgcgatgacaccctatgtggcagaagctttgaagaacagttcataatagaaaatcttgaactgatttatgataatagagctaagtttcaggaattcctgacaccaatagaaggaaaactgaagaaaagaataactgataactttccagaaaataaaagtgatttggatattgataacaatagggtttttgaaattgcagaagttataaaaagtaaacctaattttgcctatgatataatgactaactttaaacttggtgattggcaaatcccaacttatataaaggaggggttagagtggctccaagagtag

SEQ ID NO: 80337 - DNA, 1653 bp, Halanaerobium sp. T82-1
gtggctccaagagtagatagagatacaaaaaaagatgattctctggataaaataattaaatgtatagatgataataatagtttcatcttagatgctggagctggctctggtaaaacctggtcattaattgaaactttaaaatatataattaaaaataatggtgataattataatcggctggctaaaaatataggctgtataacttataccaatgttgcagttgaagaaattaaaaatagaattggtgaaaatgagattttagatgtaaatacaattcatcaatttttatggaatgtaattaaacagtatcaggtagaattaaaaaatgtaataattgacaattatgagggccttgaaagtttggatgacttttcagtaaaatataaaaattttagagaaattgaaaaaggaataatctctcatgatgatgttattaaaatatcatctaagctatttgaaaaccaccaaaaattgcagaggattttcattgataaatatcctcttgttttagttgatgaatatcaggatactcatccagaagtagtagaaactttcttagatttaattgataatgaggtgagtaaaaataattttatagtaggttactttggagactctaagcagagcatatatgaaaagagggctgaaaaaataaataatgatgataaactaactaaaataacaaaagagagtaattttagatctgctggagaaatcattgatttacttaatcacattagaacagatattgaacagtttcctgcagggaaaaacaagaaaattgttggaacaacatatttcatttatgatgatacttcacaagataaagatctttgttatgagaaagttaaagaaaaattggaggatgactggggagatttaaaagttttcttcttgactcatagacgcatagctattaatgtgggatttgagaaattatttgagcattataataattattacagtaatagaaagtatagagagaaattatataataaagagtgtcccctcatttcatttttagctgatagagttgagcagagtattagttattatgagaataataatatatttgctttaatggatgctatagattttgatttttcaaaaaatcaggataaatccaggttaaaaagcattatggatgaattaattaagattagagaatctggcagagttaaagatatttgggaattagtatttgatgataaattatttgtaaaaggtgataaaatcaaagaatttcaaaatgattttgaagtaaattctgataaaaaagagttttacaataacattatggagctaaaatataaagaaataattaatttttataatcataacgaaaatgattctgtattctctacccaacatggtactaaaggtgaagaatacgaaaatgtcttattagtaacaatggctcgagactggtataattacaattttgcagagtatttaactggtgatctggaacaattaaaaacttctattaggcagagaactcaaaatcttttttatgttagctgctccagggctgtaaaaaatttggcagttttatacttgcgagaaaataaagatgtagggttgaccagagtaaaggactggtttggagaagaaaatgttattacagtagatgaatttttagaatcagagtag

SEQ ID NO: 80338 - DNA, 1905 bp, Marinobacter sp. T13-3
atgaaactacagtgcatccggctattcagctttcagtcgtttgggccggagcccactgaactgaccctcaacgacatcacctatctgatcggcccgaacggttcaggcaagacggcagcacttcaggcgttgtgccgcttgtttgccttcgatccctcgctacggcgcatccggcggtcagatttccacgttccctatgacgaagaggaagttcctgaagaacggcagctctggatcgaagccgactttatctttcccgaacttgaagatgacgatgatgtcgcaacgatagctcctcatttcggccatatgcggctggactccgccgatggtccaccccgtgtccgatatcgcctggacgccacgatgggcgtgaatggtgacatcgaggaaaccctggttcatgtattggatctcgatgccgatggctctcctctcacgacagcacaagttacgcgagcggaacgcaatcatgtgcaggttcactacttaccagcacgacgagatcccgctgatcacatcgcctacagcgccaatgctctgcttggccgcatgctgcgtgccgtaaactgggaaaatgagcgagaagaaatcaaaggcttcacagacaaaatcagtgaaagcctcgcgggcaatccatcaatcgcaactctgagcgggagcctgcagacaacctggagcaccttgcataaaggcagcttcttcgccgaccctcaaatcaccttcgtcgcatccgagatcgaagccttattacggcacctgtccgtttccttttctcctgggcatgacgaagaattggtcgatttctccaggctaagtgatggccagaagtccatgctctatctgtcactggttctttcggcacaatcaatcggacgtgcggtccttgccggtgacgatgataccttcgacccggataagttgcgtcccccggtgtttacgatcgtcgcccttgaagagcctgagaacagtctctcacctcactatttgggaagaatcgtgaatgctctggccactatgacgagtaacgaagatgcccaagccctgattgccacccatgcaccttccatgcttcggcgagttaatcctaggcacatacgctacttgcggctcaccagcgagcgaactaccaagaccacgcgcattcgcttaccgaaaagaaccgatgaagcccacaagtttgtccgcgaagccgtgcaggcatatcccgaaatttatttctcccggctggttattcttggagaaggtgatagcgaggaaatcgttctgccccgcatccttcgtgccaaaggaattccagtcgatgagtctgctgtaaccgtggcgcctctgggcggtcgccatgtcaatcacttctggcgcctgctctcggctcttgaaatcccctatctcactctgctcgacttggatgtcgcccggcatcaagggggctggggtcggatcaagtacgttaacgatcagttaggcgaatacgctcctgccaaaaagcttccagcggaccatggaattcccgcttggaacgatgcgaaagagaaggttcgtagctatctcaactaccttgaaaaactggagaatcgagacgtttttttctcctatccactggacctcgacttcgcgatgttactctcgtttcccgatgagtacggtgtcgagtctaatccaccaagtgaaaccacggtcaaagccgttctcggcaatagccatttcgacgcggcacagtacgatgacgatgagcgcgcatttttcaagacctatcacaagcgtttcaagctaggcagtaagccagcggcccatatcgatgcactggcccagttgagtgacgaggaacttcgcgacgacatgcctgaatcactggcgcgactggcgaatgcggtaatcgccaagctggaggaattgcctgaatga

SEQ ID NO: 80339 - DNA, 1671 bp, Marinobacter sp. T13-3
atgatcgccgcaggtgattggcggccagcggacgggcttacgcttgagccaaatgccttgcgtgccgtacgggaaactgagcgctgtcttgcgctgacagccgggccgggggcaggcaaaacagaaatgcttgcacagcgtgccgattttctgttgcgcacaggaacctgccgttacccgaaacgaatactggccatctcgtttaaggttgatgcctgcaaaaatctgaaggagcgtgtgcaacgccgttgtggttccgacttggcagcacgcttcgacagttacaccttccatgctttcgccaagaggattattgatcgtttccggccagtgctgaccggacgggatgccctcgacgtcgactaccaaatcggcgaccggagagtgacccgacgacagatagaattcagtgaccttgtgcccctggccatacagatcctcagcacatccgctgcggcccgcaacgctgttcgtcagacctacagtgatgtctttctggacgaattccaggattgcaccgaccagcaatacgcactggtgaagcttgcgttccagaacactgctatccgtctgacggcagtcggcgacaccaagcaaaagatcatgggatgggcaggtgcgcttgatggcatattccaaaccttcgcagcggactttgttgctgaaccacttaatatgtatcgcaacttccgttctaagcctcgtctgctgcgtatgcagaacgagatcattaaggtgatggactccacctccgttatgcctgatgaacaactcgccggtgaggagggccagatattcgcgtggaaatttccaaatagtcaagaggaagccgaacatctggcggactcaatcgacacatggatcaaccatgagcaacttccaccttcagaaatcgcgatcctggttgtccggcaacctgacctctatggcgaccacctaatccaagcgttggagcagcggcgcattccctttcgcaatgagcaacaactccaagatatctctgtcgagccagccgcgaggcttatcgtcgattatctgtccattctatatgggcagcgagaacccaaagcctggattcgattgatggcacaactcatccctttcgctgacgatgatgtacagtccagcgtgcgaagagatttccagaactttattgctggtcagaggaaaagtgccgtacagagcgtactattaggtgaaccgttcgcggactggtgggattttgttcgcgccttcttaagcaaagtgggcatcgagactctgtctgcactttcccatgattacgagtcaaaagcgagactagtgcaagtcgtcaacgacaccaagacccgcgtagatgaactattaaagtcggaacccaatttgcccaaggcactggagcgtttttccgacgatcaagctgttcgtattttgaccatccacaagagcaagggactcgaattcgatacggttgtcattctcgctgttgaagatcagtctttctggggaaatgaagatgcggaacgttgtgctttttttgtcggcatttcccgggctaagcaacggctgttgttgaccgtcagtgatcgccgagacaccccaccatccaatcctcgcaggtggaaggaaaacagaacaccgcactcggagtttttaggctatgccatgccttttctcaaccctgatcggtaa

SEQ ID NO: 80340 - DNA, 1530 bp, Listeria monocytogenes
atgaaattaaaaactgtgaaaattaaaaattttagaggctataggcatgaaacaagcacagattttgggaatttgacaacgtttgttggtaaaaatgatattggaaaatctacgttattggaagcacttgatattttttttaatgatgcaaaagcatgtgtaaaaattgataaagaagatgtcaatatttattctagtgcagatgatgacaacgaaattattatatcagcatcttttactagcctacctaatacagtagtaattgatacaacaaatactactacgcttgaatctgaatatttactaaatgataacggatacttggaagtagtgaaaaagtataaaaatacaggaaagcctaagacttatattcgagcatttcatcctacaaatgcaaattgttctgatttacttttacgaactaatgcttgtctaaaggatattgttgagagtaataatatagagtgtgaggataaaacaaagaatgcaatacttagaaaagcaatatgggaatattataatgcttcacttgaattacaattaattgaaatagatgttacaagaggagatactaaaagtatttgggataaattacaaacctatttaccaatatatactttatttcagtcagatagaaaaaatagtgatggtgataatgaagttcaagacccacttaaagaagctgtaaaagaaatattatcagatgaaaaaattcaagatacatttagatgcattacagaggaagttacacaaaagcttagcgaagtatctaatagaacattagaaaaattaagagagatgagccaggacacagcaaatacgctggagccattaattcccgaatttagcagtttaaagtggggggatgtttttaaaaatgtttcaataacaggagaccaaaatataccaattaataaaagagggagcggggtcaagagattaattttattgaatttttttagagctgaagcggaaagacgcttagaagtcttaaatgcatcaaatgtcatctatgcaatagaggagccggaaacatcgcagcatagtgataatcaaaagaaacttatagatgcatttattgacttatcaaatgtgcctaacacacaaattgttttaactacacatagtgcaaatatagtaaaaaaattagatatttctcatttgcgtttaattacaataagtgggactagtaaagtgatcgaatgtgtttctaaaggtcaattaccttatacatcattaaatgaagtaaattatttagcttttaatgaaatttcagaagagtatcataatgagttgtacggttatattgaagaacaagggatactaaaagtattcaaacaaaataaaccaactcaaccttataatagagttagaggaggaagtaaagttactgaacagaaaattttaactgagtatataagacaccaaattcatcatcctgaaaatcaattaaataaaagatatactgaatcagaacttgcaagctctatagaacttatgagagattttattgacaataaacaaaattaa

SEQ ID NO: 80341 - DNA, 2178 bp, Listeria monocytogenes
atgcttgtgaacgaatatacaaatagatttggtactattagtaatacaaacaattttgcttcagatgttgtgaggatggaagatgaagatgctaatatttttcatcatttagtaagtttaaatggaggtaacgaatttaacaaagagcaagtaaatgctattcgatttgatatgagaacacatcttaggattatcgctggtgctggaagtggaaaaacgcaaacaatttgtgcaaaggcagcttatttagttttgaaagaaaaaattcaagaacgaaatatagtgatgtgcacattctctaaaaaagcaagccaagaaatgaaggaacgtgtcaacgagtttcttggtggcaatagtcgaatagaagtattgactttccatggatggtttcaaaaagagtacaatgtacttattaaaaaatatccgtatctagaaaagtatgggatagcgggagaggtacccggaaaaggctctggaaaagatagccatgataggattttaatgaatttaattaagcagtatcatttatataattttgataaatatgaagaaaaaccaattaatgaacgacttagttattggcgaaatatgggatataatgatgaggaaattgttgcttttatagcaagatattttgatgacaaagaaatattaaaggatcaactacttagtgaagttttttcagagatgttaaaagaattggaacgaattaagagaagagagaaagtcattaattttgatgatatgttaattaatttaaagtgtgtattggagaacgactcaaatgctctttctttaatacaaactcgatatcaatatatatttattgatgagtttcaggatatcaatcccttgcaaaaacagataattgaacttatttgtccaccagattacgagaagagtgttatcaattctactaaattaattattgtaggagacgatgatcaaagtatttatttcttccgtggtgctgaaccacgttacattaaagaatttgatagacaatacaggcaaacgtcaatagagttaatgactaactatcgttctattgctcctgtggtacatataggaaatactctgatatcaaacaatcaacatgatagaataaagaagtctatgatacctcacaaactaaatgaaggtgattgttacgcaaaaatatttcaaaatgaacagctagaagctaattggattgcaatgcggatattaagcttgtcttcagaagagaaaccattccaagatcaaattggtaaaccgaattatacggaaacaatcgtattataccctaataaaaatcaattaaaatctatgattattgctttacaggaaaaaggaattccctttgtcacaaaatcggatgatgatttacttggtatatttggtattaatttttttaaacgatcattcaatctattaatggatattattgatgcagaaacgatagaaataaaaaagcatttatacaagcaactcataaaaaatatttgtttatattattatataccatttgcaaaaagtatagattttgtctcagatgagactaattatacttcggaaaagttaactgattttatatgcaaagaaaagaaagttagtaaaaaagagatggcgcttattaaatccatattccgagatattaatgaatttataaaaaccgaagaattgaatattaaagtttttgttaattggcttgtagaaactccgaaagtaaagaaacaattaattgatgaagagaaagattggttgcttaaagaggttagcaatgttaaaacgctaaaagagttaatacttaaatataaagcagcgagaaccttaaaagaagagatggctgacaaattaagagaatatgataataataactataatgcagtgtatctattaacaattcattcaagtaagggattgggatataaaaatgtttttgtaaaaggtatttataaaaactcactaccagactatcgatcagtggataaagaaagtattgaacttcagccattaattgaacaagcatctccaccaacaacaatggaagagcaaagaagattaatgtatgtagcgctaactcgagcaaaagaaaatctttatgtaacttaccctagagaagtaaacgagaagcctacacttgtgtcaccatttataaaagaatctaatattatgtttagggtgggaaaaatttag

SEQ ID NO: 80342 - DNA, 1530 bp, Listeria monocytogenes; identical to SEQ ID NO: 80340

SEQ ID NO: 80343 - DNA, 2178 bp, Listeria monocytogenes; identical to SEQ ID NO: 80341

SEQ ID NO: 80344 - DNA, 2199 bp, Bacteroides uniformis
atgaaaatacaatctgttcatattaggaattaccgaaaattgaaaaattgtcatatagattttgacgagaagaaaacagttttagttggtgcaaataatagtggcaagacttccgctattagtgctattgtttggtttctaaaaaacacagatagattcactttaaaagagtttaccgcaacaaattgggcagcaattaatgagattggcgagaaatggctcgaacatgattctgtagatgaagcattattggattctcatcaatgggataacattgtgccatcaatggatgtttggataaatgtcgaagatggagaacaatatcgagtaaatcacttgataccatcacttagttcttgggatggtaaaaaggttggtgtccgtggacaatatgaacccaaagatgtaaaaaagctctacactgtttacaaggatgccaaaataaaggcaaaaactttagagggtactgaagaatgggagaaagctggctctccagatttatatccaaaaaatttatgcgattttttaggcaaaggtctaaatcttagagagtattttgatgtgaaatactacatcatagatccttctcttgatcctgataacgaagacgaagtgcaatcaacgccagacaatgagataggcaacaatccacttgacggactaatcaaagtagatactatactggcatcaagagatttttcagatccggaaggacaaacagacagtgatatagatacgttgtctaaacagtttcaacagtactataagagcagtgggcaagaagatgaggaattgacttgtgaagggttgaaactccttggaggtattgtaacagcgaacaaaacatatgatgaaaaattaaaaaagacttttgaggttcctgttggagaattgaagaacatcaattaccctggattccagaatccagagataagaatacgaagtaagattcagattgaggaatccataaaacatgactcagcagttcaatttgctattcaaggtatggaggaattagtacttcctgagaagtacaatgggcttggttatagaaatcttatctctatttatttgaagttgattgacttcagggaaaaatggctgaaagaattaagtgaagaaaagaatattgagcctattcatatagtgtttgtagaggaaccagaagcgcatttacatgcccaagcacaacaagtatttgtaaagaaagcttttgaagccttgtgtaacaataaactaattgaagaaaatccttggctaagcacacaacttgtgttaagtacgcattcaaatcatgttgtcaacgaacttgacttgaattgtatgcgctacttcaaacgagtaatagatgtcggcaaaaagatacctgtttcaaaagttgtaaacttatctagtacattcggaacagacgatgaaacaaagcaatttgtaacaagatatatacgtttaactcactgcgatatattcttctcggatgctgttatttttgttgaaggccctgcggaaaagatacttgttcccagctttctcgcaaaagccggattagattcttattatatttctgttatagaggtaaatggtcgtcatgcgcatagtttccgtaaacttattgaaaaaattggaattgcaaccttgattgtgacggatatagatgcgactgacacaaaaatagaagacggaaaagaaaaacatccgtccgtgattacagccaaaggaaatgattataagacaggtaatccctccattaaaagttggctttcaggaaaagaacaaatagacgatttgttggcattggatggaagagaaaagcttgtgaataatgtaaggatagcattccaaacaccggtaaacgtcaagtgggataagaataaagatgacttgactgaagtatgtccttatacatttgaagatgcattgatatttaccaatcttgaattatttcgacaggaagggttaaagaaaatgggtactattaccacaatagcgaatctgttgaaacatagtaattctgctaatgaattacaaaataagatatttaaaaagttggaaagcaagagtggttttcagaaggctgactttgctatttctctgctttataaagacgattttgtcgatttggttgccccagtatatattcaggaagggcttgaatggatgaagtcatatttggattctaatggaaacagaaatggagaataa

SEQ ID NO: 80345 - DNA, 1851 bp, Bacteroides uniformis
atggaaacagaaatggagaataatatagactttcaagtagatgagacactagaaaagtgcattctttcaacaccgcgtaaaagtttctttctttttgctggagcaggctcagggaagacttactctttggttcttcttttgaaaaaaatacataatagtattggtaaagaccttttgttgcaaggaaagaatgtagctgttattacctttacgaatgctgccacagatgaaataatcaaccgattggattatagtcctatttttcatatttcaacaattcatagttttgtttgggatgttataaagtattatcaggcagatataaaaagattgtattgtttttatattgaagaagatttaaaagcgttggaaaagaagttagaagaaacagaaaaaaagactaccaaaacatatctttccaacgtagaaaagtttgaataccagaaagaacggttagcaaaagcgcagataatagaaaagtttgtgtataatcccaatggcagtaatcctgaatataatgcattgaagcatgctgaggttattaaaatatctgctcaaatgattcttgagaacaaaatgttacagcgaatcatagcacaacgatatccgatactattgatcgatgagagtcaagatacgaaaaaagaactaattgatactttctttgaaattcaaagaaactttgctgatatctttactttaggtttacttggagatcagaagcaacgaatttatgcagatgggaaggagaatatagaagattctattcctatcgggtgggagaagccggtaaagaggatgaattatcgctgtgctaaacggataatccagttggctaacaatattggaaaggatattgatattcatgcagaacaaagaccgcgtgaagatgctaatgatggtttgattaggctttttgttatacaacaacgtgagggactaaataaagatgaaatagagcaaaatgtgatgaggattatgagtgagcaaacccaagatgcaaaatggacgaccataggtactgaagttaaagttctaacattggaacacatgatggctgcacgaaggttaggattttctcgtttttttgctccactttataaagtttcaaaatatcagatgacattcctccagggttctgtatcagaaatagaatttttcacaaaggaagtgctaccaattgcagaatctataaaagaagatggacgagttgctttagaaattttgaaaaaatactcgccattattaagcggacagaatacagaaaaaccatatgaactttatttgaaatgcagagaagaagcaataaaggttgctaatcttgtaaatgagaatggaactatccgtgtcgtggtagatgaaattataaaatctcaactattaacagtaccggatgttgtaagacaagcgtatatgttgagcccatcggacatagaagatacagtagaagaagaactacgtgcctgggtagaagtaatggatttaccaattaacatggtacgcagctatgatgattatgtgaaccaccgttcacaattcgatacacaccaaggggttaaaggtcttgaatttgatcgagtaatggttattatagatgattctgaaataaaaggattcttatttagctatgacaaactatttggtgttaaagatttatctaatgtagatttgaaaaataaagaaaatggtaaggaaacctccattgaacgaactcaaagattattttatgttacatgtactagagcaaagaactcattagctgttgtgatgtatacaaataatccagagagagtaaaaactgaaactatcagaaaaggctggtttgaagagaatgaaattattgtaatgtaa

SEQ ID NO: 80346 - DNA, 1758 bp, Streptococcus oralis
atggaatttaaaaaactagtaattgaaaattttcgtaattttagttctattgagattgatttgtcaaataaaaatgtaatatttggaatgaatgattcaggaaaaacaaatctcttattcgcaataagatacctcttggatagaactatcagaaataaaggtttcattaaatcagattatcataaacatgatactagtagacctataaaaatacaacttgaacttgatttgtctgatagaaaaatggagggagatgaagaactactaaaaacttcacattctcgccttctaatttcaacggtagctggagcaagaaataactctagcttagacacattctttatctcattagaagcagtttacaatgagaaagagttatttggaaatccggtattaagctggggttcaacactagataatttagttgaagtcccccaatatggtacaagaagtgacattgataaaatatttcaaatagtttatgtaaatcccgctatagagttagattccttttttaagcgaaatagaaggttattgttctctgatgattctaaaactggcgaggatgtaaagcttgaggaagagattgagaataatattgaaaagctaaatgagaatatttctaacttacatttaatcactcgtgttcaatcacagttgactgaagcctataaaagttatcgtaaagaaaatttagaaattaaaattcaatcagaaatatccatctcaggatatttagataatcttacgccatacattaactggaatgatgatactaacaattatccaacatcgggagacggtcgtaaaaaacttttatcatatgctattaatcatttgatttcagaaaaacaatatagcaacaaggtaataatttatttaattgaggaaccagagaatagcttacatcgttcagttcaaatttctctttcaaaacaactttttgttcagaatatttatgaatacttttttctaacaactcattcagccgaagttctttatgaaatggataatactcaactcattaagataaccaatcaacaagatgcaacggggcaatcagtctattacacagttcctgatgaattttcaaatttaaagaaaaaattaaataaatcattggcacagtcaatcttttatgataggattcttttggttgaaggtccatcagaatattatctattttctgctatttttgaatatataagtcccgatttcgagtctgatggaaaatacttattacaagttgatggaataaattttaaaccttattcagagctatatagagcattaggaattgatatttggattaaaactgataatgatttaaaagctagtcgtggtgataaacatgtgttttctcctattggtttgaataggtgtattgacttgcttgatcaaagtgtgactcctagattagataattatcgtatagatttctcttccaaagatgagagaaaacagaatataaagtctaaaaaagaagaactatattcgactaaccagagtctagtatctcaattaaatgcagagggaatatttatatcagaagttgatttagaaaatgacttggctcaggttttatccgatagcgagaggagtggaatgagtgaatttgattttgtaaattggttacaaagtagtaaacagtacaacatgttggaatatatagataattatcttactacagagattgcgcttaagattgtggagtcaggaaattttaaagttttggcggagttcttagactatgaatga

SEQ ID NO: 80347 - DNA, 1539 bp, Streptococcus oralis
atgaatgatattgttacacatgacgaggatgttaaaaaagaattattggaacaccaagggaatattttagttttagcgaacgcaggttcgggaaaaacaacttttttaactaaaaagcttaaaagtgattctgaacggttaaataattatcaaaaattagcagcaataacttttactcgaaatgcaacggaggaaataaagcaaaaattagttgatatttcggacaacgttgttgtatcgaccatcgattcgtttttagataaagaaataatccttccttttcttaatcagaaatacgaaattcaaacatctgtacagtttagctttcggatagaacataattttagccactatagcactggcataaaacaaatattgcaagatggtatttttgggacttacgactttcctacttctaaacacggcaagaatttcaaatgtgaagttgctttagatattttgaagacaatagattctgcgtcggaatatataaaatataaatttaatactttgtatattgatgaatttcaggattgcgaccagtctatgaatgatttatttctgtatctaaaaaatgagttagggattcctttatttattgtaggagatgataagcaatctatttatcagtggagaggagcgtcgcccaaatatataaacaatttatgggaaaccaaaaatgattttagaaaagagagatttattgggaattttagaagtctgcctagaatagtggatttctctttagctctgactcctgaagtgactgtcgataatattagagaagagggttcaattctatatttagaacctaatcaggattacttaaaagaagatgttattaagtaccttattgataatggggatataaatttacaagaaaaaaattattttttaattggaattaataaagatattgaagaaactgcgacacatttgaatgatattcttccaaataaagttgattacgttagaaaaaatccatttatagattgtactaacagtaattttttgcaatctatggctcaatattactttcttgaagacttttctgagtatgatgtattgaataatctttttcctgaatataacgatgaatttaggaaagaacttttaaaaaaattaaagaggcttcgtcaacgacctacacagtcacttgttgaagaaatagcttcgtatttagatgtttcacttacaatttatgaagataagttagaaagtcaaatactgctggaagttttaagtaattttgataataaaaaattatttgatacgggtttaatgagtaataatttattaatgactactcatggatcaaaaggtttagctgcagatactgtagtaatttttgtagaatatttgattgatcgcaaacaagggttaaaatttgaagatcattatgttgcgattactagagcaaaatcaaaggttattattattgataatcagacaatttatattgatgaaatcaatagattattaagcaacaataatgagaaattttcttttgaagattttatagaaagacggcatatatga

SEQ ID NO: 80348 - DNA, 1758 bp, Streptococcus oralis
atggaatttaaaaaactagtaattgaaaattttcgtaattttagttctattgagattgatttgtcaaataaaaatgtaatatttggaatgaatgattcaggaaaaacaaatctcttattcgcaataagatacctcttggatagaactatcagaaataagggtttcattaaatcagattatcataaacatgatactagtagacctataaaaatacaacttgaacttgatttgtctgatagaaaaatggagggagatgaagaactactaaaaacttcacattctcgccttctaatttcaacggtagctggagcaagaaataactctagcttagacacattctttatctcattagaagcagtttacaatgagaaagagttatttggaaatccggtattaagctggggttcaacactagataatttagttgaagtcccccaatatggtacaagaagtgacattgataaaatatttcaaatagtttatgtaaatcccgctatagagttagattctttttttaagcgaaatagaaggttattgttctctgatgattctaaaactgacgaggatgtaaagcttgaggaagagattgagaataatattgaaaagctaaatgagaatatttctaacttacatttaatcactcgtgttcaatcacagttgactgaagcctataaaagttatcgtaaagaaaatttagaaattaaaattcaatcagaaatatccatctcaggatatttagataatcttacgccatacattaactggaatgatgatactaacaattatccgacatcgggagacggtcgtaaaaaacttttatcatatgctattaatcatttgatttcagaaaaacaatatagcaacaaggtaataatttatttaattgaggaaccagagaatagcttacatcgttcagttcaaatttctctttcaaaacaactttttgttcagaatatttatgaatacttttttctaacaactcattcagccgaagttctttatgaaatggataatactcaactcattaagataaccaatcaacaaggtgcaacggggcaatcagtctattacacagttcctgatgaattttcaaatttaaagaaaaaattaaataaatcattggcacagtcaatcttttatgataggattcttttggtcgaaggtccatcagaatattatctattttctgctatttttgaatatgtaagtcccgattttgagtctgatggaaaatacttattacaagttgatggaataaattttaaaccttattcagagctatatagagcattagggatttatacttggattaaaactgataatgatttaaaagctagtcgtggtgataaacatatgttttctcctattggtttgaataggtgtattgacttgcttgatcaaagtgtgactcctagattagataattatcgtatagatttttcttccaaagatgagagaaaacagaatataaagtctaaaaaagaagaactatattcgaataaccggagtctagtatctcaattaaatgaagagggaatatttatatcagaagttgatttagaaaatgacttggctcaggttttatccgatagcgagaggagtgaaatgagtgaatttgattttgtaaattggttacaaagtagtaaacagtacaacatgttggaatatatagataattatcttactaatgaaattgcacataaaattgtgaagtcagattattttaaagtattatcggagtttttagattatgagtga

SEQ ID NO: 80349 - DNA, 1527 bp, Streptococcus oralis
atgagtgatattgctacacacgataagaatgttaaaaaagaattgttagaataccaaggaaatattttaattttagcgaacgtagattcaggaaaaacaacttttttaactgaaaagctaaaaagtgattcaaaaaagctagacaattatcaaaaattagcagcaataacgtttactcgaaatgcaacggaggaaataaagcagaaattagttgatattccggacaacgttgttgtatcgaccatcgattcgtttttagataaagaaataatccttccttttattaatcagaaatacgaaattcaaacatctgtacagtttagctttcggatagaacataaatttagccactatagcattggaataagacaaatattgcaagatggtattttcgggacttacgactttcctacttctcaacagggcaagaatttcaaatgtgaagttgctttagatattttgaagacaatagattctgcgtcggaatatataaaatataaatttaatactttgtatattgacgaatttcaggattgtgaccagtctatgaatgatttatttctgtatctaaaaaatgagttaggaatctatttatttattgtaggagatgataagcaatctatttatcagtggagaggtgcatcgcccaaatatataaataatttatggaaaaacaaaaatgattttagaaaagagagatttattgggaattttagaagtctgcctagaatagtggatttctctttagctctgactcctaaagtgattatagataatattagagaagagggttcaattctatatttagaacctaatcaggattatctaaaagaagatgttattaagtacttaattgataatggcgatataaatttacaagaagaaaattattttttaattggaaataataaagacattgaagaaactgtgacgaatttgaatgatatttttctaaataaatttgattgtgttagaaaaaatccattcatagaatgtactaacagcatttttttggaatgtatagctaaatattattttcttgatgacttttctgagtatgatgtattgaataatctttttcctgaatataacgatgaatttaggaaagaacttttaaaaaaattaaatagacttcgtcaacaacctacacagtcacttattgaggaaatagcttcgtatttagatgttttaattacaaattatgaagataagttagaaagtcaaatactgttggaaattttgagtaatttggataataaaaaattgtttgatacaaatttaatgagtaataatttaataatgactactcatggttcaaaaggcttagcagcagacactgtggtaatttttgtagaatatttgattgatcgatacaaacaagagttgaaatttgaagatcattatgttgcaattactagagcgaaatcaaaagtcattattattgacaaccagacaatttatactaatgaaattaatagattcttacgtagcaataatgggaaattttcttttgaagattttatataa

SEQ ID NO: 80350 - DNA, 2130 bp, Streptococcus oralis
atgagaattgataaaattactatcgagggatatagacgctttaataagagtgcaataaatttaaatcatggaaattttgctattttagcaggagctaacaatagtggaaaaacttctctgattcagttgctagacattatttttaataataaaacaagaaaatcagtgggttttaaagatttttctatcacattaaaatccctgttggataacagagtcaaggaattagatttttcctcagattttaatgacgaaaagttcattgaatttatagattatattaatgaacaaataaaaataaaagttcaatttgaattgtcctatgacttggaagaatcaattggtttatttgcaaactacctcatggatcttgatgatgataagtggaatttttattttgaatacaattataaactcaatgcagaggcaataaaagaagaatttgttaaacaagataccaaatcagctacaatacttcaagaaatcatagaacaaaatacagaaagtatttatttttatgctgataaggatttcaataataagaaaattattgaatataaagattttaaaaaattattccattttgaatatatatctgctgatagagaactagatgatgaaaatcttaaaaataaaaagataactacatcaattatttcatcatccgattctactaaccgtgattctgtatgggatagtaaatttaatgaattaaaaaataaaatagctaatgatttggctgaatcagaaattgattctagttttcaaaacgaaacacaaaatattttatctgacttaaaagatagtctagataatgtatcaaaaaatgaaattgaagctttagaagcgaaatttcattttaacgaaaagaacttattgaacttgattaaggatagtttattaattaattattcacatagtactgatgattttttgtttaatttaactgaagaatcccaaggtcttggtattagtaatttgatttatatgagtcttcaaattgatagatttagtagaactattcaaccaaatactgtaaatttatttgttatagaagaacctgaagcacatatgcatatacaaatgcagaaagtgctagttagttatattgaaacgatttttagtagcaaaaaaaatctacaggggattattacaactcattccactgaaattgtgaaaaatgtagatgttaatgatataaaggtaattcgttcagaaaaaaactttatgaatcgtattgttgatttacatcaatttattaacaataatggagaaaaagaattttatgaaacattctttaagctaaatttcgcagatttaattttttcagatgctgttattttttatgaaggagatgcagagcgaatgtattttgaaagtttgattaatagaaaaaattcaaagtacagtaatttagctcgtcaatatttaagttattgtcaatgtggtggtgcttatgcacataaatattttccactattaaatgaattgagaatgatggcctgtgtctttactgatattgattacgataaagaaagagaggaattagagggaatagatagtgataaatcttctaatacgactttaaattcaatattacctgctgacaataaagatgttgccggcatttatcaacaacaaagtcaagatagagaaaagaatatagaaatttttacccaaacagataaagatggatatgctagaacattagaagatgctttattatataaaatgatttctccaacagaggaaatagaaagtgtgtttgaaaaatttaacaaatcggagtgggacaaatttaatgaatcttttgaattgagactacctaaaattacttctggtaaagagtgtagcatgaagagagaggaaatatataatagattagatatatcaaaagaaaataggaaaattgactatctgagagataaccatcctgaagagtatgctgagtatgaggaattcaaagaaaattgtgaaccaaaacgttcaataagggatttagtttcaattattgataaaacaaatctaatgtactcaattatttttaaagataaagtaattgaagtgttgcctaattatatcgaggagggattaacgtggctcaacaacaaaataacttctacaatataa

SEQ ID NO: 80351 - DNA, 810 bp, Streptococcus oralis
ttgaaaatttattacaatgagcgtcagagttcttttgtgttagatggaggtttatctcatgacgatttattatacttttcatttaagttaatagaaagatttcctaaaattggttttaaattgcgtgaaatgtataattacattttcatagatgaagttcaagatacaagtacagaagttttgaggtttttttataattctgctaggggcagttcaacaaaagtatattttcttggggataaaatgcaagaaatttataacaaatatgatggttcatttgaaagtgaatttggtgaatttgatagtagcctctctcaaacctttaccacaaattatcgctcttctaaagaaatagttgatctgttaaatcatttatacttatctgtttctagggttccacagaactcttatataggtaaaaaaggtcaattacctcaattggtctctacagataatattgagacgtatttatctaataatagcgaagtttacaagaagttttataaattaagaactgttaatagtaagaggttcgataacattaataatagtgggaaatctgctgaagaaatctataaaaaatatcagaaaatataccctaataatggtcgtattagtgtaatggatgttctggttaacagtaactatgatgaaaatcctgatgagctaatgtcttttctaagtttgctatttcaagtattgagtgaatatcataataaaaattatggcgaaatgatacgactcttaaaaaatagtaaaaaaacttaccttttggtaaatctatttcagtttttgatagtagccttttga

SEQ ID NO: 80352 - DNA, 900 bp, Streptococcus infantis
atgaatcgtatagttgatttgcatcaatttattgttaataatggagataaaaaattttatgaaacattctttaaattgaatttcgcagatttaattttttcagatgctgttatcttttatgagggtgatgcggagagaatgtattttgaaagtttgattaataggaaacattcaaaatatatcaatttaactcgccaatatataagttattgtcaatgtggcggagatcacgcacataagtattttccactattaaatgaattgagaatgacggcctgtgtctttactgatattgattacgataaagatagagtaaatttatttaaaatagataaggataagtcttctaatacaactttaaattcgatatttcctgatagaaattgtaatgttggcagtatatatcaccaacagaaacaggataggaaaaagaatattgaaatttttactcaaacagacatagatgggtatgcaagaaccttggaagaagcaattttatataaacttttatgtaatttagtttaccatattactacttattctaatgtagatcaaagaaagttcaaatcaaaaatgattacagcatttgtgaataaaaaaagagtcaaaagaaatataaaatcaagaaaatacaatcaagcaaataagaataggaataaaggtgtatttataaaatatgggagagatttttggaaagatataaagattgaatcaaaattagatttttctatcccgactaaaaagggattagcaatcagcatcagagatgttgtaaatagtatggacaaaaccgacttcatgtattcaattatcatgaatggaaaagaagctgaaatactacctaattatatcgaggagggattattatggctcaacaacaaaataacttctacaaaataa

SEQ ID NO: 80353 - DNA, 1977 bp, Streptococcus infantis
atggctcaacaacaaaataacttctacaaaataaatgctcctgctggaagtggcaagacttactttattagtaagactattaacgatattcttaataatgaaccatttgttaaaattttgtgtattacctatactaatagagcctcccaagtaatgcaggaaagaattgtttctccaaacgttgaaatatcaactattcatagtttcttaaataagtttttaaagccattctttagaaatgagaaagttatagactattatcttgaaatttataaagaagaaattgagactacactcaaagaagaaacaaaattaaatagatataaagaaagatttcaagtagagggtgaagtttctgaggagacaataaaatcaaatttatatgaaatttattataatgaacgacaatactcatccgtgttaaatggtggtttatctcatgatgatttattgaacttttcatttaaattaatagatagatttcctaaaattgggtttaagttacgtgagatgtatgattatattttcattgatgaggttcaagatacaaatgcagttattttgagatttttttataattcggctaaagatagttcaacaaatgtttattttcttggagacaagatgcaagaaatttataataaatatgatggttcgtttgaaactgaatttagagaatttgatggtaatctctcaaaaacctttaccaccaattaccgatcctctgaagaaatagttgatttattaaataatttataccaatcttcttctagagtaaaacaagtcgcctacaaaggcaaaaaaggtcaattccctcaattagtcttcacagataacattgaaaaatatttatttgataatagagaggcttatgaagagttttataaattaagaacaattaataaaaaaaggtttcaaaacatcaataatagtgggaagtctgctgaagaaatctatacaatatatcagaaaatataccctaataatggtcgtgttagtgtaatggatgttttgacaaacagcaactatgatgaaaatcctgatgtgctaatgtcttttttaagtttgctatttcaggtattgaatgaatataaaaataaaaattatggtgaagtgattcgtatcttaaagaatagcaaaagaaacttatcttttggtaaatttatttcagtttttaataaccatcttttgaaaattgaacttcatgaggataagttaaaactgaaagaaaaaatgaatttctttatcgaattattagaatctgattcttcgctagaaaccgtacttcaggaattagttaatgagaaaattatcagtagtgatttctataaatttatatcctcatatgaaagaaatggctcttttctctatactgatttattctcttcatcaattgaattatttaaattgattgatgaatataatagaaaccctatggtgtcaacacaacatggagttaagggagaagggcataaaaagatactacttgtagctgaggattcaagtaacccaggtattaagatatatgagtttctaaacctatttacacgtttttatactcaaaatatttcatttaatttcgataggtttcaacagttttattatgattttaatcgtgatattttatcactagaagaaaaactaggaaaaaaaattaaggaaattaaagcagcagatagagaacgatactttagtgattttcaagagatttttaataagtatctagataatgattattttaaatttatttgtttaaaagaaaataaacttaactttcaaaagaaaacagcaataaagaagatacaagaaaatatttttaataataatttagttagatcagtcttaacagcttacaaacttttttatgttgggtgttctcgagctgaagaagaattagttgtattgattaatgcaaatcaaattgacaatatggaggaatttaagaattatttcaaacaaattggttttcagatatag

SEQ ID NO: 80354 - DNA, 2046 bp, Clostridium perfringens
atgagattaaaaaaaattaaaatttacaactttagatcgtttggagaagaaaaaataatagagtttgatgagatgacaacatttataggaaataatagtagtggcaaaacctcagcattagtagctttacaaaaaatgtttggtaatactattgcagaaagaagtttaactagagctgattttcatttaaataaggatgaaaaaattgaaggagtggaacaaaaagaattatatatagaagctgtttttgagttcccagagcttaaggaagatactaatataagcaattcgattccaattatatttagacaattaactatagacgatgaaggagaattaccatacttaagaattagattggaggcaacctggaataagaacaatacggtagaagggagcatagattcaagtatttattatataaaacaatctgaaaatgaaaaaatagaaggtaaaaacaagacactagcgaaaaataaagacttacaaagaataaatttaatttatattccagctataaggcatccagaatctcaattgagaaatgcatctaattcaatattatatagagttttatctagtataaattggactaatactgtaaaagaaagcatagcacaaaaaagtagtgaatttgaagatgaattcgacaaagaaactggggttagacttttgaaaactgctattacaaaagaatggacaaattatcacaatgatacaagatataataaagctgaattaaagttcaataatcctaatattgaaacaattctaaaaaaggtaaatattgaatttgctccaacagttacaggacgaccttataatgttgatgaattaggtgatggattaaaatcattattttatatatcactagtaaattcattattaacattagaagagaaaatagttgaagaaaatgatatggatattgaacataaaagttttagaataattccacctatatgtactatattagcattagaggagcccgagaatcatatagcaccacaattattaggtaagataatgaataatgtaaaaaatatttcaagtaaaaataattgtcaagctatagttagttcacattctacttcaattgttagtagagttaatccagaaaatataaggcattttagaataaacaaacttaatttgaatactgatgtaaaaagtttagaattacctccagatgaaggtaaaacagaagaaatatataaatatataaaaaacggtattatggcttatccagaattatattttgcgaatttagttattttaggtgaaggtgatagtgaagaaatactattacctaaaatgatagaaataggcgatgaaaatattgattctaaatcaatagctatcgttccgttaggaggaagacatgtaaatcatttctggaaattattaaatcaattaaatattccttttataactttgttagatttggacagagaaagatatcttggtggatggggaagaattaaatatgtatgtgaacagcttatagaattaggcaaattagaaaaaaaacaactggaagaaagtgaggatattacttttcttaaagattttgaagaaatgcataattgggatgtaaacaatattgatgagatgaagagatggataaaatttctagaagaatatgatgtatatttttcatcgccattagatatagattttttgatgataaaagaatttgaagaagaatatttaagtatattagaagaaaatgaaggaccgagaataaaagggcttggtaaaataaaagatttaacaaaagaggataaagagaaagatgagtatttgaagagaatagaggaagataagaaatctacattaaaggaaaaatgtacaaatggtgatacgttttctaaaaaagaaattgaattaatgatatggtataaatatttctttttaacaagaggaaagccaactactcatagagtagccttaataaaaatagaagatgaaaagttacaagctaatatgcctaaagtgtttagagatatacgattaaaagtaaatgagaaattaaaaaataattaa

SEQ ID NO: 80355 - DNA, 1899 bp, Clostridium perfringens
atgtttaatattatagatagaaataaatgggaaccggtagatggaattatattagaagaaaatgctttagaagttgttaaaagtaatagaaatatgctagtagtagctgggcctggagctggaaaaagtgagcttttagcacaaagggcatgttatttattacaaactaatgaatgcaaagagcctaatagaatattagctcttagttttaaaaaagacgcggcatcaaacattagtgaaagagtagtaaagcgttgtggagaagaattaggggaaagatttgactcaatgacatttgatgctttttcaagggctttagttgatcaatttttaaatgctatacctaaagaatatagaccaaaaaggaattatgaattaataacaactgataaagaaatggtagaaatattgaaaaataataaaaaaattaatttaatagatgataaaaaatattttcacattgtaaagaagttgactgaatatgaattgccatttgagaaatcacaaaatgaaattaaagaattgtgggattatatattaggaaacaatgaagaagaaatatgttatttaacatttaagatgattggacgattagcagaatatctaataagaaaaaatcctataataaaaaaagttttaaatatgacgtattcacacttgttcttagatgaatatcaggatacaacttcaatgcaatacaaattgttgaaaagttgtttttataatacagatatagttattacagcagttggagatgacaaacaaagaataatggtgtgggctggagcacttaaagatgcttttaataggtataaatgcgactttgatgcaatagaaactatgttagtaatgaatcatagaagtgcaccaagattattaactttacaaaaatctatatataaagagttcttttataaagatagtatacaagactgcactataaaaaataacccaaagtgggatgatgaagctggggaagcgtatgttcatatttttcctaatgataaaattgaagcaatagaaatatcagctcaaataaacaagcttatagaaagtggatataataaaagagaaatatgtattttagtcaagcaaacaccagataaatattgcaaagatattatagagaatttagagaaaaatcataatataatagcaagaaatgaaatgatatttcaagagattttaaaagaggatttaataaatatattaaatgatattatagctatattaattaataagaaatcaccagaggaatggagtagatttatagatttaattatggaatttaatgaatgttcattaacagatatttatgaaattagattattagaagatagtattttaaaaaatattttaaaatttaaagaagttttattaaaagtttctagtgaggaagaattatataaatttataaatgatatattagaatttataggtatagaaaaattaaagggaaagtatgataattataaaaatgaaagtacttttagatattatataaatacatactgtgatttattatggagagaatatataaaatgtaagaagtggaataaggctatagaaaatttaaaaggtgaaaactctattccaataatgacaatacataaaagtaaagggttagaatatgatgtggtattttttattggtttagaagatggagcattttggagttttgaaaaccaaaaagatgaagatttttgtacattttttgtagctttatctagagctaaaaaaagagtagattttaccttttcaaagattagaaaatatactagaaactatcaagagaatagagtgaaaataaaggaattttatgagatattggagaaatctggagttgttgattcgaaattatatgatgattcaaaaaattatgaattattattaatttaa

SEQ ID NO: 80356 - DNA, 2121 bp, Sphingobium sp. 22B; identical to SEQ ID NO: 80182

SEQ ID NO: 80357 - DNA, 1716 bp, Sphingobium sp. 22B; identical to SEQ ID NO: 80183

SEQ ID NO: 80358 - DNA, 1684 bp, Bacteroides fragilis
atgtatatatcgaaggtatcattagtgaattatcgcaattttgagaactcatttttcctttttaataaaggaataaatactataattggagaaaatgcatctggtaaaactaatttatttagggctattcgtcttatattggatgataacctattatcttctgcatacaaacttaatgaaaacgatttcaatagaaatttgataaattggaaaggaagatggattataataagtttggaattcagtgaaatatcaaatgaagaagctatccaagctttattcgtttatggaagtggagtcatagcagatgataaagttaaaaaggctacttataatttattctttaggcctaagcctgaaatcagaaaacaactttcagaattaaaagaaggagatcatgatggattaaattttattttagataaaattactatcaatgattatgagactttttttacagggaagagtactgttgattttaatgataaaaatgtacaacgtgaattgatgggagactttgaaaatgtaattttcaattatgaaatagatgaatcaaagtttggaggtcgtattcctcatcagttatctataagcaaagaggttgcatttactttcattaaggcattgcgagatgttgtgtccgattttcaagataataagaagaatcctttattgacacttctaaaaagtaaaagtgaagagttaaatgataaagattcagagttaatctcaaataaagtaaaagatttaaatagaacaatagaagatttaaatgatattaaggaaattactaataatatttccgaaacaataaaagaggcagttggtactacgtactctccttcttcattgtctataaaatcaaatcttccaaacgaggccgaaaaattatttcatgcattaaaattgtttataggagaaccgggagaggattatgaaggtagtattcatgaattaagtttaggtggggcaaatttaatattcctaacattgaaacttcttgagtataaatatagaaaaggaaaagatcgcattgcaaactttcttctaatagaagagcctgaagcacatatccatacacatatacagaaggctttatttgataaaatagaatacgaagatacacagattatttattcaacgcattctactcatatttcggaggtttcaaatatctcaaatatgaatattataaataggtttaagaattattctgaagtttatcaaccatttataggcctaaatgatgaagaaataatgcatatagaaaggtttttagatgccataaggtgtaatatactatttgcaaaaagtgtaatcttagtagaaggagatgctgaagaaattctaattccagtaatggtgaagaatactttaggagttagtttagacgaacttgggataagtttaatcaatgttagaagtactggatttgaaaatcttgcacagttatttcataatcagagaataaagaaaagatgtgctattattacggatttagatgaatctataacaggaaaagatacagaggcctcaaaaagaggtttaagtagaaaagcaaaattagattcaattaaaaatgcaaatgaatggatatgtccattttatgcaccacatacttttgaggtagaatttcttggaaatggtaataaagatatagtcttatcaacagttaaagatgttt

SEQ ID NO: 80359 - DNA, 1779 bp, Bacteroides fragilis; identical to SEQ ID NO: 71891

SEQ ID NO: 80360 - DNA, 1684 bp, Bacteroides cellulosilyticus; identical to SEQ ID NO: 80358

SEQ ID NO: 80361 - DNA, 1779 bp, Bacteroides cellulosilyticus; identical to SEQ ID NO: 71891

SEQ ID NO: 80362 - DNA, 1914 bp, Gluconobacter oxydans
ttgcagatcaaacgtgtcactatagcgaatttccggtcgatcaagcgggccgagatagagcttggggcgacgaccgtgctgatcggcccgaacaacgcgggcaaaacggccattctcgaagccatccgcattgccctgacgcgccggtggggacagcgcggcaccggatttaccgagtacgacgtgcatctgtgcgcggcacgcaccgaccccaaggtcggcgacccggtcgtcatagaaatcgaaattcaagagtcggtggtcgccgagtggcccgaggagctacacgaaacactggccgacatcatccagctcaatcccatgtccgggcaggcttcgatcatcatgcgcgtgagttgcgcatgggacgacggagaacaaagctacattcccaaatgggaatttctcaacaccgaccgcaacccgctggctggaaagggcgcacgggcaacgaactttcaggagtttttttcgttcttgcccgtcttctatctcgacgcactgcgcgacgctggcgacgaatttgccccgcgcagccagttctggggacgattgctccggaccgttcaaatccccgaactgcttgagcaaaagtcggttcgcattttcaatctcttgaacgccaagttgcttgccgccgacccgttgctgggcgatttggcaacctcgctctccgacatcagccgcgtggcgacaacgggcacgcccgggcaggcgaaccttcgcgtgctgccgttgaacacatgggatttattgtcgaaggcagaggtcatttatcaaaatgacgggacgaagccgtggctgccgctcatgcggcacgggcaaggcgtacaaagcctgtccgtgatgttcctgttccgctcgttcgtcgagctgttgcttggtgagctttatcgcgccgagagcacccccgtgctggccttggaggagccggaaacccacctacatccacaagccgcccgcacactttttggccacgtcgcgcagcttcagggccagaaaattatctcgacgcactctccttatttccttcagcatgtgccgtttcgcgacctgcgtgtggtccgcgctggcccggacggcacgatcattaaatcgctgccgcgcgagtttcgctgccgggtaccgaatctgcctacttttgcgcccgtcatagccgcatccggcgggctcctcgaatatgacggcggcctgtccgagctggtcattaaaggcagcttggcgatgcccacctacaaaaaattgctcggcgcctgtcaggggcaggccgaaatggctgcaatccacgcccgattgaaggcggcgcgagacgcatcgctcgaatttatacccgatgaggatttgcagaagctcgaaacctttgcgcgaagaatacgaggcgagatattcttcgccaacaagtggctattggtggaggggcaatccgagtatcatttggtccacggcatggccaaggcgatgaatttcgatctggacgagcatggcgttgccgtgatcgattttgccaataatggcaactgcggcatgtttactgcgctggcgcgggcgctcggatttccttggactatgatcgtcgatggcgacttggctggcaatcaatacatagggtctgtccaagcgcgcaatttcacacccgccgaagtggcgcagctcacacatcagatcgccgggcagacactggagcatcagctcgtcgccgatggcctgcaaccggaactgaaagctatcctgatcaaccaaggtatgcccggggtcgcagcgatggacgacgcggcgctgatcgccacattgtcaagcgacaaatgcggctatgccgccgaactggcggcgcaatgcgcgaccagcttgccgctgacccagcggatgccattggctatccgggaagcgatcgagactctcagagggctgccatga

SEQ ID NO: 80363 - DNA, 1908 bp, Gluconobacter oxydans; identical to SEQ ID NO: 74283

SEQ ID NO: 80364 - DNA, 2043 bp, Gluconobacter oxydans
atcaagcttgcaagcattcgggtcgaagggttccggctacttgagaatattgaaatcacgattgagcagagcgctaccgtgattgtcggccgaaacaacagcggcaaaacttccctcaccgagatttttgagaaattcttgggggaccccgcaggccagttttgcctagaggatttctccgcgacgatccggccgcagttcataacggcaaaggcgctgcgcgatgccgatgcgccggcggaagaggtgctggctgctctgcccaagatagcgctacagcttaccttctgctatgcgccagacgcagcggatttcggccccctgtcgcccttcatcatcgacctcaatccgaactgtacaacggccctggcgcgggtcgagtatgcagcttcgctgaatagcctcaccgggctgctcgaggtgcctctgcccgaagctggtgttgatgcgaaccacgcactgttccgccacctgcgcaatacgattgctggcagttacgtaatcaagctgacggcgatcgacccgacggatgcttcgaactggcgtgagttcgataagctcgccccgctgctcgctctgatccagacggggtacgtaaaggcgcagcgcacgctcgatgtgagcaagcgtggggataccgacgtaatcggcaagatcctcagtaagctgttccgcaccgcgaacgctctcggggcttccgagcaggatcaggctatcgccaatcagcttaaagcctcggtcgcgcaactcgagcagtcgatgcagggcgatttcgacgagaagcttgagggcctgcttccagccctcaattcctttggctttccgagccttaacgatactcagctccggccgcagacgaccattaacgttgaggacgtcctgaaggagaacaccaggatcctctataccggtgcggatggagtacacctgcccgaaggctataatggcctaggtacccgaaatctaatctatatcttgctccagctggaagctctacataaggcttatcgtggtgcggtcacgcgtcccgggacgcatctcgtctttatcgaggagcctgaggcccacctccatccgcaaatgcaggaagtcttcatcgcccaacttaacgaggcgatcgcgaccctgtcccagcaatatccagaggagctcgtctggcaggtccagtttatcgtctcgacccactcttcgcacctcgccaatgcggcgcagtttggcgcgatcagatatttcctgaacgagcaaaccgcaatcgaaggtgttcgacgcacgcaggtgaaggacttccgaaagggtgcagagaaaatccgacacgaggatcaggccttccttcagcagtatatgacgctgaccaagtgcgatctgtatttcgcggacaaggcgattttggtcgagggcgccactgagcgaatccttatgccgcgcatcgtcaagttggttgatgccgagctcgaggttcaggacaagctcgcgcgtcaatacatcacgaccatggaagtcggcggcgcctatgctcagatcttctatcccctactgagttttctcgagctgaagacgctgatcatcaccgatctcgatgccgtgaagctggtcggtgagaagtacaaaaaatgtccctgctgcgaaggagagcgcacctcgaacagtgcgatcaaggcttggttcaaggacaacgcaatttccatcgagacgctgcagggcaagacagaagcacaaaagaccaagggcttcgtgcgcatcgcctatcagacgccggaagatggttcggaacattgcgcccgcagctatgaggatgcattcgtcctcgcaaatctcgaactattcggcatcctggacgacgccgacgcagcaacctgtgcctgggacactgccaagggattcggtaaatccgagcaggcgatcaaatacgcgatcatggaagaggattggaacgttccaaggtacatcaaggaaggactgcgctggctttctgagccgtcgccgccgcccgaagcagcgacggcgatggtgcctggcgatgacgctgaagcaggtgtcgcatga

SEQ ID NO: 80365 - DNA, 1743 bp, Gluconobacter oxydans
atgaacaagccgaaatcccctgcactcatcgctgcggaggccgcgcaggccaagcttgacgcgtgcctcgatgcgcaggccaattttcgcctcgaagccggcgccggcgccggcaagacctattcgctcgtcgctgcgctaaagaagatcattgcggaaaaggggtatgcgctcatgcatgccggccagcaggtcgcgtgcatcacctataccgaggtggcgcgcaaagagattgcgaacgacatcgaggagcgcccggccatcttggtgaacaccatccacgggtttggctgggcgtttatttcccggttccagaaagcgttgcgacagctcgtcctcgatactgccgacgaaaagcgccagaaactgatcgacgaagccggtggcatccacgatcagcgcgtggactatagtttcggcttcttcggcgtcgatgaggcgcggatcacgctccatcacgacgacgtgcccgcttacctagcagccctactgggcaatccgaagttccagcggatcttcgcgagtctgtacccggtcctcttcatcgacgagtatcaggataccgatccgttggtgatggacgctctttcagaccatttcttcgaaccgagggttggcccgatcaccggcctgttcggcgatcattggcagacgatctaccgcaaagactatgagttgacggcgttcccccatgtcgaaggaatcgacaagggctcgaacttccggtcggtgcaggtcatcgtcgatgtcctaaatcgcctgcgtccggagctaatgcaggaggttgacgatcccgacgtagctggagaagcgcgcttcttccattgcaattcgttcgcgggcgagcgggtcgacaggccgcacgcgaggcgagagctccccgataccgtgcttgccgacgccatcgcgcgcaccaagcaaacgctgagcgatgacggctggaatttcgagcccgccacgaccaaaatcctgatgctgacgcacaacgtgatcgccgcagagcgcggataccggacccttgccagcatctacgatcacaaggatgccctggtgaagaaggaggacgcggtaattgcattccttgtcgatatgatcgggccggtgtgcgatgcctatgcggctggcaaacatggggcgatgtttgcgctcatgggagggatccccacgatccggaaagccgcggacaaagcgagttggcgccaagatatggagcaattggccgagctttgcgtgaatggctcgattggccaggttctagatcatctgaaggaaacccggcggccacgcctaccggaccgcgttgcggcgcatgaggaggacattgcacgtcttggtcccgaggtgacagaggacgagcccaattcgctcaagcgatatcgccagcttcgggaggtggcgttcagtgagattgtcgcactttcccagttcatcaacgggttcacgccgttcgcgacccagcacagcgttaaaggagccgaatttgacgatgtgcttgtaatcttgagtggtggctggaaccactataactggccgaaattccttgagctgtgcgaagcggagaacatcgcggccaaagacaagggtggcttctaccgtgcccgtaatctcttttatgtcgctatctcgcgtcctaagaggcggctggctgtgcttgctacccaagccttgagcgctaccgcgatggcaacggtcgagaagctctttctcgcagagaatatcgtcgccgtgccgcttggtgaatga

SEQ ID NO: 80366 - DNA, 2136 bp, Gluconobacter japonicus
gtgcacatttctaaactacagatcgtcaactatcgcaacttcaagcgcgcgaatgtggtgtttaacaagggcgtcaacacgatcatcggcgagaacggttcgggcaagacgaacctgtttcgtgcgatccgcctactgctggacgacaacctgctccggatggcctacaagcttgacgatcaagacttccatcgcggcctggacgactggcgcggtcactggatcatcatcagcctagaattcgacgaggtgtccaaggacgaggccatccaggccctcttcctgcacagcactggcgtcattgaggctgatacggtcgagcgggccacctacaatttgatcttccgcccgaaagtcgcggtcaggacgaagctcggtcaactggaggcaggcgacaaggagggcctcgccttgatccgtaaggacatcactatcgccgactacgaatcggtcttttccggtaggagccccgccgacctctgcgatccttcgatctatcggaaaattgtcggcgatttcgacaccgttgagtttccggacgaactgaagccgccggaaatcgggattgaaatccggtcgatgctgtcgctcgcgaaggaggtgagcttcaccttcgttcaggcgcttcgcgatgtcgtatccgacttccagaaccaacgtactaacccgctgctaacgttgctcaagcgcaagagcggcgagatcgatccagcgacatccggcccgatcagcaagatggtgagcgagttgaacgataccatcggagatctcgacgaggtcaagacgatccggtcggagatcagcgaaaccatccttcatgcggccggcgagacgtattcgcctcgatctctggcgatcaagtccgaactgcccgaagaggcggaacacctcttccagtcgctgaaactcttcgtgggggaagccgaggaaggctatcagggcgcgatccacgagcttagcctcggtggtgctaacctgatctacctgtccctcaagctgctggagttcaaataccggaagcagaacgagtcctttgccagctttctggtgatcgaggaacctgaagcgcacatccacacccatatccagaagaccctgttcgaccggctcaacttcgccgaaacccagatcatctattcgacgcactcgacccaaatctccgagattagcaacatcgctaacatcaacatcatcgcgagggacggaggagtctgcgaagttttccagcccgcagtcggcctcaatcctaaccagatcggaaatgtccagcgctatctcgatgcgatcagaagcaatctgctcttcgccaagcgggtcatcttggtcgagggcgatgccgaggagatcctgatccccatcctggtcaagcaggtgctcgggcttagcctcgacgagctgggtatcagccttatcaacatccgtagcacaggcttcgagaacgtcgcgatcctattccatgatctgcgtatccgaaagcattgcgccatcatcaccgatcatgatttggcgttcatctccaccgcgccggacgatggcgatagtaagcgggtcatcaaggcgaaggagaaggccatcgcctcccagaaggcaggtgaggaacgcaaactccgacttgaacacttctgtcagaacaaccggtggttgagccttcatcttgcatacaacacgttcgaggtcgactttatgaaggccgggaacggggataccgtgaagccagtcatcaaggacgtgtatgtcagacccaccgagatcgccaaggccgaggcagatatagcctcatcagatatcgcccagtttggaacacgcatgctcaagatggccgacaaggtcggaaagggctggtttgctattctactcgggaaatgggtgacgccggacacggcgatcccaggctacattctgcgcgcccttctccctaacccatcaagcctaagccgggcggcttgggcgaatgttctcgattatcgactagagcatatcgagcaggttggcctcaactgggaggacgacttggagcatatgcgccaggtggtcgatgggttcgtcagcaagaagctgaacttcgatgatctccgtgcggctatgtgcgctcactttccgaccgatcggttcagcgaatttctggtgaatttctga

SEQ ID NO: 80367 - DNA, 1794 bp, Gluconobacter japonicus
atgttcatctggggcaagaacgagctgaacgaagcacaagaaaaggcgattgaggagcccgggagcgtgttcctcgtggcctgtccaggcagcggcaagacccgcacactaacgtacaagatcgcgcgcctgctttccgaacttcagtctgaaaagaagcgcgtggtagcgatcacctataccaaccgtgcagcagacgagatccacgagcggatcgagcaactcggcgtcgatacgagccagctatggatcggaaccatccacgcgttctgcctagagtggatactcaagccctacgcagtctaccatcccgcactgaaaaacggcttccgcgtcgtcaatggtcacgagtctgaagaaattctggaagagctctgcacgcagatgcgaaatccaacaatcacatttcgtgactgcggctattttttcacgacttccaaagtcagaatcaactgccatgatgacaagaaagagaacgtaaaagcggcactcaggaaatattggtactatcttaaagcaaaccgcaagatcgattttgaattcatcctatactactcgtttcagcttatccgcgacaatcttccgatttcgaccattctgggatcgatattctccagtatcctggtcgacgagttccaggacacccgcgagactcaatacagcattctagctgcgatcctgaaggccgcgaaaggacaggcgatcgcattcatcgtcggagatcccaaccaggcgatatacggctcgatcggcggctatgcgatttccgccgaggaatttggtcgccagtgcaacctgagtttcagggaaatgaatctctccgacaactatcgatcctcgtcgcgcatcgttgactacttcggaaactacaacgtcctatcggcgaaatgcgtcgccgtcggcaaggtgacgcgctttcccagtgtcatcacctatgacacggaaacccatcgcgatgaactggaagccgagctgatcaggttgatccgatataacgtcgaggagacgaatatcccgccgcacgaggtttgcatcgtcgcgccatggtggattcacctcgcgggcatgacacgcaggcttgccgttgcgcttccaaactattccttcaacgggcccggtatggttccattcgcgcgggacatcgacaacttctgctacaagctcgcccgcatcgtcctcacgcaggcaacaccaagccttttcgtgcgacgtatgcgttgggcgggcgaggtgatcgcggccctgagcgaggccgacgtcaacgtcggcgaccttgatcgcaagaccttgctgcgcgagtgcaactccatcgagatcgacgagaccgatggcctgacctatctccggatgtttttcgaggaggtgttgttgaagcttggtgtcgactggcggaacaacactaacatcagggtgcatcacgacagctttttcgagagctcgcagcgcaggatcgcacggattgtcgaagaagggtctgaagccatcgccgagaccgcagcgttccggcgagtgttcgccgaaaaaagcggcatcacaatttccaccatccacggcgtcaaaggcgcagaatacgacgccgtcattgcctacggcctgctcgaaggacttgttccgttctatagcgacagagacaaggccgcgatggcaaggaagctgctctatgtcgttgcttcgcgagcccggaaaaacctgcacctgatttccgagcggggtaggacgaagcgttggggtgatgcgtatctaccgaccgaagtgctctcggcctgcagcttcgcctatgacgctacagcttga

SEQ ID NO: 80368 - DNA, 691 bp, Gluconobacter thailandicus
tcacggtgaatccccacaagccctagttgagggtaccacagaacgcatccttatgccccggatttgccgcctcgtggatgaaggcctgcccgatggtcagaagctcacccgccaatatgtaagcacggtagaggtcagcggcgcttacgccagcaagttctatcctttgctcgatttcctcgaattgaagtccctcgtcatcaccgacctagatgcgctctttctcgacgaggcgaagaagccagcgcggtggaagaagtgcccgacggccaaaggaaatcgttccggtaatgcagcgctgcgtgcttggtacaaagtcaagcagggggaggccttattacttgcagacctcgccgcgaagcaggatcctgacaagattagcggctattgccgcatcgcctatcaaatccccgagcccggatcggcgcattgcgcccggagctatgaagatgcactgatccttgcgaaccctcggctttttgagctgaccgaggaggaccgtgccaatgatgcatgggacaaggcgcaggaacttcacaagaccgacacagccctcgatttcgcgatccgcgaggaggcctgggtcgtcccacactacattcgcgaagggctaatctggttatctcaaccgccgcctcctccgactgaaccaccagccattgatgctggcgcggaacagcctgctgcatga

SEQ ID NO: 80369 - DNA, 1441 bp, Gluconobacter thailandicus
atgaaccacgtgccacaaagcccagccgagatagctgcagcccaggcccagcagcgtgtaaatggacgcctcgatgcaggtggccactttcggctcgaagcaggcgcaggcgcaggtaaaacctattcgttggtcaaagcactgaagcgccttatctccacgcaaggcgcttcgctatttcagcgcggccagcgggttgcatgcatcacgttcacggaagtagcccgagacgagatcgctcgggacatcgagatgcatcccgcgatcctcgttgagaccattcacgctttttcatgggccttcatgatgccgtttcagtcagctcttcgagagttggtaggctcaatcgacaaccgtcaggaaaagattgaagccggaggcggcatcggcacaaagtctgtgacttacgaccttggctttttcggtgtcgatgaacaccgcgtcacccttagccatgacgatataccgaacttcatggctcgtctgctggagcgcccgaaattccgcgcgatgctgaatcaggcgttccccgtcatattcatcgacgagtaccaggacaccgacccgcacttcatggcggcgctaacaacccacctgttcactccatcggctaaaccgcagatcggcctttttggcgaccactggcagaccatttaccgaaacgaatacatgctcgcggatttcccgaacgtccaggaaatagggaagcagtcgaattttcggtccgcccctgcgatcgtcgatgtgctcaaccggcttcgcccggatttaccccagcatgtaagcgaccccgaagcctacggagaagcccgtttctttcacgtgaacgcctatgcaggcgtacggaccaatacgggtcattcgaaagcagacctgccagacgcggtgaaggcgtcagtgacggaggccctaaaggagcgactgattgcagaaggatgggactttgcgccggaaaaaacaaaggtgttgatgctcacgcataacgcccttgccgcgcagcagggatatccgactattgcggcgatctttgatcgcaacgaagctttcgcaaaaaaggaagaccctaccatcgcatttctcgcggatactcttgaaccaatgatacgcgcatacgctggcggccacttcggtgagatgttccgcatgctcggcggcaaaccatcacttagctgccacgcgaacaaagtcgaatggcgcactgatatggaccgtctcaatgagctacgagccaacggcaccctcggcgacgtgctcgattatctgaaggaaacgcagcgcccacgcctgccagataaagtggctttgcgtgagaacaatatccatcaacttggaacagaggtcttggaaggcgaagagaagtacatcacccggcaccgtaaacttcgagcagtaccgtacagcgaggtcgttgaattagggcttgtggggattcaccgtgaat

SEQ ID NO: 80370 - DNA, 2136 bp, Gluconobacter japonicus; identical to SEQ ID NO: 80366

SEQ ID NO: 80371 - DNA, 1794 bp, Gluconobacter japonicus; identical to SEQ ID NO: 80367

SEQ ID NO: 80372 - DNA, 2136 bp, Acetobacter orleanensis
atgcacatttcgaaactgcagctggtcaattaccgaaacttcgcccgcgccacggtgaagttcgaaaagggcgtgaatacgatcatcggcgagaacggatcgggcaagacaaacctgttccgcgcgatccgcctgctgctcgacgacaatttgctgcgcatggcgcaccgtctcgatgatcgggacttccatcgcggcctcggtgaatggcgcggtcactggatcatcatcagtctcgaattcaccgatgtctcgcaggacgagacgatccaatcgctgttccttcatggtgtcggcaccatcacaggtgcaacgatcgacaaagcgacctataatctgatctttcgcccaaaggctgcgatccggcagagactgtcgcagctggcggccggggacgaaacggccctttccgagcttcgcagggagatcagccttgccgattacgagaccgtcttcaccggcaagagcagcgccgattttaccgacccggcggtttatcaggcgctcgtcggggacttcgatgccgtgaccttcccggatgaactcaccccggccgagatcggcaacatcgtccccggcatgttttcgatcgctcgcgagatcgggttcacctttattcaggcgcttcgcgacgtcgtcgccgaattccagaacaatcgcactaatccgctgctgaccttgctcaagggcaagagcggcgagatcgaccccgcgaagtttgctcccatcagcggactggtgacagacctgaataccgcgatcgaaggcctcgacgatgtccgcgcgatccggaccgacatccgcgacacgatcaccgacgccgccggcgaaacctattcgcccaaatcgctctcgataaaatctgacctgtccgacgaagccgaccggctgttccagtccctaaagctgttcgtcggggaagccgaggcaggctatgagggcggcatccacgaactcagcctcggcggcgcgaacctcatctacctcacgcttaagctgctcgaattcaaatatcagaaggtcaagcagacattcgccaatttcctcgtcgtcgaggaacccgaggcgcacatccacacgcatatccagaagactctcttcgaccgtctgaactacgacgatacccagatcatctactcgacgcactcgacctatatttctgaagtcagtaatgtcgagaacatcaacattctcgggcgtgatggcggggtctgcgaggtctaccagcctgccgccggcctcgaccccaagcagatcggcaatatccagcgctatctcgacgccgtgcgcagcaacctgctgtttgccaagagtgtgttgctggtcgagggagatgccgaggaaatcctcatccccatcctcatcaaacaagtattcggcctcagtctcgacgagctcgggatcagcctgatcaatatccgcagcaccggcttcgagaatgtcgcgatcctgttccatgaccagcgcatccgcaagaattgcgcgatcatcaccgacctcgatcaggcctttatcgatctcacgacgaatccggctgacacccctgcgcagaagaaggcgaaggacaaggccactggatcgcagacgtcaggcgccgcccgagccgggcgattgaacactttatgcaccgggaacagctggctgagcacgcatctcgcgcactatacgtttgaagtcgattttattcgtgccggtaatgctgccgccgtggtctcgatcctgggcgaagtttatagcgatggcgcgacgatcgcgctggccaagaccgagctggaatccggcgatatcgtgcaatatggcacgcgcgtcctgaccatggcgaaacatgtcgggaagggctggttcgcgatcattctcggcaaggcgatcacacctgatgtccacatcccggactatattctcgacgccttgttcatggtgcatcggccggtctccgacgagatcctcgccagcatcatcgaccatcgcctcaaggttcagttgaagaccgtcggcgttcttcctgcacaggtagcggcgatgcgcgtctatctcgatctgttccggtcaggcgacatcgattttccgttcgtgcgaaccgagatgctcacggcctttccgggggatcgcatcaacactattctcgcgaggctctga

SEQ ID NO: 80373 - DNA, 1791 bp, Acetobacter orleanensis
atgtttgtctggaatgccgatgatcttaacgccgatcaggtgaaggcgatcgagcagccgggcagcgtcttcctcacggcgtgtccaggcagcgggaagacgcgcacgctgacctacaagatcgcgcgtgaactgtctttgctgacctccgacaaggagcgcatcgtcgcgatcacgtacacccaccgcgccgcggacgagatccaggagcgaattgagcagctcggggtcgataccagtcagctgtggatcggaacgatccatagcttctgcctcgaatggatcctccggccctatgccatctatcatcctgagctgaaaaacggcttccgggtgatcaatgcccatgacaccgagcgcgcgcatgaggctttgtgccgcacgcatgggagcaagctcagcgtcttcgactgcggccattatttcacgccgagcggctatgtcatcaattgtgatgactggaagctggggaaggtggatgcattgctccagcaatattggcaggatctgcgcacgagccggcaggtcgatttcgagctgatcctggtctatgcctaccagctgatccgagacgtcccctcgatcagcatcctgctcggttcgatcttcgcgaccatactcgtcgacgaatatcaggacaccaaggagatccagtacgccatactcggggcaatcctgaaggcgtcgaacgggaaggcgaaggcgttcatcgttggcgacccgaaccaggcgatctacggctcgcttggcggctacgcgatcacacctgccgaattttccaaactcagcggggtgacattcaaggaactcgatctgtcgaaaaactaccggtcgtccggccggatcgtcggctatttcgagaatttcaaccagctcacctcgaagatcaccgccgatggcgaattcaaggattttgccagcctcatctcgttcgattcctcgaccgatcgtaacgcgctcgaagctgagatcgtccgactcatccgctacaatatcgagacgatgggcatttccccgagcgaagtctgtatcgtcggtccgcaatggccgccgcttgcgagcatgacacgccagcttgtcgcggcactgcccgactacagcttctcggggccgggcatggtaccgttcgcccgcgacatcgataatttttggtacaagctttcgcgcatcatcctgacggaagcctcgccccagctctacgtccggcgcagtcgttgggcaggggaggtgatcgccgggctagatctggccggggtcaacaccagcgcgatcacgcgcaagtccctgctgcgcgcatcgaacggtatcacttccacaaagactgacggccttgaatatttgtgtgaatgcttcgatgcgctgttcgcggcgctcggcatcgaccgtgcgacctcgccgatgctcgtcgagcactacgacgcattcgtggaagggtcgcagctccggatcgacaagctgaccgcaaccggcggcaccgcgatcgccgagatcgcgatgttccgtaaggtcttcgccgagaagaccggcatcactgtgtcgaccatccacggcgtcaagggtgcggaatatgaagcggtcatcgcgttcggcttgctcgaaggcatggtcccgcacttcaaggaggccgataagattgcggccgcaaacaagcttctctacgtgatttgttcccgagcaaaaaagaatctgcaccttatctcggaagtgggccggcggcgggggcagaacaacgtatatcagcctaccgatatcctgcttgcttgcagttttggctatgaccagattccctga

SEQ ID NO: 80374 - DNA, 1917 bp, Listeria monocytogenes; identical to SEQ ID NO: 73702

SEQ ID NO: 80375 - DNA, 1908 bp, Listeria monocytogenes; identical to SEQ ID NO: 73703

SEQ ID NO: 80376 - DNA, 1917 bp, Listeria monocytogenes; identical to SEQ ID NO: 73702

SEQ ID NO: 80377 - DNA, 1908 bp, Listeria monocytogenes; identical to SEQ ID NO: 73703

SEQ ID NO: 80378 - DNA, 1530 bp, Listeria monocytogenes; identical to SEQ ID NO: 80340

SEQ ID NO: 80379 - DNA, 2178 bp, Listeria monocytogenes; identical to SEQ ID NO: 80341

SEQ ID NO: 80380 - DNA, 1530 bp, Listeria monocytogenes; identical to SEQ ID NO: 80340

SEQ ID NO: 80381 - DNA, 2178 bp, Listeria monocytogenes; identical to SEQ ID NO: 80341

SEQ ID NO: 80382 - DNA, 1530 bp, Listeria monocytogenes; identical to SEQ ID NO: 80340

SEQ ID NO: 80383 - DNA, 2178 bp, Listeria monocytogenes; identical to SEQ ID NO: 80341

SEQ ID NO: 80384 - DNA, 1917 bp, Listeria monocytogenes
atgtatttatcatcgcttagattgaaaaattttaggtcgtttgactctgagagccatgagataaagttcaataagggacttacagttttagttggagagaatgactcgggcaaatctgctattctggatgctatacgtattgtcttaggaacaacagattttagttggtacagagtcaatgattctgactttcataacgaagattgttcacttgaaatagaaattatttgtaagtttagtgacttatctccgttagaaacttctgcgtttttagagtatttgacatacgaagaagggaagaatccctcgctttatttgcattggaaatgtcgatatatgcagtcatttaaaccaccaaggccagtaagttctatggttactggtaaaaatggtgatggaccagccttatcaccagaatctagagagatactaagggtcacctatctacgcgctttgagagatgcttatagtgatatgcagtctggaagaaattcaaggttgtctcaagttgtgcaaaacattccggacatacttaaaggtgagtctgatctaaaagaaggagtaaaacttgaagagttatctttgattggtatattcaatttatctaataatttattagcggactacccagctttaaaaaaaattaaagaacaaatgacagatatattaaagaatcaaatgttgctagatagcgataacttagctactagatttagagttacgggctctgcgactgcagatacaagaaaactaacaagtctattggagaaattagacttgacgattgataaagacacaacttctctcaaaggaattcctggactggggacaagcaatattatgagtatggcatgtgagctattattaaggagaaactcacaagaggcttgtcagctactacttatagaagaaccagaggcacatatacatgctcaaagacaaatgaaattagttaaatctcttcaggctgattctgaagctaattcacagcaaattattttaacaacacactccccccaactagcatcagcagttaagttggaaaatataattttaataaaaaatggaaaagcttatcctctctctaaaagtgaaacaagcttgggaccggatgactatatttttcttgaaagatatttagactctacaaaagcaaatttgttttttgctcgaaacgtgattgttgtcgaaggaccaggtgaggcacttctactacctactctctctcgactgctaaatagagactttgtagattttggtgtatctttagttgatgttcgaagcactggactgagacggtattccaaaatatttcaaaggaaaaacaaagacgatccaaagcactcaggtgattggcttaatgttaatgttgcttgtgtcaccgatagagatattatgccaaattgtgcaccaaggatttgtctaaataatgactatagagatgataatacaaattggcctgaaaaaaatgatagaaaatggagagctgaaagtgattttaatgatactgaaaaagatacgtatttgaatgatatagaatctaaggctagtggtcagaatgttaaaactttcgtgtcgaataaatgggccctagaatatgatttagcatactatggactagaaagtttagatatgaagaaggctttaataaatgctttagtaaaaactacttatgctcaagttaattggaaaagcaaaactactgagatattaatggcactagactcaagagccagtaaagaagaaaaagcttcatatttccatagcttttttacaataagaaaggcttctaaggctgaattttctcaacagctagcttcagaacttgaggcgaatttttttagaaaagaagaagaattaaaagctttattaccgccatatatagtggattctattttatatgtaaccaaatattga

SEQ ID NO: 80385 - DNA, 1908 bp, Listeria monocytogenes; identical to SEQ ID NO: 73703

SEQ ID NO: 80386 - DNA, 2226 bp, Flammeovirga sp. SJP92
atgaaaatcaagaaaataaaagtgaaaaactacagacttctacaggatttctgtattgacttagaggacgagctatcccttgttattggaaaaaataatactggtaaaacttccttgttgagtgtgttagacaaattcttaaatccgtctgatagaaagcaatttagctataatgactttaatatcgaaaataaacaacaactttatgatttagttcaaaatgttataccaagcgttgaaaattataccccgtttggtattcgtctaaggatttttatcgagtataatgattccgacaaccttgaacatataagtagtttgatgatggacttaaaccctgaaaataatttcatagtcttaggttttgattttgttttacaccatagtttcttggaaaacctaagggaggattttcaaatattcaaacaaaaagaagctgaaaaaaaagcaaataatgcagaatatgaagaaaagggtttaaacttttttcttgataggaatgcaacaaactactttaattttattcgaaaaacagttgaatatgatttaacaacttccgaagctaatgaagataattataaggatttagtaaaggaaaaaatatcaatacagaatgttctaaattttaaatttatcagtgcaaaaagagaggtttcaaaccgcgatgtagataaaacattatcatcccaaacatctaaactctataagaaatcagaagaatcaacagaacaacaaaacgcaattgaagaatttcaagataaactaattgataccgatatcgaattgagtgatatttattctggtttgtttaaagaagtgattgaaaaagtaaaaaaatttgggggaataaaacaagatgattcacaaattgaaatactttctacattacaacacagggaattattagaaggtaacacaactgttatgtataatcaatttgatagctctttgcctgaaagttacaatggacttggttatatgaacctgataagtatgatttttgaaattgaatatctcgtcagtgattttaggcgattggctgatgaagtcccagccgatataaatttacttttcatagaagaacctgaggctcatacccacccacaaatgcagtctgtgtttataaaaaacataaaagaactacttaaggaaggcataaaaagggaagatggaaacaacagaaagttacaatatctcataagtactcacagttcacatatcgtttcagagagtgactatgatgatataaaatacctcaaaaaaacaacagataataatgttgttgcaaaaaatattaaagaccttgaaaaggaatatgaagagaatggtgagcaagaaaactatcgttttttaaaacaataccttactttaaatagagccgaactgttttttgctgataaagcaatactaattgaaggagatacagagagaatcctacttcctgctatgatgaaaaagtttgacaacgaatatcatactgatcaaataacagggagtactctacctttattatctcaaaatatttcaattgtcgaagtaggtgcttactcccagatatttgagaaatttattgatttcattggtgtcaaaactttaatcattacagatatagatagtttctacgagcaagttctgtatgaaacagatggtgttacgcccaagtgttatgggaatgggaatgtgaaaaaagaaactgtaaaatgcttcgcaagtaattctgcagcaactcatacgtctaatacagcacttcatttctttcatggaaatcaaaaaaagttaaactattatactaatttggattttgatgcgaaaattttaaagaaagataactgtaaaatatggatggtaaatacagaaggagatgtttggttagaacagccaagaaaatggatctcaagcgaaagtggaaatgttttgttagtatttcaaactccagaagcaaattatcacgcaagaagttttgaagatgctttttttcacataaactctgagtttataaaaaataaaaatcactcgtttaattcattaacttcgaaatatttgaaaaaattcaaaagtgatgagattagtgtatttgatttttcagaacaagcagtcaatagtaaaccatctcttgcaattgaaatactgttaaacagtaagactgatattgatggtaatttgtatagtaattggcaaacaccagcatatattaatgaaggtttaacttggctaaaggaagattaa

SEQ ID NO: 80387 - DNA, 1899 bp, Flammeovirga sp. SJP92
atggacgaatttcaacaaataatggaacacatccatcggggagaaaattttttgttaagcggtggagctggtagtggtaaaacctattcacttgttcaagtaattaaacaagtaatcgaagaaaacccaacaaaaaaaattgcatgcatgacatataccaatgcagctgttaaggaaattgatgaacgagtaaatcataagaacctaaacgtaactactattcacgagtttctttgggatgttataaggcgttatcaaaaagaaatagtagaagcattggttgaattaattaatgacccagaaaatacaaaatttaaaacaaccgaaacagcacctattacaactaactttttttctgatgagatagaatactcatatctttcaacaaacttttctaaatgtagaatttctcacgatgaagttctattactttcaaattacctttttaaaaaacataagaagttatgcgatattctaaaagataaatacaaatacatttttgttgatgagtatcaagatacacaagaagaggtaattgaaatatttcttgaacacatgactcaaagtagtaaattttgcattattggtttttttggtgattcaatgcaagcaatttatgatgaaggagtaggtgatattgtaaaatatcttgagaatgataaagtaaaagaagtaataaagaggcaaaatcgccgtaaccctaagttaattattgatttggcaaataaactacggactgatagtattgaacaagaaccgtcaaccgatagtaatgctcctaacatgcaaagtggaacggttaagcaaggaactgtacagtttcgctattcatccaacaaaaacgatttagagaagctaaaaacagagcttggttgggactttgaatataacactgtctctaagaaaactcaagctaaagaacttaatctgacccataacttaatcgcagataaggctggatttagagatttaatggatatttatgataaagacaagataatcgatttcaaaaacagaattagaaagtacctaaaagaaaataacattcagactgatttttcggacaaaacatttggtgaagttattgattcattatctgttggaaaaacagataatgaactaaaaaaaattaaaccaacaccagtccaacaatctttcattagtcagaatcaagacctttttacctttgccaagagacttccattttctgtttttatcaagacttatgttgataaagaccagttaattgacgataagaaacaagatgaagacgatgaaaataaaaaaggaagtagacgagatgaattaataaagcaccttcacaagattcaacatataatccatttatataaaacaggtgattacaacgaatttttgaaacatacccagaagcgtataaattcaatttcaggtaaacgccaactaaaagaagacattgataatttaattaatgttggtgataaaactattgaagagattgtccaacacgcacatgaaagaggtatttgctttattggtgataaactgacttcttttaagagagaaatgagttatgtttataacagagtagcaagtgtaccatttcttcagtttcaaaaactatatgaatatcttgaaggacgtactccattttcgactcaacacaaaacaaaaggaactgaatttgacaatgtacttgtggttttagataatggaggttggaaaaactataatttcgaggcactgtttctcaattcaggaagagcaagtgttttagaaagaagccaaaaaatattctatgtatgttgcacaagaacaaaagaaaacttaactgttttttatcataatccaagtagtgaggtaattgctcaagctaagagttggtttggaaaggaaaatgtaaaatcaatacatgaatga

SEQ ID NO: 80388 - DNA, 1704 bp, Flammeovirga sp. SJP92
atgaatataagaataaacagagttaaaatacagaactttagatcacttaaagaagcaactgtaactttagaaaattttacacttcttgtaggaatgaataacgtaggtaaaacatcatttttacgagcattatctttcgccttaggaaatgatattcggcaacttacattagatgatttttatattaatgaaaattcagaaagagcctctgaaattaaaattgacatagaaataattccacttaatgataataaagagcgaattgaagaatttgatggagagatttgggcttcatattttggaggagaagcgatcgatgcgactgaagataatgaaaaagtcatttttagaagtacttttagtcttactgaaaaaggagtcgaaataaatagaaaaaatctagctggttgggaaggagtagaaggtgcagctattaaattttcattaaaaggattaccatttcgatttattgatgcaagaagggatattgaagaggatattaaattaaaaacatctccattaggcaaattaattcaacaaataaaatgggatgaagatgcaaagcaagaaattgaaaatcggttaactgaattaaataattctgcaactgaaaatagtgatgtattaactcacattagtgataaccttttatctttaaatgatacaattagcaatcttaatggaggagttgctgtatctccatttcccaaaaaaattcatgatatacacaagggagtaaaactacactttgatgattttagttttgagtacttaggtatggggacaagaagttgggcttcgttattagcatctaaagcttttgtttcatgggaaaagcaagttgctgaagaagaaggggaagcatataatcattttttagcattagaagagccagagtcacacctacatcctaatgctcaaaggcatttatataaacaattaagtgatgttgacggacaagtgattgtaagtacacattctccatatatatcagctctagtacaactttctgaagtcagattttttgttaaaaatgaactaggtactataataaatgatatccaattagttagatctactcccgaagatttaagaaaaatacagagagaagttttaaacacaagaggtgagttatattttagtaatgctattattctagttgaaggagaaagtgaagaacaagctttaccaattttaggaaaacaattctttggaaaagagttatttgaattagggatcaatgtaattagcgttgatggaggaggaaaatattttccgttcttaaatttctgcgaaggattaaaaataccatggtttatactttcagattatgataatgataacattagaagaaatttaagtgctgctttaagtaatgcaaatatctcaaatttagaaaatgatggaagggttttttgtttaaattatgatattgaagaatatttgattgaagatgattttctagacctcttaaaagaaagtattattgatttagagatggtaggtaaagatgaaagagctagaccatcaacagttcaaagaataacacgtttaacaagagatgaagtattagaaaagttaagacaaaagaaaacaaaaatagccccaatatattctgaaaaaataattagtcaaggtgatgttagattgccaacaattatcgatgaattgtttcaagaaattaaagacacattagatatataa

SEQ ID NO: 80389 - DNA, 1857 bp, Flammeovirga sp. SJP92
atgaaactttctgaagaacaaaaagaaataattcgactagaaagcggattaatatcagttactgctaaggcaggaagtgggaaaactttagtactaacagaacgagttagatatttaattaatgaaaagaaagtaaaaggtaaaattctatgcttaacttttacagctaaggcggcagaggaaatgaatagtcgtttaagtgatattgataaaattgaagataaagtatttattggaactatacatgaattttgcatgaatataattcagtcaaaatatcgtgagttagggtatgagaatgttccacatatttttgaatctgatattgataaacaatctattttagctgatcttattcaagataaccctgaatttgaagaagcttatataaatttaccagaaggtaataagaaaaaatattttttttcaaatgctcttactttttttagtagaattaaaaggaaattagaaacagacttagataatgacaaaccaaattgggctttaaatattaggttatacaattcttataaatcagctcttcaggctcaaaatgcaattgattatgatgatgttttattgaaagtttttgaattatttagagataatccaaaaactctatctctatataaaaggatttacaaatatatatgtgtagatgaggctcaagatttaaactttgcacattttaatattattaaatacttagttaatgatgatttattgatgcttggtgatgaaaatcaaagtatttatcaatttaatggagcaagtccttattttttctctaaaagaaaattagaggaagtatttcacaaagaaataattattaaatcattaacaaataattataggtcatcgaaaaaagtagttgagcttgctaatcaattaaggaaagataaggtagccacaattgcaaatattccaattgaaggttatgttgatttacaagaatttgataatgaagaattagaagcgaaatatatacttgacaaaatagattactacttatctaatgaaacctttttaaatgacattgtagaaaaagtttcattggatagttttgtggtactagctagaaatcgatatgtattcaatcaattaataactcaactaaaagaaagaaatttatcctatgaattattagggtcatctaatggtttacaattcgaatctaaattttttaaagcatttgacttaggtagtagagtgattattaatcaacgagatgaatttcattataaacagttacttgacctttatagaattgaatatactgaagaaacaaaagcaataaatattttatcagatttaaagaaaaataatgaaataagtgattttttagtacaggtcttagttatcttaaaagaagagaaatcacctgctttaatctttagaagtatacaaaaatatattggtagcttagatgaaaatgataaggattatgagttgctaattggtgattatgagtattttaaaaagttatggagcaactttacgagaagtaaaaactacacgaaaaaggattaccataattttagaaaatatattacgatgggttacggtgatcattctaaggtaaaagaacaagtatctctgaccttgagtacagtacatatggctaaaggaaaggaatttgatgtggtatttttaatgggaatgaatgaagggacttttccatactactcatcattaaatgactctaaaaaattagatgaagaaaaaaatgctgcttatgtcgctgttactagagcaaaaagagtattacatatttcatatccagttgagaaagttatgccttggggtgattctaaaaaacaaataatatcccaattttttaaagaagtcaatctttga

SEQ ID NO: 80390 - DNA, 1686 bp, Marichromatium gracile
atgctgctgaccagtctgaagatcgagcactaccggggcatcaagtggcttgagcttgcattgggctccacgacggtcctggtcggcgagaacaactgcggcaagacgagcgtccttcatgcgctccgtgcctgtttgtacgtcttgcggtcggcgggccgtgcctcacccttcgatgagctcgacctgcatttcgacagttgtcgtgcggacccgaccacggcaccgccgatcgtcatcaccctgaccttcgaggaagagacggccggtgaatggtcggacgaggtcgagcaacggcttggcggggatggcggtgtcatcgcgctgataccgcccgatgaccacagccgagtccagctgcgtgtcacggccgagtactcgaaggccacgcaggagatcgagacgacgttcgacttcctcgacgccgtcggcaacccattgccgccgaagaaccgaagccgtctgaccaacctgcagcaattgcgaccgctcttctatctctcggcattgcgtgacgccggcaaggagttctcccgaacgtcacagttctggtcgccattcgtcaagcactcccagattgacgaggcgacgaaggcctcgatcgaggcgcagcttgaggacatcaacgcccaaatcatcgaggcccacggcaccttcaagggtgtccgagagcacttgggcaaggtgcaggagctcgtcgccctcggtgggcaggatgttgtcagcgtcgatgcggttccggcgagggtgttcgatatgctcaatcgaacccaggtcagcattgcatcggcgacgggcgctcgcttgccgatcgggcggcatggtgaaggcacgcaaagcctgaccgtgctgatgctcttcgatgcgttcctcaagtccgagctggccaggaagcagggtgtgagggaatcgaagcccattgtcgcgctcgaggagccggaagcccacttgcatcccaatgccgtcagagcgttgtggaagaccattcgcgatatcgatggtcagaagttgatcgcgacgcactccggcgatctgctttcagaagtcgacctgacagcgattcggcgcatctacaagtccgaggggcaagtgaaagttggcgcgttagccgtcggcacattggccccacgcgatcaaaggaagttcgattttctcgtacgccggacgcgcggcgagctcttcttcgctcgctgttggctgctgggtgaaggtgagactgaagccattctatttgcaggcgtggcggaggttctcggactagacctggaacaggctggtgttcgttgtgtcgagtaccgattaggcgatatcgactacttcttggacgcggccaatgcgctgggaatctcctggcattgcatgacggatgctgatgatcagggcgcaaaagatgccaagaaagctatcgatcgccttcctgggatgcgcaagcgtccgtcgcgacacatatctgtgttggtcaacgcggcatccatcgagccctatttggccgcgaacggtttcctcgatgtctatgaggcaatcgctgttcccgctaagaagcttgcgaaactgacggtgagtccgggcgacccggcgtacgcggaccaaatcatcaagtgcattcctgacaagccgagcgccgcgtatgccgtggtcgaggcgatgcgccagcgtgggccagcctcaattcccaaggcgttgtga

SEQ ID NO: 80391 - DNA, 1713 bp, Marichromatium gracile
atgcgagagcgcttgctgagctcggtgcccgatgcgaagggcagggtcttgctgacgacctttcattcgttcgcgactgacatcctgcgacagcatggcagccacttcggactgagtccggatttcgagatccttgaagaatccgagcgcctcggcatggtcaagtcggtgttggcggagaagaccgatgagctgacaaagttcgtatcggccgagaaggcactgaaagccattgatttcttgctacgaaatctcactcccgacgccaagatcccattgctcttgaaggatgccgaggcgggtaaacagcttcaaaccctcttcgttcgctacaaggaactgctgaagcagaagaattgcctggattatgggtcaatcctttactgttgcgaggagctgctgcgggagcggccacggatcagcaagcagcttcgcacggtctatcgttacgtttgcgtggacgaattccaggacaccaacgcagcacagtaccgcgtgctccggtccctcgttcctgatcggaatgccaacgtcttcatcgttggggatgacgaccaaatcatctaccagtggaacggagcaagcccgaaacgcgtgagggagctcgggcacgattacgacctcaccaccattcagctaccagagaactatcgctgcccaccggaagtggtggccctcgcgaatgctctcatcctccacaatggcgagcggtcgccggataagttgcctctgcgttcgatgaagccgggctccggatgtaacccgatcgagcttctcgcgccgttcgaggacgaccaagcggaggcgagagggattgcagaatgcgtggccgaacggttgaagagcggcagccaccctcgcgaccttgtcattctggcgcgagcgacccggcttttggagcgagtcaaagaggcactcgacacgctatctgtgccgagccatgtgcaacgaaggaagtctcagtttgagagtgcaccgctacggttcgtaacgtccgccctgaaactggcgctggttcgctcagacgacgaattggcctcgaccgtcacgaaggcgctttcggattgtgtggagcaagattccagtgaggaggatctggctggcttctcggccgcattgaatggcgaccaattggaggcgctcggtgcactggtgctggctagcccagcggtgcccaaagcgcttcaggacgccgtctcatcgctggtccaagggcactatgccgatttcatccaggctgccttggctcatttcgactcggtcgagggtgcgactccagaagggggcgatgagcagtacgttgagtacccaacggagcggaaggtctggcaggccattattcatgagattggcggcgaagaggatgcctacgcgatgtcactggggcagtttcttcaagagctcgcgctggcgaacaagacgccggaagctccttctaacgcagtccgctgtctgaccattcacggctctaaagggctggagtttccgcatgtctacttggtcgggatggccgaagaccagttgccctccttccaaagcaagaagtccggtgacgacagtcgggagatgcaggaagaacgccgaaactgcttcgtggccattacccgaaccatcgagacgctgacgatgagctatgggcaaaggtacaacggatggcgcaaatcgccgtcgcgctttctattcgagatgggtttgctggggtccgatacatga

SEQ ID NO: 80392 - DNA, 2064 bp, Bacillus cereus
atgtatttaaaaagtttaaaaatctacaactttagaaaatttggaatagataacaataagatagaatttgttgatgctaaaagctttcaagaacaaaaaaataaaaaagagataaacattgctcctacaaccactttaattgtagggaaaaataactgtggaaaaacaactattattaaagcgttagataatcttattaataataaagacgcttttaaagcaaatgattttaattttttgtacttaaaaaaactactagatcagtatgaacaaacaattctaaagttagatgatgaatcaaaagagaaaattgaaacaccgtatcttcaatttaacattggtattggaattgaagataatagtaatgatttagttaccaatctggttcgttttatgaaactagatgatattaataattctgaattagaaattggtataaaagtagaactggaaaatgaagaagtctttattagagatgtgaaaaaactattagagaaaaatcacaattcaagtattcggtttagtggctttttggaattgataaataattccgtctttaaattgaactactataatgcagataatgataaaatagaaaattttaacataaaaaatttaattgaattgagaccaattaaagcaaataacattgagagtgaaaaatgtctttcaaaagcttttagtaaaataattgaataccgttacaagtccttatttggagaagaaggcaatgaccttaattcgaaaatcagtgatattaatgaggaacttactaaattaattagtgaaaaacatacacatagtataaacgagtctttaggagaaattgaatcaaacgaaaaacttaaggtacttttaagggcagatttgagctttcaaaaggtgatgaataatttaatcaaatatgaatatgtcgaacgtgatatgaacatacctgagaatcaatttggtttaggctatacaaatttgatgatgataatagcagatttaattgattatatggaaaaatacccagaaaactcatttaacagtaaagttaatttaatttcaattgaagagcctgaaacatttatgcacccacaaatgcaggagttatttataaaaaatataaatgaagcgattgcttctttattaaaaagtaaaaataagaacgtaaacagtcagttggtaattacaacacattcctcacatatactgaacagtaaaatacatagtggcaatacttttaataatataaattacgttactacaaaaaataattatactcatgtagtgaatttgcgtgatgatataattatccctaaaagtgaaaccaacgctcataaaagagaggatgatcttaaatttctaaaaaagcatgttaagtataaagtttctgaattgttcttttcagatgccattatttttgttgaaggtgtgacggaagaaacgcttcttaaatattatattgataatagggataagcttaataaaaactatatatcagttttcaatattgatggagctcatggaatagtttatcacgatttaattaaagccttaaaagtaccagccctaataattacggatttagatataaaaagagctactaaagaaaaggaaaattttaaacaaatctctgacttaaaagacaggttaacaactaatgaaacaatcaaaaagtataatggaggttctgataggttagaggaactacgacatgagaagtttgaagtcgagaatgtgtatattgcatatcagggtaaaattaaaggatattatgcaacaagctttgaagaggcatttatcttaaccaattacgaaaataaaattttaaatagtgtactagaaaaaatgaaacctaagatttatgaagacatcataggcgaaaataaaaatttagataatattaaggaaaattcgtataagcttcaaaaaaagttatcgaataataaaagcgattttgctaatgagctactttacaagtttataactgaaactgaagcaccaggagttccttccctgccacaatatattgatagtggacttttatggttaaccaaaaaattagaaggggagaaataa

SEQ ID NO: 80393 - DNA, 2064 bp, Bacillus cereus
atgagtttatctaaggtagctctatctaatagggaagaagagcaaaagtcattaaatgcaattttttattctattgataaaagtgaaagtatcatttttaatgctggagctggagctggaaaaacatatgctcttattgaaagtttgaaatatgtaatcagaaattatgagaagaacttaaaaaaacataatcaacaaattatttgtatcacatatacgaatgttgcaactaaagaagtaaaagaaagactaggaaacacagatttagtattagtgtctacaatacatgaaagaatttggggacttattaaagagtatcaaaaagaattagttgaaatacataaagaaaaattggaagatgaaatttcaaatttaaaacaaaaattaaaaatagctagagaatatagtaaataccgagaattggaagatgatttaaaggaaaagtttgaaaaaataatgattgagaataaagaattattctttcaaaattatagtgttacagcagcagagttgaaaaaatcatttaaaacaatcttaaatgattaccctgatatactaaagaatgttagcaatttcaaaaaaatagtaaacactatctacaaattagataggtatagaaaatgctatgaaaatataatttcgaataaaaaagggtataaatctgtagaatacaattcgatttataataatgatcaacttcataaaatgcgaataagccacgataccttgttagattatggtttgaaaataattgagaaatatgacttgttaaagcagataatcattgataaatatccttttgtttttattgatgaatatcaggataccgatgaaaaagttgtgttaataatgagttatttagagcaatatgcaaaaaaaattagtcataacatttttataagttattttggcgacactgctcaaaatatttatgatggtggagtaggaagtaaaataacaaagattcactcaggtttaaagtcaataaataaagtatttaatagaagatctacaaaagaagtcattgaggttataaataaaattagaaatgacaacattcagcaaatatcaatttatgatgattgtgaagggggcagtgtaaagttttatacagggacttcagataatgttaaggacttactagataagtatatacatgaatggaaaataactacgaaaaatcaactacattgtctagttttaactaataagattgttgcagaatatagtggttttaaaaatatatatgaagcttttaaagagacagataaatataaaggtatcaattataatcaacttaatacggagctttttagtaatgatttgtctaagcttggtgaaatccctaagttattatttaatatagttaggttacaaaataaccttttaaataaaacgacttcagtcatggatatttcgcctaaagaaagtttatttgatgatatgagtatagaaggtttgaaaaagttaattaaatcattaaaagaacacaaagggaaaacattaggtgaatatatagaatcaatatcaactgtctattctcaagttaatgacgagaattataaaaaaataatagattggacttttggttttgaaaatatcacattcgaactatttaaaaattatcttataggaaagttattcaaccaaacatcagatgatgatattgatcatgcaaacacaactatacaaaaaatgctaaaggttgatattgctgagtatggcttgtggtataaatttattatggataaacaggaagagaaggtcatttatcatacctatcacggtacaaagggtcgcgaatttgataatgttattattattatggaaaatgcctttggaagaaatcgagattattttaatttcttttttgaaaattccttgcattcagatggattggaagatgagagggagcggaatctggaaaaaataaagaatttgttatatgtttcttgttctagagctattaagaatttaagagttatatatattgatgatgtcactagtttcgaaagtggaataaaggaaatatttggggagatatatctttttagtaataattaa

SEQ ID NO: 80394 - DNA, 2037 bp, Bacillus cereus
atgcacaattcaaaatctccgtatatctcaagagtcaaaataacaaattttagaaacttcaaagacattgatgttaatttaaatcataaacaaattatcattggtgaaaataatgtaggaaaaacaaattttttaagagctttacaaataattttagaccctaaactttctgatgaagaccgttttttattagatacggatttttttgatggactgtcagaaccaatgaaaaatcgtgaacagattgaaatctcaatagaaattcaagggtatgaccataataaaacaattttatctatcttagatgcagctacagtttcaacatcccccaaaactcttaggctaacatataggtattttccaaaagtaaaagaagatggaacacatgactatcaatttattattttccaaggtgaaaaagaagaaataccttttactcattatcaccgaagatttttaaatataaatgttatacatgcaatgcgtgatgttgaatctgaaatgaaacatataagaaagtctccggttaaccagttattaaaacaatacgatatccgaaaagaagaactagcagaaatagcctctgcacttaagcaaaaaagtgacgaggtgctttcaattgatgagctaaaagatttaacaaataaaataagttcaagattttcaagcattatcggtaatcaaattgattcaacagtttctttagaaactatagattttaatcctaacagaatcttaaatacactaaaattaatgattggagaaaaaaaacgacatgcaggtgatacaagtttagggattaataatatcctttatatttctctaatattattaagcttagaggataacactattccatcaattatcaaagaagataaatttcagcaattattaaaagaagacagtagtgcatttttaaatgattgctatgaacaaaatcaaaagcaaaattacatattaaaaacagaactatccgatgaaatgcaaacagaactttatacttttatggatacttatcattcttctaataatggctgtacaatcttggcaattgaagaacccgaatcgcatttacatcctgcacttcaaagagttatttataaagatgtaatgaataaaaatacatctattttaatgacaactcattctcctcacataacgtcggttgcacctatagattctatagtacatttacgtcataccagtgagggtacttgtataaatactactgcttccttaaccctcgaaacaagagatagaaaggatttagaacgttatatagatattaaaagaggagaaatctattttggtaggggtgtaattttaatagaaggtgttgcagaagaatatttaatcccgagttttgcaagcaaaatgggtatgcctttagataaaaaaggaatcatttgttgtaacgttaattcaacaaatttcaagccatacgttaagtttcttgatgctttagatattccttttgtcgttataaccgatggggattactatataaacgtgaaaaaggtaaaagaagtgaaaaaaggagaagaaatcgaagaaatcgaaaaagtagaaaaagaatttggtctattacaagaggatagccatgaagattttggttatgatggcaatgatagaatgcgagaattgctaattaatttaaataaacttactgatgagctaattccagagaactatgctgaccaagatgccatattttcttcattgggcttttttgtaggatatcatactatggaaattgatattatgtcccaaattaaagatttaagctatgaaaaggatattataaatacaatcttttgtgaacttacatcgggaggagagcaacagaagaagaacttccagcttgaattagaacaaggaaagtatgtttcttgcttaaagaaaattgaaagtagccattctgcgattggtaaaggaagatttgcacaacatttatctattgaatgtactaaaaatcatgtacccgactatatacgtttagcaatagaatcaatttataaaagagtggatgaactctaa

SEQ ID NO: 80395 - DNA, 1827 bp, Bacillus cereus
atggaattatatctacaaaaaataaagcaaatacaagacgacccagaccagctagcagcatttaattccaatattagtacagttgtaaaagctggacctggtagtggtaaaacaactgtattaacattaaaaatacttaagctgctaaacgaaagaatacatgtacccagaggcttaggctgcatcacatatagtaaagaagcagcaaaggaatttactagtagattaaaaaagatggggtatcaaaaaagagcaaatgtaagcttgggtaccgttcattcattttgcatttctcaaatcattatgccatatgctcatctttttaaagatgattttcctttacctatagacttaattgcagatagtgataaatataagttatttctctctattttaaaggattttaatattaatccaaacaacttaaaatttcaagaaatggaatcagagagaagccactctgttacgggctttagtaaagtaaaaatagataagaatcacatagcggaaaaagtggcaatcgaatatgaaaaacgacttaaacagttagggaaaacagatttcattgaaattgttaaatattcaaaccaattaatcaatagagaggaatatgtccgtaaatgccttgaagccaaattcccttggattcttatcgatgaatatcaagattttggaaaaccccttcatgaaatggttctatctcttattaatttaactaatattaaaatatttgcagtcggagaccccgaccagagcatatacggatttaatggtgctcatccatcttattttcttgaactttatgattctactaagctgctatctatagacttgaaaacaaactacagaagtaatcaagacataatagatgcttcttctataacattaaatattgatgaccgtgagtataaagcaggtgctagaatagaggaaaaaggtatttttcattttattcaatgtgaaaatgaactcgatgaacaatataaatatgttgtagatactataattcccaattctcaaaaacaaggaatccctttagaagaaatatgtattatagtaaaagataaatatgcggctgaaggtttacgtaaagtaatggaagaaaagagcattccttactacattgcaaaattcgaattttctaagagtgaaattgtattatggttaaaagattgtgcaacctggttagtaaataacctttcaggttcctttactagtatctcagatttttggattcaattactagagagccatctggggatactttctgaaaacgaaagaataaaagaaaagaagaaattgtataatactttaattatgagtaaaaaatttaatgatttattaaatgactggttagcttttatagtagctcgattaaacttacattgtattttaaaacaatctgaaaaatacttggaagaagctcatcttttagaaaaactactgcaattcgccactaatggtgaatttaaattgtacagtattaaacaattttctcagattggtaaacctgaaaatcaagttacaatatcgactagacacagttctaaaggtttagagttcgaggttatagcaatactaggaatggagcacaaggtgtttcctgactttagaaatttaaaagatatagaaaagttcaatgaagagcgtagagttttttatgtgtgcattacaagagcaaagcgagaatgttatttattgatgtcaaaaaattatacaaaagacacatcaaaagggacattcacttttagacactatccatcaatattttggaatgaattgtatcaagtatgtaagaaaaagaatctttctcatgttactagctag

SEQ ID NO: 80396 - DNA, 2013 bp, Bacillus cereus
atgcaaacatcccgttcaccttatatatcaaagataaagattaagaacttccgcaactataaagatgtagatgttactttaaatcataagcaaataataattggagaaaataatgtaggaaaaacaaattttttacaagcaatacaactcattttagacccgaaattatcagatgaagaccgctacttgcaagagtctgactttttcgatggtttagaagaccctatgaaccagaaggaaaaaatagaaatttctattgaaattaaaggctatgagcataacaaaacaatattatccacattacaagaggctacagtatcaaccgaaccacccactttacgtttaacatatgagtattatccagccgaagatggtacgggtggataccaatatcgtatctatcagggcactgatgccaataacttgtttacacattatcatcgacgttttctaaatataaaagttattcccgctattcgtgatgtagaaagcgaaatgaaaagcctacggaaatcaccaatcaatcagttaatcaatcaatacgatattagaaaagaagaacttgaaaaaatcgcaaccgctcttaaggaaaaaagtgatgaagttctatctattgatgaattagtagacttaacccaaaatataaattctcgattttcagatattatcggaacacaagtagattctactgtttcactagaaacaatagatatagaccctaatcgagttctgaatactttaaaattgatgataggacagaaaaaaaaacgttccactagtaatactagcttaggtttgaataacatcctttacatttccttgattttattatctttagaagataaaactattccttctattttaaaagaagatacgtacgatacattgacattagaaaaggaatcctccattttggctgattgttatgaaaaaaaggatagcaataactatatactaaaaaaagatatccagaagaaagattatgatgaattatacagctttatggatagcaatttttcttctaacaatggattcacccttctcgcaattgaagaaccggaatctcatttacatcctgcacttcaacggattatttataaagatgtaatgaaggaaaacacatctattttaatgactacacattctccacatattacatctgtggcaccaatcaattcgattgtacatgtacattctacaaagaatggcactgtcgttaatactacagcttcccttactctagatgacagagataaaaaagatttagaacgatatatagatgtaaaacgaggcgaaatttactttggacgtggagtaatcttaatagaaggagtagccgaagaatatcttatcccaagctttgctgagaaattaggaatgtctttagatagaaaaggtattatttgttgcaatattaattccaccaactttaaaccatatgttcaatttttagatactttagggattccttatgtcgtaattacagatggggactattacatatgggaagaaaagaaaaataagaaaggtattattgaaccaaaaaaaacctttggcattctcgctcaagatagccatgaagacttcggttatgatgggctagatagaactcaaaaactattggtggagttaaaaaaattggacgcagaacaaatacctgaagattatgctaaacaggaccccctttttatgcgttacaacttctttataggtatccacacgatggaaattgatattatgaatcatattagcaacatgaaaacggaaaaagaactactatgtaaaatatttgatgaactaacactaggcgggacaagacaaaagactaattttaaaacagcgttagaaaaaggagaatatgattcttgtcttagaaaaattgaaaataacagctctgggattggaaaaggacgattttcccaacatttatccattgaatgtactaaaaactttatacctaaatatatacaagctgctattgaaacaatttccaaaagagtggatgaagtttga

SEQ ID NO: 80397 - DNA, 1827 bp, Bacillus cereus
atggaactatacaataaaaaattaaaacagatacagcaagaccctgagcaattcactgcttttcaatccaatacaagtatcgttgtcaaagctggacccggtagtggaaaaacaactattctaacactaaaaattatgcagttattaaatgaaaaaattacatttcctagaggattggcttgcattacctatagtaaagaagctgcgaaagaattcactgaacgtttacaaaaaatggggtgtccaaaaagaaaaaatatttttctaggcacagttcattcattttgtatatcccagattatcattccatttgctaaactttttaatgatgattttgctcttcctttagacattattacagacgccgaaaaacaaaaaatattcaatttagcacttacaaaccttggtatagataaggacgagctaagtgtggaggaaatggataaagaacgaagctttactataacagggttaagtcaagtatcagcaactttaaatgcaactgctgcaacagttgcatacgaatatgagcaacaactaaaaaagttaaaaaaaactgacttcattgaaatcgtaaaatactcacgagaactcattaacagggaaaaatatattcgtcgctgcttagaatctagatttccttggatactcgttgatgaatatcaagattttggaaaacccttgcacgagatgattctttctctcttaagtttaaccaatataaaggtctttgcagtaggagacccagaccaatctatttatggttttaatggtgcaatgcctgaatatttattagagctatatgataaacctgacatttcctccgtacacttaaagacaaattacagaagccatcaagatgttattgatgcctcatctattgcattaaatgtcgatgatagagaatataaagcaggtatagaacacgatgggaacgcagaatttcatttcattacgtgtgaagaagagcttgatgcacaatacaattatgtagtgaataccattattccaaaatgtgaaaatcagggtattcctttacaagaaatttgtgtattagtaaaagatggtaatagccttaaaaatttaagtacagttatgaaagaaaaacagattccacattattcttcaaaatttgaatttgcaaaaagtgatgttgtcctatggcttagaagttgtgctttatggatagtaaatccaacttcccaatctttcacagaaatatttaacttttggattcagttattgaaaaatgaaacgaagcacttctctgacgaaaacacattaatgttacaaaaacaactttacaccattcttgaggatagtaaaaaacataccgaaaacttaagtaattggttaacctatcttgaacaagaattaaatcttgcaaaaattctaaatgaatctgcaacctacttagacgaagaaaaatatctcaaaatgctaaaaagttatgcacagagtggttctttcgaagattataacctatcacagttttcacaaataggtaaacccaaagaccaagtgacactgtctactagacatagttcaaaaggtctagaatttgaagtagtcattatgctagggatggaaaaaggagtattcccctattataaaaatgaacacaactctgcaaaattaaacgaagaacgtagagttttctttgtttgtttaacacgagcgaagagaatttgttatttgctaaggtcgaaaaaatacaaaagaaaaactcgctggggaatacgcactttcgaccacaaaccttctatgttctgggatgaattacatgaaacatgtaagaagaaaaaattagtttcttctacaaattag

SEQ ID NO: 80398 - DNA, 2328 bp, Collimonas arenae
atgcatatcgagattgttgaaatcggaaacttcagaaaattacttggagtccgtattggtctatctaaagaaaaaaccatctttgttggtgccaataatagtggcaagacctcggcaatgatagcgttacggcacttcttagtggatcgggaacgagcaaagttttcgcttaatgacttcacgctttcgcactggccgacaatcgacgcgatgggtaaagcatgggaagctgcaaaggccgcggacgcagagcttcctgtgccggatttgagtcctgtacttccgtatcttgatgtttggttgaccgtcgcaaaaaccgaggctcactatgttcagaaacttattcccacgcttgattgggatggaggtcgtctcggagttcgtttaagatttgagcctcgagagggattgcagtttcagaaagatttccttgctgctcgcgaggatgccaaggccattcaggccgttgacgaacctcagctcaatgacgatggcgtgccggttgcgaaatcgatcatgctctggcccagaagcttgagcgagtttctccaacgccggctgggaaaactctttgtagtcaaatcgtatattctcgatccgaccaaactagttgacccggagttcggcgttgcacatcctcaagtcataggaagcgatgcggaaccaatcgatggggagcccttcaagggcctcatccgaattgatgagattagtgctcaacgaggctttggacagtcggatggaataaaagattcggaagacgacaatgcagcagcaggtgcgtcggcaactcgcaaaatgtcggatcaattacggcgctactggaaccggcatctagacccttatgaaaatccagacgctcgggatttacgggcgctaaaggcgatcgaggatgcgcaaaaagcatttgacgatcgcctaagagaaggattcgcgccagctctcaaggaggttgaagggctcggttatccaggtgtgacagatccacgcctaaacatttcgacacgcctcaggccaattgacggtctgaatcatgaggccgcggtccaatatatgattcagatagtcgatggagaaaattcattcgatctgaaccttccggaagactccaacggactgggatatcagaacctgatctctatggtgttccggctgatgagttttagggatgcgtggatgcgtgtcggcaaagcgagttcgacgaaaactgatatgccaggcgcacttgtaccgcccttgcatctcgtattgatcgaggagccagaagctcacttgcatacgcaggtgcaacaggtcttcattcgacaggcctacgatattctcagaaaacaccctgagcttgaaaaaaacggatctatcctctccactcagatggttgtgagcacacattcgagtcatgtcgctcatgaatgcgagttcgatacactgcgctattttcgtcgcttgcctgcgagtgtccgcagtgtaccgacatcgtgtgtcgtcaacctaggaaatgtgttcggagccgaccaagacacaagacgcttcgttaccagatatctgaatgtcactcattgcgaccttttcttcgcggatgctgcagttttggtcgaagggcctgcggagcggattctagtccccttctttatgcgtaatcaacctgaccttcatgacctggcagaatgctatgtcacctggctggaaatcggagggagtcacgctcaccgactacgcccattgatcgagcatctcgggctaacgacgctcgtagtgaccgatcttgacgccatgacagcagagaggaagaccatcgctcccctgagaggtgctggtcaaaaatcacgcaataccacgttgggtagttggtggcccggtaaggacgatttggatgtacttctcgacgtcaaatccgacgaaaaaattaaagtctatgccaacgagcgcttcgcgattcgggttgcgtatcaatgtccgatagatattgaattcaacgggaacaagactgaagcaatttcaaacacgcttgaagatgcgcttgtcttccagaatctcgatttttttgcgaaaaccaacggtaacggtctattctctcgcttcaagatctccatcgaaaagagtaaaacggtcaccgagcttggtagcgcactctttgaggacctgaagggtgggggcaaagcggagtttgcactcgatctgctcgatatacaggatccgaacgccttacgtcctccgctctatatcaaggagggcttgctatggcttgcaagccagctcaggaagcaacagcaagagcttggcgttgctacgtcaacgttaaatggagtaccagaagcggaggaaaaatga

SEQ ID NO: 80399 - DNA, 1896 bp, Collimonas arenae
atgaccgccgcaccattggccgcgtcaaatactgatctagatgatcacgtcgacaatgagattgccgaatatatcaatctagataaaccacgcagcttcttcctctttgctggagctgggtcagggaaaacgagatctttagtcaaagcgctaagccacatccgtagtacacacggacgccaactcgtatttcgtgggcagagggttggtgtcatcacttacactaatgcagcatgtgacgagatcacgcgacggatcgatttcgatccgttgttttacgtggcgacgattcatcgcttcgcatgggagctaattcaagactttagctacgatatcagagaatggttgcgaacgaagctcgccgcggacattgtcgaacttcagaaggcagaagcaaaaggtcgcgcaggaacgcaagcttcaattacgcgtcttgctcagattgactccaaaacgaggcgccgtctgcagctcgatacgatcaaatcattcgtttacagcccgaccggcgagaaccgggaggccaattctctgaatcattcagaggtcatagaactttgcgcagactttcttttgtctaagccgttaatgcaatggatactagtagggcggttcccatttttgctaatcgatgaaagccaagatacgaacaagcgtctagtcgatgcgttcttcgctacggccgtcaaacatccagaacgcttcgctcttggcctggtcggagacgtgatgcaacgcatctatgccgacggcaaagagaaaattgagcaaggtttgccagagtcatgggcaaggccatccaaaaaactaaatcatcgatgcccaaaacgcattgtacgactgattaatcagattcgatccgctgttgatgaccatgatcaggagtccagaagcgatgccatcgaaggttttgtccgactctttatccgacctgcgaacactcaaaatcgccaggctgtcgagagcgccatccgtgctcagatggcagatattaccgacgacgaacaatggcgatcactcgatgattgcaaaatccttacgctcgaacatcatatggctgctacgcggcttggcttcgaaggtattttggaaccgctgcttgctgttgaggcgtggcggacgagtcttctcgatggaagcctgcctgccacgcggttttttacacagaatatcctgccattaatcgaagctgagcaacgtcgcgacaagtttgctgtcgcgagaatcgtgcgttcccgctcaccattattgactgttgaagcgctaaaggattcccccgatccgggcgcactcctgcgccgagcacaagatgcggtcaccgcgctaatgtccctatggaaaaatggcctgcctacctgtggtcagattctcgacagtgttgctgcgagcgggcttttcactcttcccgaggtcctgaaagccattgtcgcattgcgatcttctcaagggaacccgcaaacggatgaggccgagaaggcggatccagttacggaagaaactaccgctctattgggctttttagacgccccatttgagcaagtcggtacctataacacgtatgtttctggccaggcttctttcgacacccatcaaggcgtcaaagggctggagtttgatcgcgtcatggttctcatggacgatgccgagacacgaggcttcatgttcaactacgagaagcttttcggtgcgaaagctccctcaagtaccgacattaaaaatgctcaagagggcaaggaaaccgggttggatcggactcgccggctattttatgtgacatgcagtcgtgcggagaagagcctagcgctcgtggtctatacggaaaatcctgcagcaatgaaagcccatgttcttgctagaagttggttcgccgaagacgaaatagacgatgaatcttga

SEQ ID NO: 80400 - DNA, 2364 bp, Collimonas pratensis
atgcatattgcatactttgaaatccagaactatcgaaaattaaagcattctcgtatcagtttgacggatcgtgagactgtattcgtgggctctaataatagtggcaagacgtcagcgatggacgccttaattttttttctcggtcaacgatcgaggaagaccatttcagatacagagcagccttctggtgcaggaaaaataatcgctgctgatttcacgttatcaaactggaatgctatcaatgagttcggtatcacatggctgaccgctgctgctcaagggattactctgccagaatggcagtgcctatgtccctcattggatatttggttagacgtgaaaccggacgagatccatcgtgtcagtcaccttattccgactttgaagtgggcagggggcacgcttggtgtccgactggtgtatcagccaaaggatattggcgctttaaaatcggcatttctacttgattttgaatcggcagctaagcttttggaaacagccaaaaagcaattgcagaataagcagcccgccgacagccttaagttatcgatatggccgtcgaccttgcacaactatctagagcgtgagatttcgcggcatttcgaaatcaaggcatatattctagatccggctaaagcgcagtatgttggcggtaaaccttcaatgccgcaactgttaacggatgataatccatcgctgccatatccatttaatggactttttaaggtcgatattattgatgccgccagaggattttcggatcctaattcatcaatcgcgggaggtaataagagcgctagtgatttggcttctcagattaataaatactacaatcgtcatctcaatccctcggatttgccgggcgatgaggatcttgatgctctccgagcgatagctgatgcgcagcacatctttgatgagcggctcaataatgccttcagcccgacgttaggggagatcaagaatttgggttatcctggattcaatgacccgagcattcgactgtcgagtcgggtaaatccaattgacaatctcgatcacgaagcatccatactttttgacctgcagaaactagcagaagataagagtctccctttactttcgctatctgaaaaatacaacgggctcggatacaagaatttaatcgccatggtctttcggctcgtcagctttcgagatcaatggatgcgcgtagggaaagctgcgaaacgccgcgttgaagaggacgcggtcatcgagccgctgcatctggtcctgattgaagaaccagaagcacatttgcacgcacaagttcagcaagtatttatccgcaaggcgtttgacgttttgcgtaatcatcctgatctcaaggaaccgtcctcacttacaacccagatggttgtaagcacacactcaagttaccttgcgcatgaaattggttttgagcggcttagatactttaagcgcaaagctgcaaagcctggtgctttcattccgactgcagaggtagtggatcttgccgagacctttggcgagacagcaaagcaggatgtcaatatcaagcagaccgcccaatttgttgcgcgatatctgaagtcaactcactgcgatctgttttttgccaatggaatcattttggttgaaggcgccgctgagcgcatgctgatccctcatttcatccgcaagcactacgatggccccaagggtcttaaccgtagttatatttcgatattagaagtcgggggtgcccatgcacaccgattgaaagcactgattgaaaaattgggcattcctgccctagtcattaccgacactgatgctctcgaggccagggttaatgctgaaggagagaagctgccagcaatagctgttcgtccagaacgaaataagggatacaagactggcagccatacgttgaaaaactggatctgtgttgctgatgactcgttggacgcagtgctcgacttgggggacgcggcaaagacaaaggaccatgttcatgccgtgtatcagtgcggaattcaagtggattttgacggaaccggcccagtagaagcgcttccctacacgtttgaggatgcaattgctttgacaaatccagagctcttcaggaacattaaaaagcctgctgggatgataggtaaaatgcagaaagcgtttgcgtgcggctcattagaagaatgctgcaaagctctttttgtagcccttaaagaagacaaagctgcaatggcgctagacctgatgttttgtgaggaccctgatctactcgcggtccctaaatatattaaggacggattggactggctgcaaattcagcttgagattgcaagtaaagacattacaccagaagtgatccttgccgcagatatggggggtgcgaaatga

SEQ ID NO: 80401 - DNA, 1863 bp, Collimonas pratensis
gtgtgggatgacccgattgacgaaaaaatttatggttatctgaactttgcgaagcccgagagtttcatgttacttgcaggagcgggttccggaaaaacgaaaacgttagttgcagtgttggaagcgattaagcaagagcacgcgtcacgcctagctcttgatggacaacgcgttgcgatcataacttatacgaatgctgcctgtgaggaaattaaggataggctgaaacgtgatcctgcgtttagcgtatcaactattcacagcttttcgtgggagttgatcaagtcctttactccggacatccgcgcatggctaagagaaaaatttgtggccgacatagcgaaactcgatatcgatatcgggcgcgctcgtgatctggaaggagtgacggccagaagaaatatcaggagtagggaggggaaaaagaaacgcttggagtcgctcgacactgtattgtcgttttcgtacactccaaatagcattagtacagaagtaggatcggttcaccattctgaagttgttggattagcggcatattttctagcgaatgagccgctgatggggcgaatccttgtgaatcaatttccaattctgttaatcgacgaaacccaggacaccaatgccgcgttgctggatgcacttattgccgtccaggccgcaaactccaagaactttagtattgggcttttcggggatatgatgcagcagatttttggtggggggaaaacagatctggttgaaacgttgccggttacttggttgagacccgaaaagaagattaattatcgttgcccccgacgagttataacgctgatcaacaaaatccgcttgctcgatgatcctcatcaacaacatccaggccccgactgcatcgagggtgctgcgattctgtttatagcaagctctgatagcgccaagagtaaggcagaggtcgaggcaattgcgcggcaagaaatggtggatagaacgaatgatgcgggttgggagtcaaagcttaaggtcaaaacgctcacactagagcatcatatggctgcggttcgagggggatttgacgattttttggttccttttcttgggatcgaccacttgaaagacgcggcgctgagtggtgatagtaaagagatcaagttcatccgacatgtcttcttgccacttataatcgcgatcaaatctggcgatgatttcgcaactgcaaaagtggtccgcgaccactcgccgttacttaagcctgcgcacttacgtggtcacgccgaccccatcggcgaaattcgtgcagcaaatattgttgtggaacacgtggcaacggctctcgcaaaaaatcctgagtgctccatcataagcgtattaaaaataattgaagcgggaaatcttctaaccatcccggatgactttcttccatatttgatcgataagccaaaggggcctgaggaaggcgtggaagataatgagttggaaagcgccgaatctaaagcgtgggattcggctctcagtgctgcagttggtcaagcagaacgatatgtggattacatatcggattcctctaactatgatacgcaccaaggtgtgaagggcttgcagtacgaacgtgtcatggttgtgctggacgacgcgcaggcgcgaggttctggttttagctacgaaaaattgttgggtgcaaaggcattgtcagccgacgacttgaaaaacgaacgcgagggcaaagacaccgccgtcaagaaatctcggcggctgctttatgtgacttgcagccgcgctcaaaagagtttggcggttgtggcatacagcaaggatccacaggcgataaaggactatgttgttaaatcgaaatggtttgaggtggacgaagttgttagcatcgagtga

SEQ ID NO: 80402 - DNA, 2328 bp, Collimonas arenae; identical to SEQ ID NO: 80398

SEQ ID NO: 80403 - DNA, 1896 bp, Collimonas arenae; identical to SEQ ID NO: 80399

SEQ ID NO: 80404 - DNA, 2043 bp, Leptospira santarosai
atgtatattacagaaatagaagttaaaaattttagattgcttaagaatgttcgtatttcgcttcaagagacttcaacaataattgttggtagaaataattctgggaagacgtccttaacagaaatatttcgacgatttttctctgataaaaaaattcatttctatttagaggattttcacctttcctctttggctttattcaaagaagcattgactgttaaacaaagcggcggatcggaagaagatattcgcaaaatcataccgaaaattgaattaaatttcacaataaactacgaagacgataaagcggattttggaatattaagtgattatattattgatctcgatgaaaattctacaaatgtaaatataaaaatctcatacgaaatcgctgatggaaaaatcggattactattcgaagaattgtcatttgaaaatgaattagattcttttattagaaaaatgaaggaacgaattccagctttattttcaactaagatttatacaattgatccaactgaccccaataatcgaacaacgattgaatattctaaattaaagaatctaattaacgtggatttcatttcggcgcaaaggggtttagatgatattacacaaaatgagaaaaatatactcgggaaagctctcaataatatatttagaactgctgcaacagaatcagctccgccggatatgaaaaaaatctctcaggagttggaggagataatacaagaaattcaagtaaaagtagacactgattttaaagaaaaagtagattctttaataccttctttgaataattttggacatcccgctttatccgattcaaaactaagtactgaaacaacattgaacattcaatctttattggatactaatacgagaatccgatatttaaaagctgaaggtatctccttaccagagtcctataatggattagggtctcgaaatttattgtatatgattttccaattattcgattattttcgaaagaatcaatctaattcgattcaagcaaagagtcatttaatatttatagaagaaccagaggcgcatctacatccacaaatgcaagaagtatttattaaacagttagaggaggttgcaaatgacttctctgttaaatttaataaaaacataaaatggcctgtacagtttattgtaactactcactccacccatattgcgaatcaggctgattttagttcaatacgatattttaaaacttcaacgaataagcccctccagactaatattaaggattttgggaaggaatttaactcagaagatgcaaaggaagatagagagttcattcataaatatttaacacttactcgatgtgacttattttttgcagataaagcgatgctaattgaaggtgctactgagcgcataatgatgccaattattgtgaataaaattgatagagaggagaatacttcgctattcaatcaatactattctgtcgtagaagtaggaggggcttatgctcatcatttttataagtttatagatttcttagaattaagaactttatttatcacagatttagattctacaaagataggaatttcatctaaaggaaaaaaagttcatatagcttgtgaagtttcggatggaactcactcaagtaacgttggaataaaggaatggtttaagactaaaggagaaatattagatttaaaagaaataaggcgaaaagagccaactgaaaaaataactgggagtagaagacttgcattccaaattccagaagaaaattcgcgagcttgcggtcgtagctttgaagatgcatttctcctttctaatcgggaactttttgacttggcagactttgaagaagataaagttgaatccgaagcctttagtcaggctgaaaaaattaaaaaaacaaattttgcagttaaatattcattagaactcacagattggaatgttcctctttatattaaagagggcattatttggttggcagaatttgaaaacaaagggttgacaaaacggaagggctccaaagcgaaaattaagaatgaaaagaattag

SEQ ID NO: 80405 - DNA, 1755 bp, Leptospira santarosai; identical to SEQ ID NO: 72553

SEQ ID NO: 80406 - DNA, 1761 bp, Bacillus atrophaeus
atgcagcttaaaagcctaactatagagaattttcgaaactttgaaaaagtaagtatagatttaacaaatcaaaatgtttgttttggaatgaatgatgtgggtaaaacaaatttgctttatgctatcagattcttattagatagagatattcgtaaaaatggctttaaagaatcagattattttagaaatgaaagagacagagtaataagaataacattaggtgtcgatttatctgatcgtctaaaagatgaagattcccagcatataatagccaaagtgggaggggcaaggtcaagtaatgaattagataactttttttttcaggtagaaggtacttatgatattagtgaagaagttggaatacctaaaatttattggggaagtaatttaaaggatttggatgaaataatccaaaatggaatatatagcaatttggataatttatttaagatcgtatacgtagatccaacaatagatttagaaaaaactttctcaaaaaatagaagacagctatttgatcaaaacaaattagatgataatgatattacaatttccaatgagattaagactttaggaatagaaatgaacaaaaaaattagtagtatgggggttattcagtcttttcaagatactataacagaagagtatagaaaattgaaaaaggaaaaaataaatattgaaatgaaatcagaaataaccattaatggatatttcagtaaccttattccatatataaaaaaagaaaatgatgataatatttatccaacttcaggagacggaagaaagaagattttagcttactccttgataaaccatcttattcaagcacaagaaggaaataaaattattattcatttagttgaggaaccagaaaatagtttacatagatctatgcaaattgctttatccaaacaattatttaactctaaagtatataaatacttctttctatcaacacattcttctgaactactgtatgagatggacaacacatcgttaataagaatttattcagaagatcggataaactgtgattcatatatttataatgttagtgaagaatataaaaatgtaaaaaaagaacttaatagagcattgtcaacagctctttttgctgaaaaagtacttttagtagaaggtccttcagaaaaagtattatttgaaaaaattttagaaaatgtatatcccacatatgagttagatggcggttacatattagatgtaggcgggataaaatttaaaccatatgtagatgtattgaaaggtttaaatattactcctatagtaaaaaccgataatgacttgaaatcaaaaagggataataaaacaatttttgatttaataggaattaaacgatgcttaaaccttattaatgatgaagagaattctattgagccaattgagattgaatattttgaaaatgatgcgcaaggaaaaagggttccgaataataaagtgaaaaaacaaaagataaaagataaaaagttagaattatatgtgttatttcaagacactatagagcattttaaagaaaataatatatatttgtcaaaaatagatttagaacacgacctctatgaagttattggagacagaatggaagagattttaggttcaaaccctataaactaccttcaagatcataagctacttaatatgattgaattaactaatgaattaacgagaacagattgtaacaacataattaatcatcctttatttgaatctttaagaaagttggtgccaaatgaagttgattga

SEQ ID NO: 80407 - DNA, 1548 bp, Bacillus atrophaeus
atgaagttgattgatcaggaagatagaactgcaattttagaaaataacgatgatatagttgtttcagctagtgcaggctctggaaaaactacaattatgataaagaaaatgggaattgaacttgaaaaaataacagaccaccgaacgatagcagctattacatttactgtgaaagcaactgatgaaattaaaaaaaaagcagtaaaaaatattaagaaaccctttgttgttatgacaaatgattcttttattgagaatgagataattagaccttttattaaagatgcatttggtaaagattacggaaatgattattctgttgaatatggaaatgaatttaaatttgataattattcatctggactaaaccagttgagaaataataatattttaggtagttttgaagataataaacgcaatttcaattttaaagttgctaatgatattttagaaaaatcattagctgcacaagaatatattaaagcaaagtattcatggatctttatagatgaataccaagattctgatagggacatgcaccgtttttttatgaagttaaaaaataagctaaacataaagttatttattgttggcgattcaaaacaggcaatttatttatggcgtggagcaatgagtaacatatttaaattattagagaaagaaagttttagctcttatgaactcgtaaccaattttcgttgtgataaagaaattgaaaactatgcaaacctgtttcataattcgcaatattatttacacttatctgagaacgtagagaatgtagtttttaaggaatacaacacttttagtaattattatgagcgaagggattttgtcggttttatagatgaattcaaaggacttattttagaaaaaactcttgagctagataaagaagtaacaataatcgccaattataatgatgatgctaagaagataacggagttattaaatctagaagggtttgattttgtttttattcctaagaccccaattgatgaaggcattcctaatggatacttattaaaagaacttgcattattttcaaagaattcaacatacacaatctatgattttttagaaaatacccatattgatgaaagaattcgcacgagatatgaagttaataatattattgggaaactaaagaagaatacaaatccagacatagttgaagaagtagtttctggcttagccaattatttggaaatatcaataggggaagatgaaatcgaaaagttctgtgaaagtatttgtgatagtaaatatgatatggctttcagattaatagaatcaaaacacaaagtaatgacggtttttgcttcaaagggattagaatttgagcaaataataagcttttcacgctattataaaatttataaagatgaaaatttgcaaaatcactatgtatgtattacacgggcaaaagaaaagtttattatgttcattgatgataaaggatactacgattttgttttagaagtagcagacagcaatggtattaaaaatatagaaaaactaattagatataaggaaagttgtaattag

SEQ ID NO: 80408 - DNA, 1950 bp, Mycobacterium simiae; identical to SEQ ID NO: 74516

SEQ ID NO: 80409 - DNA, 1893 bp, Mycobacterium simiae; identical to SEQ ID NO: 78953

SEQ ID NO: 80410 - DNA, 1956 bp, Ralstonia solanacearum
atgcacattgagcgagttgtgctggagaattttcgctgcttcggtccgcagcggacccaggttgtccttgacgccagtctcgtcgcatttgttggggacaatggcactggcaagactgctctaatgcaggcattgcagcgcatgttcggcgtaacggctgagcaacgacgactgcgcaagcaagacttccatgtccccggcgacgagaccgaccggccggtagcccgcacactggtgattgaggccattgtcgcgtttcctgagcttgatatcgacaatgacaaccccgctgtgccagcgttcttcaagaacatggccgccgaagaaaacggcagccttaaggtccgcctgaggctgcaagcgacgtggtcagacgatggcacgttggacggggcgatcgaagagtcctactgcgccgtccagaccttcggcaccttcgatgagagcgacctgcagcagctgcgcggacccgatcgctcgcgcatccaactcatctacatcccggcgacgagggacggagcatcgcaggttacagcgtttgtccgcggccggctctggcgggccatcaactggtcccaggaggtcaaggattcgctaaccggcgcaggtaacgaggttaatcagacgttctccgctgaagcggccgtgtctagcatcagcaccacggtaacccaacgatggcaacagctccattcggctggcaccgatgcaacgccgatcttccggccagtcgacacccgctggcaggagttcattcgtcgtgtcgaggtcgtcttccaccccacagaggacggacatgaccgagcactcgaggacctcagcgatggacagcggtcgctatttcacatggccatggccgccgcgacattggacatcgaggctcgcctaacaggtggcgacgcgccagagggcttcgcggcggctggcgttccactgcccgcgctgaccatcttggcgctggaggagcctgaaaacaatttggcaccgttctacctgtcccgcatcattaaacaggtgcaggaaatcgcaattggcagcaatgctcaggccatcgtctcgagccactcgcccagcatcctcgctcgggtcgatccctcccgcgtgcggcacttccgtttaaacctgcacagccgttgctcagaggtgcgacagatcagcctgccggctggcgacgaagacgcgtcgaagttcatccgggaggctgttcgggcctatcccgagttgtactttgcgcgatacgtcattctcggcgaaggtgccacggaggaagccgtgctgcctctgctggccaaggccatggactttcccatcgatcggtcattcgtcgccgttgttccactgggtggtcgccacgtcaaccacctgtggcggctgctggccgatctccaggtgccgtacgccaccctactagaccttgactggggacgcagcggcggtggttttggtcgagtcaagacggcgtgtgaacaactgctgggcatcggccaccggcccgaagaagtttttggaggagctctgcggccgggcggcccagaggagagccttgcagcgatcgcggccttaaacccggcggacatcgttacgctacgccgttggatagaatggctggaaaggttccgcgtctatttctctgacccactcgatctggactacctaatgctgacagcctatccgttagcctatcgagtgctcgaggctggaatgcgaggcccggcagggaggggggatccgcgagatgctgtgctgggtgaggacggttccccgaatttctatgatggcgctacagacgatgcgctgcgctggtatcggtatcttttcttggggcgaggcaagcccagcacgcacgtcagggttttgagccgtctcacgcaggctgacttggtggccgcgatgccgcagcctctgcagcgcatgctagcaaacgtccgggacgcccttgagctggccacccgatga

SEQ ID NO: 80411 - DNA, 1896 bp, Ralstonia solanacearum
atgacctggcggccagtaacacccgaaacgtggcgtcctcgcggcattccgaacctcgagcccaacgcctgggcggccttgcgtcggacagagtcaacctctgtggtcgccggccccggtgcaggcaaatccgagtttctggcgcagcgcgcggcctacctgttggagacgggattatgcaaagcaccgcaacaaatcctcgcgatctctttcaagacggacgccgcagcaaacctcgcagcacgcgtacgcaagcgctgcccgcccgaactggcggggcggtttgtctcactcacgtttgatgccttcaccaagagcctggtcgaccgtttccatgcggccatcccttcgcattggcgtcccactcgaccctatgacatccgctttccgactcggcgtatggtggaggaagagttgaaccgcatccgtcgcatggcaccgcaggcctggcagcctaggatcgcagcgttctcttcggccaccttcgaagcgcaggatattgggagctatcgtctcgcgacggatgctcactatcaactcacgacggcggaagagttcgccatctatcactggctgcaccagcagttgttcggcgcagatgtatcccagttgacgttcgtcatgttcaatcgcttggccgaattgattgtgcgtgcgaatccacggatcgctcgcgcgttgcgtatgacctacccctacgtgttcgtggacgaatttcaggacacttctttcgctcaatacgattacctgctctccacatttggccagcaagggactgtcgtcactgctgtgggcgaccacaagcagcgcataatggggtgggccggcgcgcgtcaggacgcgttcgagcagttcgaggccgactttggagcacagcgagtgaacctgctcttcaacttcaggtcatcaccagagttggtgcgcgttcagcattttgtcgcccggacgttggacccgcaatcgccacagattcagtctcaagcagcaagccaactggacagggatgtcgtgcaggtgtggaagtcgagatccacggctgccgaaacgcagcgcctcgcgcaatggattgcgacagacatggccgcgcgccagaagcacccacacgactacgtactcctagtgcgtcaacgtcctgatcagtttgagcaagaaattcagccgacattcgcagcagttgggctcaacattcgcaacgagagtcggatcattggccggaccaacgtccaggatctgatggttgacgaagtggcttccatagccttggcagcgttacgcctagcgaccgggcagcgtagcgccacagcgtggtcgacattctccggcgccgtctatgcaattcgaggagttgccgaggacgatgagctattgcggaatcgagccgatcgggacatccagaatttcctcggcctgcttaggcaggacattcggggccaggctccctcgaccgaactggcggtgcaaatcacgcagcggatcttcgaatttttggatgtagttgcaatcaagggcgcatttgcggcatacacgcgcaacgacttgctcgaaatcatgatcgagggcttctcgctgcacctacagcaggcggccgccacgacggccagctggcctgaatgcgtcgaccggtacgtcggcacgcatgacatccccctaatgacagtgcacaagagcaaggggctggaatatgacactgtcttgtttgtcggtctcgacgatcaatcatggtggagtcacacgcctcgaaatcccgaaggcatcgcaactttcttcgtggccctatcgcgtgctaagcaacgcgcaatattcctattttgcgagcaccgcggcgcccgcgaaagggtctctgatttgtaccaaatgttggctgacgccggcgtggaggaagtcgatgtcaactga

SEQ ID NO: 80412 - DNA, 1962 bp, Zhongshania aliphaticivorans
atgcatatagagtcattatcgttaagaaatttcagatgctttggagacgttgcaacaacgattcaatttcagcctggcataacgggtttcgttggtgataatggagccggaaaatcatcagcattggaagcgttgaaacgccttttttcacctctatcgagtgagcgtcagttaagaaaagcggacgtacactttggagtcggtgaagatagtcagtctgtggctgagcgcgagatcatcattgacgtcgtatttggtttttctagccctgatgttattccccacgtttttaacgacatatttttcaatgcaagtgatcaggctttaaaggtacggctagttcttgagggaaattatttaaaatcagagtcttacgaggatgatatcgagatcaagctctatacggttcgctcgctggacgaagttccctttggtccagacgatgagcggaaaacacccctgcgtggtaagtctactcaatttgccgagttggtatacataccagcccatagggattccttgggcgtgacccgtcatgcattaaagaatgtcttgaaacggatagagcgctctgcagactggaatgaagagaccaaaaatcaatcacaagaatttgcaaaacaacttgaaaacagtctcaacgctgtaacagctatcggtacaacaagccacgacctcaaaacattttggggtgccctacatgatggtcattacgatgcagacccactcttcagtgttgtggcaaccgaattcgaacagttgattcgcgatctaacattacggttcgaaaaatctcctgggggtggtaaccgtcagcttgaagagcttagtgaaggtcaagtctcgttattgtattttgccctgtctgctacgctacacaacttaatttggaagatggaggctgctgcgccagctagccttgaaggctttaaacctcttgactttgtacctgcgccattaacaatttttgccctcgaagaacctgaaaaccaccttgctccgttttacctccctagactaatagggcttttagaaagccttataaaaacaggcacagcccaatcgtttgtgactagccactctacaagcgtcatggcgcgtatttctccgcgaaatgttaggtatttcaggaattgtaatcaaacgcttatttccgatgttcgagaaatcccattgcccactagcggaagcgaagaggataatttccttcatcaagttatcttggcaaatccagaaatttatttcgcccgccttgtgataattggcgaaggtgatagcgaaaggattgttattcctcgaattgcagaggctttaggcatatcactagacccctcatttgtagcatttgttccaataggtggtcgccatgctcaacatctttggaaacttgttgttggtctcaatataccttgtttaactcttttggattttgatcttgggcgacacaatgcaggcatgggaaggataaagaatgccgcaacatggcttaacgatgcaggatatgatctagacccttctgctgtcatttctaacgaagctttaactccggaaaatgttgtaccgtggactcagtggttacgggcgcaatgggtcttttattccacatggctagaccttgacatgatgatggttcaagcctttccggaagcctataagccgagtagagcattcgacccaacaaaagatgaccctagtaaaatagctgaagcagtttttggcagcagtgggttgggaaatgcagagcttaaccgtatcggtgctcagttttcaactgaagagctttttgcatacaaaaacctgttcaagtcccggtcaaagccagcttcacattttaaagctttggccgcactggatgatgaggcaatcagaaccaattgtcccgagccattaaaggccttgattgcaatggccaagatcattcttgcgcctccatcatccatctgtgctggggaagaagaatga

SEQ ID NO: 80413 - DNA, 1860 bp, Zhongshania aliphaticivorans
atgacctacctgaaggcagatgattggaagccttcaccgggcatacgaattgaaggccgggccctagaggtcgttaaggccgtggaaccaatgtcggtgctcgctggcccgggagcaggaaaaacagaattactggcacagcgagcaacctttttgctcatgacgggattatgtcctccaccgcaacgcattcttgccatatcttttaaggtggatgcagcaagaaatcttggggacagagtaactcaccgttgcgacccaattcaggccaagagatttgaatcccttacccttgatgctttcgctaaaaggcttgttgatcaatttttagaatcacttcccgatcaatggcgccctagtcatgactacactatagagttcccaaaccgagatgtttgggaggaatttaaattaaaaaatgaaagtgactactcggaagttaggagcaagaattcgggtcagcttgacagaattgttcacagatcaattccagatttccaatttgaagaggcggtaaccccggagcaacaaattcagtggttatggtggcgacaacatattgatgccaatccgtctcgcctgactttcgatatgataaaagcgttggcggttttaattcttcaaattcagcctaaaattttatctgctttgcgaaagacttactcacacgtgtttcttgacgaatttcaagacgtaacagctcgacaatacgaattgataaaaacggcatttctcgggtcagactcggttcttaccgctgttggggattctaaccaggcaattatgagatgggcgggtgctagggaagatatatttaatctatttgaggctgatttcggcgcatcggacgagcgtcttccttttaattttcgatccaactcccgtatcgtcaatttgatcaatgatttggcgactactttcgatggcgactatattccgacagaatgtgctcgccaagacgatcctgttccagaaaattcagtcgaaggctgggtgtctgaaacaaggcaagatgaaggggagtatatagcgtcattcatagctaacgagcttcagaaaaacgctgacctagctccggcagattttgtggtattggcgcggttacggataaatgatgtcgaagatcgcattaaggtggcctttcaaagtaaaggtttgaaaatcaggaatgaggcaagagctgttggcggtattgccattcaggatttggtgaaagaaaaggcttacacattttttcttgcctcgctcaaactcgcggtaaatgttcggtctggccaaccatttcaagattgccgaaatgctattgcagaagtaagaggtgccgacctagatagcgaaaaagggcacagcgagacattgtatgctgttcgatgcttaatagatgatctggagcagctagtcaggggtagaagcccagcggaggttaccggtagggaaatagtcgatatcttgttaaatcatgtcgagcgcggcgaaattcaaagaacatatagggagtatgcgggcggcgagcgcctcaattcggctattctcggatttgcggagtattttgacgaatgtcgtgatggttcaccttcttggtctgaatgtatatctaacatggagggtacggaatctgtccgcttgatgaccattcataagagtaaaggactggagtatcacacagttatttttgtcgaattcaatgacgacgctttttggggaaatgacgatgatgtgaacgtattcttcgtagcgttgtctcgtgctcgtgagcgtgtacttttttctttcactaaagactccaaaggagctcaaaatgttaagggcttcgtaaaaatcttaaaggatgctggcgtaatattcattaaaaaacaataa

SEQ ID NO: 80414 - DNA, 1917 bp, Pseudomonas sp. ABFPK
atgaaactgcacagtgttcgactgagtaattttcaatccttcggggagccaacctcgatttcatttgaggattccacctttctgatcggcccgaatggagctggcaagaccgccgtcctacaggctttatgccgaatgttttgcttcgacccgtctcttcgtcgaatccgacgctccgatttcttcgttcctttcgatgaggtggaggcccctgaagagcgctctctttggcttgaagccgactttctcttccctgaactgctggaagaggaagacaacgcaaccgtagcacctcacttcgcccacatgcgcatggactttccagatggcattcctcgtgtcagatatcggctggaggccacgatggggattgccggcgatatcgaggagtcgcttttatacgtattggatgccagcgatgaaggtgttgcgctcggcactacaccagtgacccgacatcatcgcaatgccatccagatgcattacctacctgcaaggcgtgatccggctgatcacataacctatggggccaatgcgttgcttggccgtttgctccgagcggtggattgggagttggatcgaggagttgttcaagaactcactgataagatcagcgagtcgctatcctccaacgtatccatcaaggcattcagcgaaatcctgagcaccacgtggaaggggctacaccgtggcaccttcttctctgacccgaagctgactttcatcacgtcggaaattgagtctctgctccgtcatatgtcggtgtcattcacacctggccacgacgagaatctagtggatttctctcgactgtctgatgggcagaaatcgatgctgtacctctctttggttctgtcatctcatgcaataggtcgcgcagtgctgaaaggggagtcgaaggcattcgacgtacagcggctcaagccaccatcgttcaccctgattgcaatcgaagagcctgagaacagcctttctcctcactacctggggaggatagtcaacgctttgaacagctcgattggcggagcagactcccaagcgttgattgccacccacgcgccctcgatgttgcggcgtgtagaaccggagcatattcggtacctccggctcaatgaaaatcgtgtcaccaaggtgtcgacgatccagttgcccgaggatgatggagatgcccgcaagtttgtcagggaagccgtccaggcgtttccagagatatatttctctcgcttagtggtgctgggggagggtgacagcgaggaaatcgttcttccacgaatcctcaaagctaagggagcgcccgtcgacgagtctgcggtcaccattgcgccactcggaggtcgccatgttaaccatttctggcgactccttgagggtttgggcactccgtatctaacactgctagatttggatattgcccggtatcaagggggctggggccggattcactacgttaacaagcaattgaagctttactgcccggcgcagcagctacctcccgagtggccgttacaaaagtggaatgccgtgggcatgccaatcagaaaaaactcccgcttcggcgatctcaagctttcgacagagcttgaaaatcgcggagtgtttttctcttctccgatggatctcgacttctcaatgatcaaggcctatccaaccgcctatggagtagagcgtgcggcgccggatgaggataccctcaaggccgtattgggtaaaaaaaggcatgagccagagcagtattctgaagaggagcaagagctattcgcctcttatcattccaagttcaagctcggtagcaagcccgcagctcatatcgcagcgctcgccgagctgtctgacgaagaccttctaaagaatctaccggcctcattcaacaggcttgctgatgcagtgattgctgccctagaagggttgccggaatga

SEQ ID NO: 80415 - DNA, 1665 bp, Pseudomonas sp. ABFPK
atgaccgccgtggaagcttggttgcccgctgacgggttaacacttgagaagaatgcgttgctcgcggtcaaggagctggagcaatcactgtctttgacggcggggccaggagccggtaagacggaggtgttagcgcagcgtgccgacttcttgctcagaactggcgagtctcgataccccaagcgaattctggccatctcattcaaggtcgatgcgagcaagaacctgaagcagcgtgtccagaagaggtgtggtttcgagctcgcatcacgcttcgatagccacaccttccatggctttgcaaagcgcattgtcgaccggtttagaccggtattggagggagcggactacctggagcctggctacaagattggtacccaatacgttcgtgggaagcagatcaagttcgaccaattaattccgctggccatcaagatactgtcctcttctgcgatggctcgcaacgctctctgccaaacctacagcgatgtcttcctagatgaattccaggattgcaccactgagcaatacgagctgctgcacctaatttttctgggtaagcctatacgcctgacggctgtgggtgatgtgaagcaaaagatcatgggatgggcgggggcaatggacggcatctttgctcgatttgtcgatgactttggagcgaagccccttcatctcttcagaaacttcaggtcgaagcctcgcttgctacgtatgcaaaacgaggtgattcgagccctcgatcctgatgccgtcatggccggggagcttatcgccggcgacgaaggggagatcattgcttaccactttgataactctgaacgagaagctgcttacatcgtgaatacgattcgacagtgggtcacggttgaccagatccctctacatgagatcgccatcctgttctcccggcaaattagcgactacgggacattcataatggaaggcttagatgcagctggcattccatatcgtaatgagcacctatctcaggatctggtcaatgaacctgtagcacgactgatcatcgactacctcgcttgcctttacagaccgagagagcctaagggttggatgcgattgatggaacagttctccgtagtcgattcagaagacaacgaatcaactgtgcagacaatctttgaattgatctacggagctcatcggaagcgcgtcaaggcggtagctcggtctgctcagccgtatgattcctggtgggatatggcccaagaattccttgagcaagtggggttgcccttgttgacgtcactgtcgccagactacgaagcaaaagcaaggcttggagaagtcgtggatcagacccaccaacagctcaatatgctctacgagcaaggttccgatcttttgagtgcattggatcggttctccaatgatcaggcaatcaggctgcttaccgttcacaaaagcaaggggttggagttccactcggtcatcatgccagcgattgaaacgcagacgttctggggaaaaccctacgaggagagatgctcgttctttgtcggggtttctcgagcgaaggatcggttgctgctgacgaactgcgaaaggcgctttacaccgcccactaacccagcaaggtggagtgagccacgtagtcagcatgccgagttcatggggtacgtcgtcccgttcctctccacgtga

SEQ ID NO: 80416 - DNA, 1785 bp, Citrobacter sp. AATXQ
atgcggatttcccgaatccggttaattaatttcgccaacttctccgatgttgatgttgaaacgggtgagagtattgttattgttggtgaaaacaaggttggcaagagcaattttattcgcggcctgcagttgattcttgaccctgggttgtctgagcgtgaccgtcaactgggttttgaacatttttgggatggattgggcgaagacaaattgggggagaccatcgcaatttctgtggatcttactgatttcactgacgatccccgattgatggctcatctgaatgactgtgtcctaaatccggggcccccgatggtggcccgtcttacctaccgttttcagcccaaaaccgagttaaatcgagctcctgaatccttaaaagattatgagtatgtgatcttcggtggcgctgatcctgacatgcatattggtggtgcgtttcgccgtatgttgcccatcgatgttcaaggcgcgttgcgtgatgccgagaaggatctttcaagctggcgtaattcacccttaagaccacttattgaagaactatccgcatctctggacgacgagactcgtgaggagattcaaacccaggttgatgaggctcagcgggaactggctgatcatgctgaggtggcagcgacagccgaacgaattagcgaaaggttgattgctatcgcaggtgagcaacatgccgttccggtatcgctcggacttgcaccgactcgcgttgatgcgctgctacgtagcctgcgtttgctgcttgacagtggcattcgtggcattggcgatgccagtctggggacggctaatctgatttttctggccctgaaaagtctcgaacttgatcgtcttgttaatgacggagaacgagaccatacgtttttcgtagtcgaggagccggaagcgcacctgcatccgcacgtacagcgcctagtctaccgctatttcttgggtactgaccgggaggatggagatgaaggaacacctttgacaacgatcctgaccacccattccccgcatatcgccagcgtcacaccaatcagatccatcgttttgctgcgccatgatccggaggaagggaagacgattgcggtttcaacggcaaacgcaccgtttacgccgcgggacgaagatgatctgcagcgctatattgatgtcacccgcggcgaaatattcttttcacgtggggtgattctggtggaaggggatgctgaacgctttcttgtcccagcattcgctgatgctcttaatattcccctcgatatgcttgggatcacggtgtgctcgatcggtggaacaaatttcactccgtatgtgaagctcctggggccacgggggcttaatattccgcatgtgattctgacagacctcgaccctatgacgggtggagaaccgctggttcgtaggagacttatcaatgtcttagacgtgcttgagggggatgttgaccatgatgatatggatactgatgaggtgattgcatgtgccggggggtatggatacttcgtcaatgacagcaccctggagccagaattgtttatcggtggactggccgaagccatgaagtcggttatcgagcaggaattgtctcctagacgagctactctgaacgagatacaggcgtgggtggatgacacggatttacttgatatagaccgattgttgaaactgattgagcgaattggcaaagggcggttcgcccaggcgctggcaccttcggtgtcggaggatgattgcccggattacattcgtgaagcactggagtatatctgcgatgccgtcacatag

SEQ ID NO: 80417 - DNA, 1818 bp, Citrobacter sp. AATXQ
atgccgtcacatagtgtcagtgcagcctatttagctcaggctgccgagctggccgggaatccggaccagttagccgcgtatcactcccgggaacactgcgtggtgctcgccgggccgggtagtggtaagacaaagacgcttgtgctgaagctggcccgaatcctggctgaggatgttcaagctccacgtggtgcggcatgtatcacatatagccaagaatgtgcacgcgagctaacccgtcgtctcgaagcgctggggctcagagaggcaccgaatctctttattggaaccgttcatgggttctgcttgcgccatctgttgatgccctatggacgactggccgatttgccaatcccatttccgctgtcagtagcgtctcagcgcgagagcgaacggttacttcgacaatccggtgaccgtctctttggcgcaaaccatccctataaagctattgatctcggacggcatcgccgttcggtgttgaatcgcaacagcgttgcctggcgtgcagaggaggaactcgctgcatgggccgaggcctacgaagcggcattgcggcagcaaggtctaatagactacgacgatatggtgatatttggccagcgtctgatcattgagcatgattgggttctgcccctaatacaggcgaaatttccgatcattgctgtggatgaatatcaggatttgggtgtggcgctccaccgtatggttaaacgcctggctttcgagggaggtgtacgcttatttgctgtgggtgatgcagaccaatcgatttacggtttcactggtgccgatggtgcgttacttctagaactagcagacaggagagacgttgaaacagtccggctccagttgaactatagatcaggagcgggcatcgtcaatgcgtcggagatggtgttgggtgaagttcgaggttatcgcgcaaacgacccgaaccgccagacaaccattgcattccagctgtgtccggatggcttgggggatcaggctgtccatgctgtcgagcatattattcctgctgcgttggctgctaagccgggtcgaacgctgggtgacatcgccattctgtacaaggactaccatgctggcgatattgtggccgatgcggtgacaactggcggttttgattacatccgtgtggataccgcagcaccttatcgcaaagttgccttgactagctgggtggaggattgcgcggcatggtgtgctggcggttggcgtatcgggcgccctcaactgcgcggactgatagaccgttatctggcatttcatcgggcaaggctggatgatgcatgcgcccggcgtaaggggcaggagttaaccaagctgctttgggcacttcgtgccgaccaatatcctgcgtccgattttgtcgcgtcgttgcgcaacggtctcgttgattcactgctggcaactgaaccgatgctttctgatcaggctgagcaactagatcgcatgactgctgcacttgccgaaggcggtgcgttagcgatgttggatatcacgagcctaggtggtcgtgacggttcacctgagcacctcaatttgctgacacttcactcagccaaaggttgcgaatatgacgtggtcatcatggtcggcttagatctagggaatttgccgtggcgtaatgagacgccagagaagctgcgtgaaagccgtcgtcttttctatgtggggctgacccgcgcacgggacgaagtgcatatgctgtattccggttttgttgacggtcgctatggccctatgcgtctggggcgttccccatttctggacgaactggaggcgcgaatgcgaggggcaggtttacgatag

SEQ ID NO: 80418 - DNA, 1785 bp, Citrobacter sp. AATXR; identical to SEQ ID NO: 78496

SEQ ID NO: 80419 - DNA, 1782 bp, Citrobacter sp. AATXR
atgtctgaccgccgcgcactttcagaggctctgaatgagctattgccgaacagagagcagtacgctgcggccacataccccggccactgcgtagttattgctgggccaggcagcgggaaaaccaaaacacttacgactgccatggcacgtgccctgattgaagaggtcgctgacccccgaggcgtggcctgtattacttacaacaatgaatgcgcttctgaacttgaaggacgtctggcatgctttaaagtcattggcgatgagcggaactttattggcaccgtgcatagctttgcattaaatcaggttttaatcccctactcacgatgtataccgggtttgctgccggatgattttcgtgtggcgaccagagatgaaagtcgcgcggctgttgaagtggcttaccaggctagattcggatctgtcggagatcctcatgcacggtggaaatttgcagaagagaaacgacgccgggatgtgaaccgactcctaccggcttggcggaataacaatccggagctggcagattttattgaaggttatgaggcagaacttcggcgcttaggactgattgactttgatgatatgccactcatcgcttttcgtattattagcgagcatgaatgggtacgtaatgctatccggtcgcgctatcctgttttgtttgtagatgaatatcaggatcttgggcacgctcttcatgagctggttctgctgctgtgctttaacggtggaatacgattatttgcggtcggtgatgcagatcagtccatttacggatttaatggtgcaaatccagggctactggatagtcttgtttcacgggcagatgtaagaccgttccgtcttcgcttcaactatcgatctggcgcgaaaattatcagggcatcactaggggcgctgggagaagaccgcgattatgttggccccgatggtaatccagagggagagttaggattccatggaattaatggcgattatgacgcacaggcgcattttatcgctcatgatctaattccttcgttgtttgaaagagggtttcatcctgaacgcatcggggttctttaccgggcagcctggcttggcgataaagttgcggatgagttcaaggccagaaatattgccataatacgtgctgacagtaatgctctcattaagcgcaattctcgtcttgcccgtttcatcgaagcctgcagtcagtgggtaactgggggatggaaagaagcctctccactatttaacctcttactgggtcaggcgctctttcttgtttatggccgccgcgcaagccgtgctgaagaacaattactgaccgtacagctcatcacttttttacgaaacggaattgataaagcggaaagtgctcacgagtggctgagacgtttaaatgatgagctcatcaccggctggatggctgtctcacagaacactcagcaggaatgggatgtcatctctgagttactgaaacgaaccgatcccctcaggggactggatgtggctctggatatattcgctgggaaagtagaaggaactggacgcatcacccttagcactcttcatagtgcaaaaggccgagaatttgatgtagccataatgtttggggtaaataaatatgacttcccgagtaagcgagatctaacttcagataatgcccttcgcgaggcccgtcgcctcttttatgtaggcgttactcgtccccgaaaagagctgcacatggtttatgaaaagggtaaacattcaccttggattgccgaactgtatcatcgcagccagcagacatag

SEQ ID NO: 80420 - DNA, 2172 bp, Bacillus amyloliquefaciens; identical to SEQ ID NO: 72356

SEQ ID NO: 80421 - DNA, 1962 bp, Bacillus amyloliquefaciens
ttggctgcaaaattagttgataatatttttctcattaatgctccagcaggtagtggcaaaacaactaaaataaaatcaatgattgtaaaccataagataaaacatccacttgataatatactttgtattacttacacaaagagagctgcagaagagcttaaaaagggactggatgaagaagggattcacataagcacaattcattcatttttacataaatttttaagaatctatttttgtgaaaatgaaatgatagatttatatatggagttatttggggatttaatcagagggaatattgagaacaaggaagagaaagaacatgtactagctagaaacaagaagtatatcgataagtttggttgtttaaccttagaagtgataaaaactaatataagttctatttattataatgaaacttcaaacaatcatctttacaaaggaggtttgtctcacgatagtttgctcatatttgcagaaaaggtattcgaaaagtttcctaaaatcaagaagagattaactcaaaagtatcaattgatttttatagatgagtaccaagactctgctcccagtgtattaaaaatgttttataaagcaggactaaatactagctcaaaactctattttcttggcgacaaaatgcaacaaatatataaaaactatgatgggtcatttgaaaaagaattaaaaactctaaataatgaaattaaattagatactaatcatcggtcaataccagatatcgtttctatattaaataatatatataatgataaggaattcaaacaaatctcatccgataaaaaccgagctaataaaccagaccatccaccaagagtagtattgtgtgataacattcaaaaaagaataaaaagggaacaattaatttatccgaatgctttattgttatttttattaaatcaacaaaggtttgattcgataggcgctggagaattttacagacaatttaatagattggatagatattcacaagtaaaccaactaaatgctagtgatgtcttatctgataatacaaatgaaaataaagatcctcttttaaagttgctttttatagtagataaaattctaagttattatgaggattttaatcttggcagtataattcaaacccttaaaaggaatcaaaaaatatttgatactagaattggtacaattactagtcatcaggataaagttaacttaaacaatctattaaaacaaatatatgatttttatcagaaagacagctcaatatatgaatttttaactttattaagaggctctagagttataaaagaggaatatatagataatatatctaatgaatatattggagtgttagcagttacattaaacgaattcaaggcactgtcaaactatttgaaagacccgaaagtttcgacacaacatggtgtaaaaggagagagtcataatactgttttcttcattgcggacgattcctttagaacaccgctggttcatatgtataaattcttaaaactatggactattacagaactatcgttagattctctagaatccttttattatgattataaaaagtggattgaagatacaattgaccatttagcatgtaaaatatcagatttgaataaagaaaagtatgaggcacatgcaacttatctaaaaacaagagttgaagaattatgcaaatatttcgagaataattggatatttaaagatctttgtgaagacttttacaatgcatatcttctaaaacctaatgttacaaactttaaaaaatgttttaaagagagtactgtgtacggagttctgtctgcgtacagacttttttatgttggttgctcaagagcaaaaagcaatttaactatttttattgataagtataaggtaaaagatttttctgaggatttgatttttaagttaaagagaacgggatttagtgttgaaattgaagcaaaagaattgcagaaattgtga

SEQ ID NO: 80422 - DNA, 1857 bp, Geobacillus toebii
atgtatatttccaagatttcgattaaaaattaccgtaattttggaaacaaaccttttaaaatgaagttgaataaatttactgcaattattggcgaaaataatgtaggcaaaacgaatttgcttgattcaataggattaattttaagtcaagatattactatgttcaaaaaaagaatgcttgaactggaagatataaactatgaaagccggaaaaaatttaagtacgatgtattgaacgcttcaattaagccagagaacgttgaatttcccgaagttgaaatccaaattatccttgaaggcatgaataaaaaacaactgtcagtagttggagattggttttgtgatacctcattggaaaaagcacgattaacctatatttttaaacccagaagcggttttgatcgaaaagaatgggtaaaagaacaaagagaactaatagataaaatcagaaaggaaaaaggaattgaaaatccggactatcttgtaaaactgatagaatttccgataaaacaatacgaatatacaatttatgggggcaatgacgtaacaaatcgctgcgatccgtattttctgagaatgttaaagtttgagttactagatgctttgcgtgattctaagcgcgaactaattgccaacggagagtctaaactgttatacaaaattttaaattacagaagtgaaggagcatatgaagatatcaaagaagttttaagtagtttggatgagaaaatgcaaaataatcctcgattgaaggatattaaagaaacactagtcagtcagttaaataagctttccttacaagaaaaggaagggtataacaatattgattttcatttctcatcgcccgaaacaggggagttgctgaaaaaattaagtttaatctatggacaagatcctattacaatcgaacgaaacggactgggaagaaataatttgttatatatttccctgattctttctcgtttggctgaggataaaatttcagaagatatctgttttcgggttgtgggaattgaagagccggaagcacatttgcatcctcacttacaaatgcatcttgcaacgaatatcgaaagtataaatagtgacagagatgacttacaaattatattgacttctcattcatcacatattactagttcattaaatttagacaacattgctattttatataaggaaaataatgaaattaaggcacattacataactcatggctttcaaagcgataaaaaaggcaaaaatcatcgccgatatcttgaaaaatatttggatgcaacaaagtcaaatatgttttttgcccgaaaaattatccttgtagaaggcattgccgaacaaatacttattcccaagttatttgaattacatacaggcaaaaccttagagcgcatagggtgcaacatagtaaatgtaaatggcgttgcttttagccatttcctagaaataataagaaatggctattttataaaatgtgttgttttaacagatggcgatttaggaaccaaaaccgaagaacgtgcggaaaaactcaaggaagagtatgaagatgattatatcaaagtagaaattaacaaagaaacttttgaaaaagaacttatagaagcaaacaaaacaggagaagggaagcaaattttactgagagccttaaagcagaccagaatccaaaaaggtcctaaatatgaagaagaaataggagatagagcattagataccgacagtttttttacgttaattgaagattataaatcagaatttgcttttaacttgcatgaagaattaaaaggactgaaacaaggggaagtagcctcgtttaatctgcctgagtacataagaagagcatttgatttcctagaggggtaa

SEQ ID NO: 80423 - DNA, 1545 bp, Geobacillus toebii
atgtccaaaaaattaaagccgatactagtcattgcgggtccgggtgcaggaaaaactcattatttggttgaaaaaatttgcgaaagtcttccatcactggaatctcacaggtttcttgcagttataacatatacaaacacagcaaccagcgaaatcagggagcgtttatcaaaaaagatagaaataccgcaaaatgtatttatcgggacaatacatagttttttgattcgttttatacttaaaccattcggaagtatatatggagtgttgccgaataacccaatatataaagaagtaaatgtaaatgccaaagataaaaaagaagaacatattataaaaagccaaattgtaaaaaagggcgttgttccttatgaaaaaataattagtttgtctaagaatttaatgaaagactatgaaaaggtgagagtccttgtttctgaaaggttgcaatatctatttgttgatgaatttcaggatatcgattctggacaatatgaaattttcgagagtattcggaaacaacaaaaaacaaaaatgtattttgtaggggaccctgaacaaagtattatgacttttcgaaataacggtcgtaaaaagccgctaaataaacggccaatttatgaggctatgcagtctaaaatgattgaaaaaaagtttttatacaacaatcatcgttctagtgttaccattattgattttttaaacaaatttcatacttccttgaagcaagtaaaaagcaatgaagagattgactcacaaaataaagttgtttttattgacgcgcaagatattagaaagataattgaagaatttaaccgtctctgtaatgaccaaaagtattgcaggaatagacctaaatcgcgtttttttcttggatttaagggagatacctatacaaaagttgaaaatgaatatggattaatacaaaaagagagcaacgaatcaaaccagcctaagttcattgaagaaacttcacattttattactaagctcttaaatacaaatcagaataatattattagttatatgggtattgacgatttgcaatatagaatgctttgtttaagtgtaatagatataattaagcaaaacccgtttataagcagcaaaagtttgattgattatataaaagtaatatttaagggggatccttacaagacaattcataacaagattcagcataaaccggatgagcttgctgaagagtttataaaacaaattaattctgaattacaaggaaggtttaatttacaaaaaactgaagattaccacttaactattcataaatccaaagggcttcaggcagatgccgtactggttattgctagaagcaaaaaagaattaatgaaatggcttgaaacagatgtggaggctaggctggcagataaacaggatacttgccgcgtgggatatgtggcgtttagccgtgcgaaggagtttttatgcattgcttgtttggaaaaagttgatagcgaattgcgtgaacatatgattaaactagatatagagatagtaccattggctgagaagttattgaaagtttaa

SEQ ID NO: 80424 - DNA, 1974 bp, Geobacillus sp. B4113_201601
atgaattctccatacatttcgagggtaaaaataaagaattttagaaatttccaaagtgtagatatttctttaagtcataaacaagtcattattggtgaaaataatgtagggaaaaccaattttttaaaagcaattcagctaatattagacccaacactatccgatgaagatcgttatttgactgaatcagatttttatgagggtatcgaaaatcctatggaaaaaggtgaagaaattgaaatagttatagaaattcgcgggttcgaacataacaaaaatattttgtcagttttatcagatgctactgtttctgacgctccaccaacgttaagattaacttaccgctattatcctgttgaaaaagaggatggaactaaagattatgaatacatcatttttcaaggagataaacctgataaaattttcaaacatagccatcgaaaatatcttaatatgaggattattaatgcaattcgtgatgtggagagcgaattgagaaattcacgaaaatctcctattaaccagctacttaaacaatatgaaattgacaaaacagaacttaaagagcttgctgagaagcttaaacagaaaagtgatgaagttttaacattagatgaaataaaagatttaactaataaaattaatacacggttcaaaaaaattattggtgttcaaccagattcaattgtatcgttggaaacgattgatatcgatccaaatcgcattttaaatacccttaaactaatgatgggagataaaaaaagacctacaagcgagactagtttaggaataaacaatatattgtatattgcattaattcttttgcaattagaggatagaacaataccaacgtttttaaaaaaagaaaaatttgaagaactatccaaaaaagagggaagagaaatccttatttcttcttacgaagaaaatgggaacggcaattattttttaaaaagtgacttatcgaatgatgagataaaacaactatattcttttatggatacatataacccggttaatcaaggatttaccattttagctattgaagagccagaagcacatcttcaccctacattacagagaattatctacaaggacgttatgcatggaaattcttcggttcttatgacgacacattcaccacatattacttcagttgctccgattgactcaattgtacatatgcgctggacaagtagtggaacaaaagtttataccagttcaaatattaaccttacttccttagaaaaaagggatcttgagagatatcttgatgttaaacgtggcgaaatatattttggtaaaggtgttatattagttgaggggattgcggaagagtatttaataccgagatttgctgaattaatgggaaaacctttagatcaaaaaggaattgtagtatgtaacattaactgtactaattttaaaccttatgtgaaatttttggatgtattaggaatcccttatgttgtaattacagacggtgattattatgtaatgaaggaagatgcaaaaaaagaatatcatgttttacatgatggaagtcataagtcctatggatttttagggcttgagaaaattgctgaattaatcatagatttacaaaagattgaacaaagtcaactcccttcttgcttaaaaaaacaaagggatgcatttagcgagaaaggattttttgttggaaactacactttagaagtagatattatggagaaaagtcaaagtaatcaagatgctaagaaaataatctgtgaagtatttaatgagttgactactggtggcgataaacaaaaaagaaactttgcagaagagttagatcaaggagagtattttaaatgcttaagaaaaattgaagataatattggaaaagggcgttttgcacaacggttatctagtatatgtataaaggaacaaattccagattatataaagaacgcaattgatgaaatttataaaagagtgagtgagatttaa

SEQ ID NO: 80425 - DNA, 1815 bp, Geobacillus sp. B4113_201601
atggatttatttaaggaaaaactgaatcaaattaaaaaagataaagatcaatacgaagcttttttatcagaaaataatactgtcgttattgcaggaccaggtagtggcaagacaacagtattgactttaaaaataatgaaattattaatggaagaaattaaacctccgcgaggattagcttgcgttacattcagtagggcagctgcaaaagaattcaaagatcgcttaaatgacttaggatatcagaaacgagagaatgtttttttgggtacagtccattcgttctgtatttcggaaattatttctccgttcgctcacttatacaattacgatataccattacctataaagattgtagctgaaaaaaagaagaaatctctttttaaaaaaataattcaggactttcaattagaaaacacaaatataagaattgaagatatggacaaggaaagaacacttaacataaaagggattagtgaggtggaaattcctacatatgatctcgctttaaaagtggctattgagtatgaaaaacgtcttcatgctgaaggttttgttgattttgttgacattgtaaaatatgccaccttactaattcaaaatcatgaatatgtaagaaggtgtttggaagcaaaatttccttggatactaattgatgagtatcaagatcttggaaaaccacttcatgagatggtactttccctgttgaagaatacaaatataaaattctttgcggtaggggatcctgatcaatctatacatagttataatggagcaattcctgattacttaaatgaattatatggtttaccaaatatcaataaagtgagattgaaaactaattatagaagtaatcaagatattattgatgcttcagaattagcacttggagataagcgagagtataaggctggagcaaggttaaacgaaaatgccgaatttcattttattacatgtgaagaagaaatgtatgatcaatatgttaaagttgcaaaagaaataatcccttcctgcatgaaagctggaatacctttagaggaaatagcgattatggttggttataataaccaagcaaaagagcttggagctattctgagtcgcgagggaattccgtattatataacaaagtttgaatttcaacggactgatgtagttatgtggctagaacgttgcgctttatggtgtatagataaaagcaaagaatcattcgatgatttagttgaattttggattcatcttaatagacagcatcagaaatttatcattacaaatgaattgattttttttagaagaaaattatttgatgttttaacttcaagcataaagcacaaccattgcttaagcaaatggttaacatttgtgattcataaccttgaactgttatcgctcttaaaagattctcatatttatcctgatgaagttgataatctaaagcaattaatcaaaacatctactaaaggtgaattctctaattacaatttggataaatttagtaaattaggaaagccggaagatcaggtgactattactacaaggcatggctcaaaaggattggaatttgaggtggttattttgttggggatggaggatgatcactttccgtcatataaaaataaacgagatccaaggaaattaagcgaagaccgcagagtgttttttgtttgtatcagtcgagcaaaacgagtttgttatcttttaagatctaaaaaatatacaaaggaaactcaatacggaataaagacatttaattataagccttctgaattttgggagatattgtattccaaatatggtgaaaaagttcctagttcgtag

SEQ ID NO: 80426 - DNA, 1857 bp, Geobacillus caldoxylosilyticus
atgtatatttccaagatttcgattaaaaattaccgtaattttggaaacaacccttttaaaatgaagttgaataaatttactgcaattattggcgaaaataatgtaggcaaaacgaatttgcttgattcaataggattaattttaagtcaagatattactatgttcaaaaaaagaatgcttgaactggaggatataaactatgaaagccggaaaaaatttaagtacgatgtattgaacgcttcaattaagccagagaacgttgaatttcccgaagttgaaatccaaattatccttgaaggcatgaataaaaaacaactgtcagtagttggagattggttttgtgatacctcattggaaaaagcacgattaacctatatttttaaacccagaagtggttttgatcgaaaaaaatgggtaaaagaacaaagagaactaatagataaaatcagaaaggaaaaaggaattgaaaatccggactatcttgtaaaactggtagaatttccgataaaacaatacgaatatacaatttatgggggcaatgacgtaacaaatcgctgcgatccgtattttctgagaatgttaaagtttgagttactagatgctttgcgtgattctaagcgcgaactaattgccaacggagagtctaaactgttatacaaaattttaaattacagaagtgaaggagcatatgaagatatcaaagaagttttaagtagtttggatgagaaaatgcaaaataatcctcgattgaaggatattaaagaaacactagtcagtcagttaaataagctttccttacaagaaaaggaagggtataacaatattgattttcatttctcatcgcctgaaacaggggagttgctgaaaaaattaagtttaatctatggacaagatcctattacaatcgaacgaaacggactgggaagaaataatttgttatatatttccctgattctttctcgtttggctgaggataaaatttcagaagatatctgttttcgggttgtgggaattgaagagccggaagcacatttgcatcctcacttacaaatgcatcttgcaacgaatatcgaaagtataaatagtgacagagatgacttacaaattatattgacttctcattcatcacatattactagttcattaaatttagacaacattgctattttatataaggaaaataatgaaattaaggcacattacataactcatggctttcaaagcgataaaaaaggcaaaaatcatcgccgatatcttgaaaaatatttggatgcaacaaagtcaaatatgttttttgcccgaaaaattatccttgtagaaggcattgccgaacaaatacttattcccaagttatttgaattacatacaggcaaaaccttagagcgcatagggtgcaacatagtaaatgtaaatggcgttgcttttagccatttcctagaaataataagaaatggctattttataaaatgtgttgttttaacagatggcgatttaggaaccaaaaccgaagaacgtgcggaaaaactcaaggaagagtatgaagatgattatatcaaagtagaaattaacaaagaaacttttgaaaaagaacttatagaagcaaacaaaacaggagaagggaagcaaattttactgagagccttaaagcagaccagaatccaaaaaggtcctaaatatgaagaagaaataggagatagagcattggataccgacagtttttttacgttaattgaagattataaatcagaatttgcttttaacttgcatgaagaattaaaaggactgaaacaaggggaagcagcctcgtttaatctgcctgagtacataagaagagcatttgatttcctagaggggtaa

SEQ ID NO: 80427 - DNA, 1545 bp, Geobacillus caldoxylosilyticus
atgtccaaaaaattaaagccgatactagtcatcgcgggtccgggtgcaggaaaaactcattatttggttgaaaaaatttgcgaaagtcttccatcactggaatctcacaggtttcttgcagttataacatatacaaacacagcaaccagcgaaatcagggagcgtttatcaaaaaagatagaaataccgcaaaatgtatttatcgggacaatacatagttttttgattcgttttatacttaaaccattcggaagtatatatggagtgttgccgaataacccaatatataaagaagtaaatgtaaatgccaaagataaaaaagaagaacatattataaaaagccaaattgtaaaaaagggcgttgttccttatgaaaaaataattagtttgtctaagaatttaatgaaagactatgaaaaggtgagagtccttgtttctgaaaggttgcaatatctatttgttgatgaatttcaggatatcgattctggacaatatgaaattttcgagagtattcggaaacaacaaaaaacaaaaatgtattttgtaggggaccctgaacaaagtattatgacttttcgaaataacggtcgtaaaaagccgctaaataaacggccaatttatgaggctatgcagtctaaaatgattgaaaaaaagtttttatacaacaatcatcgttctagtgttaccattattgattttttaaacaaatttcatacttccttgaagcaagtaaaaagcaatgaagagattgactcacaaaataaagttgtttttattgacacgcaagatattagaaagataattgaagaatttaaccgtctctgtaatgaccaaaagtattgcaggaataaacctaagtcgcgtttttttcttggatttaagggagatacctatacaaaagttgaaaatgaatatggattaatacaaaaagagagcaacgaatcaaaccagcctaagttcattgaagaaacttcacattttattactaagctcttaaatacaaatcagaataatattattagttatatgggtattgacgatttgcaatatagaatgctttgtttaagtgtaatagatataattaagcaaaacccgtttataagcagcaaaagtttgattgattatataaaagtaatatttaagggggatccttacaagacaattcataacaagattcagcataaaccggatgagcttgctgaagagtttataaaaaaaattaattctgaattacaaggaaggtttaatttacaaaaaactgaagattaccacttaactattcataagtccaaagggcttcaggcagatgccgtactggttattgctagaagcaaaaaagaattaataaaatggcttgaaacagatgtggaggctaggctggcagataaacaggatacttgccgcgtgggatatgtggcgtttagccgtgcgaaggagtttttatgcattgcttgtttggaaaaagttgatagtgaattgcgtgaacatatgattaaactagatatagagatagtaccattagctgagaagttattgaaagtttaa

SEQ ID NO: 80428 - DNA, 1857 bp, Anoxybacillus flavithermus; identical to SEQ ID NO: 72624

SEQ ID NO: 80429 - DNA, 1545 bp, Anoxybacillus flavithermus; identical to SEQ ID NO: 72625

SEQ ID NO: 80430 - DNA, 2106 bp, Pedobacter cryoconitis
atgtacatttctaaaataaccttaaatgggtttcgtaattttcctgaaaatgaaattcttttcaacgatggaatcaatgtgattattggtcacaacaatgccggaaagacaagtttactaagagcaataggcttgttgattagtagtgaagattcccgtagacttgaagtagatgatttttcaaaagatttttctctagctgacctacaggccaatcctccatctgtcacgatttcacttgatattgttcagagtgtgaatgaggacttagcgagtgatgatctggtaacggttgccaattggcttacaaagctggaagccccctacgaggcaaagctgacttatagattttatcttcctgttgagaaatttattgactataaagaagagcttgtccatgcgaccactaaggatcaagcttggtcgatgatcaagcatgaatttttgcgtttttacacatataaaatttttggtggtgacccaactttgcaggttgttgctgatagtgaatcactcaataaattcgattttcagtttttgaatgcaatacgagatgtggaacgggacatgtttactggtagaaatacaatgctgagagatgtgcttgatttctttatggattatgaaatcaaatctgctagtgaaacagaaaaaagtttgaccgagaagcaaaaagagattaaagatttaaagaaaattttctcttcaaatgcagatgctttgataggtgaattacaacgaagaatgcacgctggtaaagagcacattctagcttatgcccaccaaacgggtgcaacttttaacaatgcaaagccagattttgacggcgcaatttctgacgttgacatgtattccgccttgagattaataataggctatgatgcattggatatcaaaattccagcttcccataatggattaggatataacaacttaatctttatgtctttgttgctggccaaaatgcaggtaaattctgacggaaattatttagggagtaacgcaaagatatttcctgttttggcaatcgaggagccggaagcacatttgcacccagctatgcaatataagtttctcaaatttttaaaagaaaataaagacaagagaaaagtaaggcaaatatttgttacgactcattctactcaaataacttcggccgtttctttggatgagattatctgtttacataatgaaaaaggtgttgtatccgttggttacccaggtaagacttttcctgataccgctgaaggtaggacagcgaaagcctacgtgcaacgatttttagatgcaacaaggtctgacatgctcttcgcccagaatattgtatttgtagaggggcttgctgaacaagtacttctgcctacacttgcaaagtattgtgggaagaatttagaggactatcataccgcaataattccggtgggtggtcgtttcttcgactactttttatacatgtttgatgcgaataaaccttttaccgcgccaaagcaaattgtttgtttgaaagacagggatcccgagcgtaaaaggctctcaggtgggagtttcacaagttgctacccctatgaaatggatttagattctgccaactatcaatataaaaatcatattgatgataaatgtacattatatgcaacccatggtaatatccgcttttttgggcagaatcacgaaaaaggtaaaacattcgagtatgaactctgtctggaaaatttagaaaacaacattttatttacggaaaggctacaaaatagagatgagctaatcaatttatcagagctatacaaaggtggcgtttcaattgatttaatgtatgatgagttgcgaaaaagtgatgaaaacgatcgtgtcgaaaaatcgctaaaagcacaaataaccacaagttggtcggatgatgataaaaagaaagctatttgtgcatcaaggtatctgaattcagtaggaaaaggagaaaatgcattagaacttgcaaatattcttgaacaaaatctaatgcttcctgaacatgctccagctgatgatgatgtaaccaacccaactccgttaaagcagaaatttgtcgtgcctaaatatatttttgacagtctaacacacctttgcgtatga

SEQ ID NO: 80431 - DNA, 1761 bp, Pedobacter cryoconitis
atgatcggcatagcttcagattccttaattccgattaacgaagattttaagatttcagccggcccaggagctggtaagacccattggcttgtaaatcatatcaaaaatgttttgcagcactcagataaacttggatcctataaaaaaattgcctgtatcacttataccaatgttgcggttgacactattgtgaaacgtttggatttcgttgcggatcgcgttgaggtcagtacgatacatggctttttatataagcacataattagaccatatatggcctttattgcagactattatgggttcaatgttaaaaaaatggatgggcatgatgatcacaacattagtagaggcagaattgtagactggataaagagacatcctaatgtttcgagcctgagacatccctatacagtcaaccagctaacacaactaaatcaaaatctaattgccataggaaattggctgcagtcgttagggtataaacttgaagaaagtggtatagcaatatcaattgataacggcaaggcatttcaccttgaaactggcagtagagtgaatctttccaaaaccaattgcctggacaaactcgctactgatctttttgggtataaaaaaacattttgggagaagggaatactgcatcatgatgatgttctgtatttcacatttttgttacttaaaaagtttccttttatacttactgttctaagggcgaagtttccgtactttttcatagatgaatttcaggatactagtccaattcagacggagatcgttaagatgataagtacaacaggtactgtgattggcgttatcggagatcgtgcgcaatcaattttcagctttcaaggtgctaatccagatctttttactggcttctcaacgccaagcatggtaaactatttgattaaggataatcgcagaagctctaaccaagtggttggcctgctgaataggatcagaacagatataaagcaggatccagttcgaaatgtagatggtgcgtcagtaaaaatacttgttggcagcgttgaagatgcatttaatcacgtaattgaggtttgtgctggtgaagaatttgtgtcactcagtcgcgataacaccacatcgaacatactgcgaaggcagtcgaacagtggcttgctcgcgattaacttgttggatgcatggaatataaaagatagtaatggcgataggagaaatacagcattaaggagcatgaaggctcttgaattgggcagacagaagagatttaaggaatcgatccaggagatgtctaaaaactactattcaatcaaggatcgaaatgaacaaaaaaaagttgccttagctaaaattagcttactgctctctagttacagtaattttagaggccagccccttttcgcgttttatgaacttgttaaatcagcagtagacattagtttaagtgggatgagggctggcgcgattaaagacttttatgacagctatacttatgatcaggtagcagattttattaatattccggaggatgattcatggagcaggacgatacataaggcaaagggcgatgaattcgataatgtattgatggtgattaaccatgaaagtaatctgtcatttttattaaaccccaatttaagtagtgaagaacaaagggtttattatgttggagcaagccgatcaagggagcgtttatttattaatgttccaacattggcagcggcaaatgaaatctctttatcgcctttagcggatattttgcacttgacaacttga

SEQ ID NO: 80432 - DNA, 2064 bp, Bacillus trypoxylicola
atgtaccttagtgaagttaaaatttggaatttcaggaagtttggtatgggtaattctagtgaacctggtgtttctgttcaatttcaaaaaggatttaatttattaataggagaaaacgatgcaggaaaaagtgcaattattgatgcaattcattttaccttaggaacagtaagtacagaaaatagtaggattgtagaaaaagatttctatatagataaagaaggtgaggttagttcacacttaaaagtagaatgtatattttcagatttaactgatgaggaagctggaatatttttagagtggctttcgtttaataaagctaaggagtatgagctaattattagacttgaggcggagagagtgtctaatgaattattacacaataaaattatacggacggtaaaagcaggaccagaaaatgcagattcaaggctagaagcaattcctaatgaagtaataaaatccacttatctaaaaccgttgcgtgatgccagaacagaactgagaccaggttataggtctagattagctcaaatacttaaaggatattcagagtttagtactctgaatggtgaagatcacactctagttgatattgttgctgaaacaaatagtaagattgaagaatattttaacacacctgtcaatggtaaagataaatcgataattggagagatatcaagctatttaaatgaattttttagcaagaatactgaatataatccgcaattcatggtaacgcctgctaaactcgacgatatattgagaaagttaagtatagagttagatagtgatacattggctgggttaggtagtttgaatctactttttattgcagtagaattattattattaaatgatggtaagagggttggaccagcattaaccttgatagaagaagttgaagctcatttacatccgcaagcacaactaaggttaataaagtttttacaatctaatttaaataatagtagcagtcaatttatattaacgacccatagtacgaccttagcagcttcaacatcactgtcaaacatcatattattacataaaaattcatcatttcctatgaatccagaaaacacaaaattagatacagaagattataaatttttagaacgttttttggatgcaacaaaagcgaatttattctttgctaggggagttattcttgttgaaggagatgctgaaaatttgctgttaccagcattagctgaagttattgatcgcccgttacataaatacggagtatctattgtgaatttgggtaatacagcttttaagagatacgcaaaaatatttatgcgctcagaattttggaagaacgagggaggagcccctttgttattgccagtttcattaattactgatgtcgatataaaaccttatgaatatcatgtgattaggaatgatacagaaaaaagtatgtgtttctattcaattaaagataaaggaacacttgatgcagtcgaatccctatatggatttgaggatgtatctgatagtaatataataggggaagtgtttacttctataaaagatttagaatcaaagttagttgaatttggcccaatggatgaatctttagaagatgacctagtaagattgacggtgattgaattaagtaataaattaattgaacatttagaggatatgaaaatttctaagatacaaactgattttagagatgattttaataatttaaatgtatatgtatctcctaaatggaccttggaatatgtgttggcgaatagttgtttaaatatattattagcggaatgtgttcataatgttagatacaagcatccaaattcggttcctaatcaaaagaaattacaaggtataattgctcaacttgaacaagataaatctagagacataaaatctggagcttatgaattgtttaagccactagataataaactagtatcaaaagccgaggtagctcagacacttgcatatgagttaattaataataaggaagaattaaaggagaaagtgatgtcagacagtacattatcttatttaatagatgccattattcatgtgacggataatcagtaa

SEQ ID NO: 80433 - DNA, 1890 bp, Bacillus trypoxylicola
atgttcagtactgagggattttcattaatagagaagaaaatattaggtaataaatatagatttaataaagaacaaatagaggtaataaacgcagagggaaatgcgaatattattgcaggacctggtagtggtaaaacaacagttctagttgctaaattagctctatttcttaaggaaagggttacaaacaataaaggaatatgtataattacacatacaaatgtagcagtagatgaaataaaagagggactaaaaaaagttggtattaataatatagagtatccaaactttgtgggaacaatacacgaattttttaatcactttactgcattcaaagcttacagagaattatttcccaatataacaccagtgattttggataacgaaatctttaaaaagaaatttagtgatatttttctgggttatcatagtagaatgaatcccccgacatcgaaagtggacaattggcacctaaagttgataagctctgaggaatttgagctatatgaaaatgtctcatcctactattatacggaattaatcgatacattaagagacatatttaaatcaggaaatttaaggcataatgactcgctttcattagcttactggtatataagcaagtatggagaggaactaaaaaaagctctgtcaaaaaggtttgaccatattttattagatgaagcacaagatacaaataatattcagtataatttattatgtgctctgtttaatgataatatttattttcaaaaatttggtgacccatatcaagcattatatactctctatgataataatgaagaggcatggaaccctgaatatgaacgaaagcataataatatttcttataatgaattaacacatagtactagatttggcaattcaattgctaaaatcttaaaaactacttgtattaaacaatactcaaactttagtggtaatagtaatataagatcttttaaacctcatatgcttatttatgatagtgaagagagtgtaatagaaaattatagagacttaattagaaaatatgaaaatatcgatgaacaatttaaggtatctcataggaaagtagcagtagttggcatgacaaagccagatatcaaaaaattcaatgaaaattataaagaaattaaaaatgttagaactaatacagaacttatgagtagtaagatttatcaaatatttatcaaaggattatatgaaatccttaaatatgctcataatataactgaacaaaaaagtaacttttcgatgtcagacataaagaaacatatagctaaagaacaactagaaattaaagtggatatagcaaagtgtattcataagttaattaaagaaaagaaactaattgaagatgactttatgtcttcgatagaaaatactcttcgtctatttaagaagaaagagctctcaaaaataaagggacaaataccatatagtagtgttagtaaatatataaaagatactataataagcacaacactaggttataaatatagtgaaatagtagagcctacaacgaataaacaaatttattttgggactgtacattctgttaagggtgaaactcataaagcaacattattaacagagtcggttattatagaagatagattttcgccaaatgaagttaaatactatgcgggtaaggttttatttgactatctaataggcacatatattgattataacaatatgttagatgaacaatttgtgagagctacaaaaaaagcacttaaaattgcttatgtagcattgagtagacctactcatttttctgcaatagcaattaaaagagaatgtattgaagataattatgaagaaaagattcaaaaggctaaaggagcaggatgggaagttgttgaatgctttagtccaaaataa

SEQ ID NO: 80434 - DNA, 1719 bp, Bdellovibrio bacteriovorus
atgtatatcaaaagcatcaatattattaactttcgcggaattgagaatttggtcgtcaattttgaaagccgttttaatgtgctgataggtgaaaacaattctggaaagagctcgatcattgatgctttgagaatttgcttaagctacggtaagaatcagaatgatttctatattaaaaaatctgattttcgcttgtcatcatcacgccctccggatcctattgagtttcacttcgagtttgccaaggaggatgaggaagatctggggcactttcattctttgcttggagttaacgatgacggtaaagaaaccctgaatgcacattttaagtatagcctcgttgaaaagaatggtgtttataagataaaagtaaagacttggggtggactaaatgaaggaaatcccatttctgctgacgagttcaatgagcatatcttttcagtgtatttggatgctttacgagatgcaggttctcaacttcgaccaggacgtacgaataagctaggcgatttctttctgaagttagaaccggactccgacaatcagaaaaaattagcggacgaggtaaaggcatcgctagaccagagcaccaattggaataatttaatcgacaaaggtaacacagcgattgccgcgcatcttgcaagcataagtcttaagagcgatagcctaggacttgatcttaattttttaccagcggaatataaaaagattgtagattctttagtaattggaatgaaatctacgcttttgaatggagaagtcgtttcatttgatattgcacaaaatggcttaggcctaaataatctcttatattcttcagtcatattaagtgacatcgaaacatttaagcagcaagagaagtcatcgcttgctgctctcttaattgaagagccagaagctcacttgcacccgcagcagcagaatctcttttttaaatacctttctgagctaagcgaaaaatcgaagttccagatcttcattacatcgcactctcctacaattaccgcgaagtcaccactcgctgccttaagatgtataaaaaagagagatgaaaaggtaaaatgcttcactccagcaggtgtattatctccagaaaatcaagagtttttacataagtttttggacaccacaaagtctcaactatttttttccaatggtactattttagttgagggcatatctgaggcgctacttattccaatctttgcgaagaggcttggatttgatcttaataaaatgggcatcgaagtggttaatataaatggagttgcctttgatcattttgccaacctatataggtccaccgacgaaaaattaagaatgaatgcaaaatgtagcattttgacagatgacgatcggtcctccgaaagcgaagaaatttcgtctcgtgcaaaaatagctaaagagcttgaatcaggaaatctttcggttaaccttgccgaaaagacctttgaggttgcactattcgctgccggatcaaataaggatatattcctggatatttggaaaaagcttcatccgaaatcgaaagttgatgctaacgatgacgtccatgtttatgcagataattttcttaagaaggtcgagtctaataaagctaaatctgaactagcgtatgctcttttaaagagactcgaagagaagcctgaaaacttgtcttccttcacggtgccaacctacattgaaaatgctattaaatgggtttgcaatggttag

SEQ ID NO: 80435 - DNA, 1692 bp, Bdellovibrio bacteriovorus
atggttagccttgaaaagctatctgataagcaaagagaaattgtacttaatggtgctggattatttgtagtacgtgctgctgcaggaagtggaaaaacatataccgtcgcggctaagatttctcatatattggattcttggaaagaaaaaggaaaaggcattgcgataatttcattcacaaacaccgcgtggttggaaattgcatccacgttaaagagtgattttggaatttctgatctaggttacccacatttcctaggaacaatagatagtttcatcaataagtttatatttcttccttttggtaacaaggttatgaattgccaagggcggcctaagcttgttggtgagccccacggaccatggcgcgggcgttattataaagactcatttttcgacaagattacctatagtaaaggcggagaattatattttactagtcaacagctaaggccaaataaaagcatggtcgcagcgaccttgagtcaaaagaaatcattaattaaggcagggttcgcgacccaatctgatgcaaattatttcagtctgatactattaagaaagtatccttggcttgctaagtctattgttacgagatttccctattttatcatggacgaagctcaagatacttctgatatacagatggaaatcatcgacctcctaattgctgcgggtttaaaacaattgatgttagtgggcgatcctgatcaggctatttacgagtggcgaaactccaagcctgagctttttgtggcaaaatttaatgaatggcgtgaggcctcctatattctagatgagtccaggaggagttctcaagccatctgcaactttgtttttaaattatcttctctcgagacaatccctaatgctgttagtgaggaagtaaaagactgcgatattgagccagaaataatttctttagacggcatgaccgccgtacaaatctcggatcagtttattgaaaaatgccgtcaaaatgggattcagcctgatacccataaaataggaatactttttcgcagtaaaagtttttatgcagagttggacagtgactattccgactcagaacaagtagaatggaccgaaaacagagatctaatggacattgcaaaggctaagtatctatttgataatggccaaattcagaaagctgttctaaagctggcatttttgtacgctcgaagaattacaaaagaagataatctttctaaggaacaacttcacgaagctatagatgattttggcaaggcagcgttatataaaaagatactgaccttactaagagaaataccaggcataaaagaaatttctgtcggtgattggtgtaaaggaattgagagcacggtaaaaaaagagctggatattgatgtctcttgcaaaagaaaatttaaagatttggcattaggtaatttacttaaagatgatgaggcaccatcggattacaaagggtgtcgcgtcagcaccatacacaaagttaaaggcgagacttttgatgctgcgttagttcttttgaaaggcaaaggcgtcggaaagtcgtacataaaactaattgccgagaaaactacagtataccaaaatgaagagcttcggaatgtctacgttgcgattacacgtccaaagcgactattagttattgccgtacccgatcagaaaaatgtcgccgcctggacaagtgttctcaaaggatag

SEQ ID NO: 80436 - DNA, 1761 bp, Bacillus sp. KCTC 13219
atgaaaattgaatggataaaaataaagggatttagaaattttgattatgaaaaaattaattttgcagagcaaactttaattattggagctaatgatgttggaaaaacaaacttaatatacgcattacgtattctttttgatcgtagtttaagtgatagggatttggatttatttaacagtgattacaatgtatataccaaatcagattctattgaaataacagtcaaacttgtagaagttacggaggactgtttaataactgtatttaaaggagatttgaacaacgaaacagtttatatacaatataaaaattcaaagaatagtgattatagtattctttcgggggctacagaagaaacgttagaagaaagaaattctcgattttatattaagcggttaaacatggaatacgtgaatacaaatagaaatttagaatcttttatgaaaagagaaaaaaatcaaattttagaagatgctaaattaaaattgacggaagtacaaacgcaatcagacgagaaatctgttctcaaaattaagcgtaatttagaacttgtaaataaaagagtggaccgtttgaattatattcaagaatctttgaataaagtaaataacgaattaagtttacttgctatacataatgaaggcaaagtattgacttacaagaatactaattctgatgctactagaatgttagataacttagaattaacatatagtacggatgaaggtgctttaactttaggtggagatggtagaaataatcaaatctttttagctacatgggtttctagacaaaaaaatgtgagttctttagagaaagtaactttctatgctatagaagaaccagaggcacacttacatccacaacaacagcgcaagctttctagttatttgttggaaaaatttgaggagcaagtttttattactacacattctccgtatattgcaacagagtttaaacccgataggattgtcaaactatattctaagaataaatctactaaagctgcaaaaggtggatgtagtgaagagttaaaaatgaattttgatgattttggttatagattagatgctatcacatcagatgtattttttgtaaatggagtatttctagtagaagggccttcagaaaaactgttctatactgctttagctaaacaattaaatattgatttagatagattgaatgtgtcaattatatctgtaaacggtgtagggtttaaaccgtatatcaaaatttgtttggcattagatatcccttttgtattaagaacggataacgatatttttaataaaacaaaaaaaattggaaataataatgttgagttttctttccagggtggtatatcgcgagttatgggcatatatacagaattgttacaaacagaagataatcaagggttaatagaatattggaaaacgtaccaattaaaaaatgaatggttaaaaatcaagcagcatccacaagtagctaaggatcttgcaaataatattattcaacaagtagaaaaaaataatatatacatatcacaagttgatttggaaaatgatttggctaatagtaatttatttagttcgctaaaaaaattctatagtactaggacaataaaaagtactgtaaataagatgcaaaaagcaaaagcagaaaatatgctaaagtttttaaaagcccattttgatgatttaaaatatttaagtgatgataagatttcagaaccattaaaaaaaataaaaattttagctgaaaaggttgttaagtga

SEQ ID NO: 80437 - DNA, 1620 bp, Bacillus sp. KCTC 13219
atgaagaaagcaactatacctacaccggaacaaataagaattattgaagagcaagagaatatagtagtgactgctaaaccaggaagtggtaaaacatttactattatagaaaagataattgatatctctaaaagtttattaagttatcaaggtgttatagctatttcatttacaagaaaagcaagtcaggagcttgagcaacgttacaaaagaaaaagtattgaaagtaattctcatttttttggtactatagataaattttatatttctgaaatcattattcctttttcaaatcttttatttggcaaaggagaaccattagaagttaaggattcaatagacgattatcctaaatataaagaattaaagaagttgaaagaacataggggcgataaagaattatttgaactactagaggaatcacttcaagaaggtttgatattcttagagattagtggtgaaacagcattatttattttgaataatgtacctcagtgtttaatataccttaaagctagatatacacatgtatttattgatgaatatcaggattgcggtgaaattcaacatgaaatattcttgaagtttgttagtaatggaattataggaatagctgttggagatttagatcaggctatttacgcattcagtaatagatactcaaaatatttattatctttgataggcgatgatgattttacgcatttggaaatcactcgtaaccatagatgtcataaatcaatatcggattattcattagaattaatgggtgttaagagagaacacgtagaaaaagataagagaatatttaaggttaatgtaagaggaacagatgaacaagttatttatgctattgaaaataacttagaggaaattaaaactaaatttaatataagtagaaatagtgatttcgcaattttatgtcgaggaaatgatacagctagaagagctgctaattttttatctgtagataataagctatttgtagatacccccttagataaaattaatggtaattgggctagtttattcaatgatatattaatttcatattatttatacaaactaaatgaaattacagtgcttaattttgtgagtaagtatatagatgaagagttctattataaaaattttaaaaaaggtttagaattagtaaacaagttatttaatctagaagaaaatgatttagaaaaaaacatagaagaaattattaagatagcccagttaatatatcctgaacaaaaagacgaaagaatagttcagatgctcaaagatattttaaaaagtgaagaagcattatatagctttaagcctgcaacagaaaatgaaataaatatcatgacgctacataaatctaagggattggaatttaaatgtgtatttttaatggatttatatagatggatactacctcatgaaggcgatagggtatctgaagaagattatatacaagcattgaatttacactatgtgggggttacaagggccattgaagcttgttatatcatgataggtgaacaaagatatagacctagacaagaagattttattagagctcaagagtcaccatttttatatttaaataatgtctctaatatgaggggaaatttaaattggtag

SEQ ID NO: 80438 - DNA, 2247 bp, Bacillus sp. KCTC 13219
atgagaataaaatcaatacaaattaaaaactttaaaaaattaaaagatgtaactattaatttgagtgaagagcagagtatttttgttggtgcaaataatagcggtaaaacttctgcgatggaggctatatcaaaatttttaaagcgcaaaaatcaaattgggttttatgattttacaatctataattggacaaatattaattctttgtttgaaaaaatacaggctttaaaaaaagagcaatcagaatctaaagatgaggttaggttggcagatattcaaagcgaatatgatagagcagaagaaaatttaaagtcacttttaccctccatgaaaatagtacttagtatagaagaaaatgagctgcaaaaagttattgaaatcattccgagcattgaaaaagaattaaatgaggtcgcagtcttttttagatttgagcctgagaattatgaaaagttgttcaaagagtatatcgaagctagaaagcgtatagatcaaatgagtgaaataataaacactcactccgaaaaggatgagatagagaaagctgttgaaaagcagtggccaattaattttcaagattttcttaaaggtgagggtcagttgaaaaataatttcaaaatccaagcgtatcttgcgaatccagtagaaaatgaagatgaatttccatttgatgaaagtaccaagttagaaggaaatccgttaaaaagtattattaaagttgatgaaatttatgctcaaagaggtttgtcagataaggatgacgacgaaaacataaagaaaataaagaaattatcaaaacaatttactaactactataaaaagtttcatttaaaaacggatattaatcaaggtgtaatagatttaattaacgcgaacttcaaagcagaacggaatatggaaactcaattagacaagactttaatgactttggtgaaaccattacttagttttggttatccaggtttcggcagtccacatataagggtagcacctacgattgatgttgtagaagcaatggataatgaaagtagtgtgttatttaatgttcatccaaataatataagagacaataattattacttacctgaaagaaataatggtttaggttttcaaaatttgatatctatgttttttgagctgatttattttacaaaagagcgggttgttacaaatggtgacgatgtagtaaaagcactgcatctcattctaattgaagaaccagaagcacatttacatgctcaagcacagaaagtttttattgaaaaagccttgaatgtgattcaagaaaatcaagaagaagatttatatacacaattagtaataagcactcattcatcacatatagctgatcatgcttgttttgatgatttactatacttcaaacgtagaacaaatgaagatttattacatgaggtagaggttgtgaatttagagaagattaagctggatgataatccgaaagaaacgaataaaaagtttgttgaaaggtatttacaattagcggcacatgatatattttttgctgatggaataattatgattgaaggggcaggagagagaatcttattaccaagaattataaaaaaagatttccctatgttgggtaataagtatctaactattatggaagttggaggagcttacgcccataaatttttcccattattagagagcttggagcgacctgtattaataataacggatattgatagcgtaaagaaacatacgacagaaaaaaaagataactggaataagacatataccaaaaaaagcaatgatttacgtacatctaatgcaacattaaaaaaaatatttggaagagagataactataaaaaaactgttagaaaaatcagaagatgacaaattaaaggatggttttattagagtagcctatcagtatgtaaatcatactactatatcaaaggggcaagcatattctagaacgtttgaagatgattttgcaatgtccaacagagagttcataaaagctatagcaaatccaactggattactcaagaaatttaaaaatattttagatgaaagccctcagatgaatgccgatgtttcaaagaagttattcaaagtaacaaataaagagaaaacacaatttgcattagacgtaatttatgaagaattagaaaataaaacgaaatacattacaccacaatatattattgaaggattgaattggcttcaagaaaagctaaatgaagaaaacaaaggagagataatagatgaggcgtaa

SEQ ID NO: 80439 - DNA, 1791 bp, Bacillus sp. KCTC 13219
atgaggcgtaagagcgatgaattagtggaagaaaaattaaaatcttacgttgatttaagtaaacctaaaagcttttttctcttagcaggcgcgggttctggaaaaacaaaatcattagttacgattttacagcatattcatactgagcatgggcaacaattaagaaatgaagggaaaaagataggtgtcattacttatacaaaagctgcaagcgaagaaataaataggcgtttagattctacgaatgtatttcaagtttctacaattcatagctttgcttggaatataatccgatatttccaaggagatatcaaagactatttaattgaaagcacacaaaaaaaattaacagatttaatatgtgaaattgaaaaaaaagaaagtaaaggacaaatgccaacccaaacagaagaaaataaaagggagaagcttggagctcaacttgcggaatgggagatggtggataaattcacttattcgccagatacaaataatcgtgttataggttacttaggtcatacacaagtaattagtattctcaagtattttctaaatagcaaagtgttttttagaaagttatttgtaagcaaatatccaattcttctaattgatgaatgtcaagataccgaatctgatttaatggatgcgttacttttagtggaaaaagaacatgataatttttgtttaggattgtttggagatatgatgcaacgtgtttatacctcgggtaaggcagatttaaaagatgctatagcacactgggagaataagcctataaaagagatgaattggcgatctcaaaaaagaattgtagattttaataatcaacttcgtaaaaatgaagatgggctgatgcaatattctaacagggaaaaaataaatggggtatttatggtatatataagacctatcgaaccaaagggagtaaaagaagtagagggagagataaaaaagaatttcaaagaaaaaattcaagtagacgataaagaaataaacagcctaattttagaacataaaatggcggcaagaagaaatggattcataaacctttatgaacaacttaatgtcggacccacaaaggatgctttacaagatgctaatgggaaagaacttacctttatcaaaacaattatttttaaattgtatgaaatttatttgtcaaattgcaataaaattttgatgttaaaactacttagagaagaaaaaattctaaaaaataagggactaaagtggaaagatatattggatgttgccgaaggtttgaataaatatctacttctatttaatcatatagatgataaatcaatgaaagagtttattactgagttgcacaagttagatttatttgatgtaccagaaatttttttatttaaagatgagaatagtgagaaatggcgaatttggaataatgctttaaattgtacatgctcagagttcaataggtattttaaatacaaagaaaaggtagatggtttcgttactcaacagggatctaaagggcttgaatacaataatgtattggtaattattaatgatgacgagcaaggaggaaatctgataagttatgaaaaattatttggagtaactggattgagtgacactgacaaaaataatattaaacagaataaagacaatacactatcgagaactagaagattattttatgtcgcagcaagtcgagcaaaagaaagtttggctattgttgtttatactaaggatgtccatcagacaaagaagttttttatagatcacaatctagcacaggaagatgagattgacataaaaatttaa

SEQ ID NO: 80440 - DNA, 1815 bp, Roseivirga ehrenbergii
atgaagataacaaaactgaaaattgagaatttcagaggcattgagaaagccgaattatattttaatggtaatacagtgcttgttggagataacaatactggaaaatccactgttcttgaggcaattgacctagttttaggacctgagcggttatctcgctatccggtaattgatgaacatgatttttatgctggaaagtatatttctccatcagaattagaagatgaggatattgaaaacccgaaaatcaaaattgaggtaattgtaaatgaccttaatgaagatcaagaaactcgttttagtaacaatcttgaatggtgggattccaattctaaaagtctactagaaggcccgcctgccaatgctacggatcaagataatgtcaaggctgctttaaggattcattttattggctactatgatgaagaagaggacgatttttttggagaaacatacttttcatccccgcagctggaggatgaaacatttacaaagtttggtcgaagcgataagcgcatttgtggttttctttttcttcgaactcttcgcacaggatcacgagcattaagtttagaaaaaggatctctattagatgtaatactgcgccttcaagaattaagacccaaaatgtgggaagatatcttaagtgaattaagacaaatcccaattgctgaaaaccctgaaattggaatatcccctatcctagaaaaagttcaaaagagtgtgcgctcatttgtaccctctgagtgggctgttgatccacatttgcgtgtttctgaccttacacgagtccatctaagaaagcttttaacagtatttatgggaacaggggctatggttgatgatgagactgaatatgcagcgccatttcaacaccaaggaacgggaacaattaacaccctcgttttatctctcctaacaatgattgcggaactaaaacaaaatgtaatttttgctatggaagagccagaaattgcaatcccaccacatacccaaaagcgcattgtaaacagtgtaacgggtaagtcagctcaagctattttcacttctcattctccatacgtattagaagagttcgaccctcaaaatatccttgtggttaagaaaacaggcggtgaattaacaggatcaatagcaaaatatccaccagcagttaaaccaaaaaaatatagagaagagtttaaaaggcgattttgtgaaaccttgttagctcggcgtgttttaattgctgaagggagaacagaatatgaggctttcactaccgcagcaagaagacttaatgatctcgactctgataaatacacttctctagaggctttaggcatagctgtgattaatgcagaaacagattcccaaattgaaccactaggaaaattttataaagacttaggtaaagaggtctttggtgtatttgatcagcaaaccgatgaaagtagagccgcaattgaagctgtaattgatcatccatatgaggctcctgaagataagtttgaaaaggttgttttaaatcaaactgcggaaagtggattaagaaaatttgcattatccttagttgaaattgatgagtggcctcctcatttaactgaccggactccaacggaagaaatgtcatttgaggacttaaaagaaactcttaaaagatattttaattggtctaagggttcgggaactgcagctgatttgttcagcatatgtagcatacatgaaatacctgaatatgtaaaaagcaccttagaagccatcaaaaatattgttgatcccaaggctgaagatgctgctgatctagatcatgacgaggctcaagcggctgaataa

SEQ ID NO: 80441 - DNA, 1737 bp, Roseivirga ehrenbergii
atgccagaaatatttgatctatctgtagaaaaaagaagactactagaccaggatggacatctattggttttgggtggaccgggttccggtaaaacaactattgcattgcttaaagctgaaaaactcatcacagaaggcttaggcaatcatcaaaaaatcttgttcttgagctttgcaagagcaaccatttctagagttgaggaaaaagcaaaaggaatgcttaatccgattaacaaaaaatggttggagatcaatacctatcatggctttatctgggggttattaagaagtcatggttatttgataaatgactcaaggctaaaattattaactcctcctgaggccggagctatattagctccatttaccaatgaagatcgggatagagaaaaattgcgattattaaatgaggatggcttgcttcattttgatctattcgcccatacgtgcgcccaacttctaacaagaagtgagaaactttcctccattatatgcaaaaaataccctgtaataatccttgatgaatttcaggatacaaacggagatgaatggagttttatacaagagcttggaaaaagaagcaccttaattgctttagcagacctagaacaacgaatttatgggtttagaggggcagacccagcaagagtaggtcaatacatagatgtctatgcccccgaacagtttgattttggtaacgaaaatcacaggagttttggtactgatattacacgctttgggaatgaccttttaacgggagctaatagaaataatacgtacaacaatgttaggtgtatccagtatagatattataaccccccacatatacctttaaaaactgaggtcataagccgtattcgaaagttatcagtagaaaatagggaaagctggtcccttgctattctggttcctacaaaaaatcttatgacaacagtttcagattttttgagtgaagaacagacatttggaaatcgaaggcttccaataattggacacgatgttctcttggaaatggctggaccttctttagctgcagttttgattgcacgtttaataggaaaggaaagcctccacgatggtttagtaaaaaattgtcttgccgatttagatgcacatattcgaggtaggggtggaaataccgcacctgcacaagccaaattgcaactttcagaggcaataagaaattatattgaaacaggaaatatcagaggaaaaaatcgtcagcttctcatagctgaggttactcgtatagcggaggaagtacaagaatttcgattttctggaattccaggtgatgattggattttagttagaaaattacttcagaattccaccagcccagagattaaacaggttggcgaagatgccagatatttacggttgttaagaaaaggtacagttctaaattcaggtctaagtgatctttggcgcacaaatggtagctataatggtgcttcctcacttattagcaatgctttaatccaggagcatttctcttcgacgatcacaacttggaagggtgttcatgttatgaccatgcatgcagctaagggcaaagaatttgatgaagtcattatatatgaggggcctagcagatatagagataaaattcttagacagaatgcaaatgatcgagacactgatcaagccaaattggcactgagagtagctgttaccagagcaatgaagaacacgaccatactcaccccaagctacgattcttgcccattattgtaa

SEQ ID NO: 80442 - DNA, 2157 bp, Roseivirga ehrenbergii
atgaagattgaaagggttgacataaaaaattacagactcttaagggacttttccattgaattagaagatgacctttcattaattgtcgggaaaaataacaccggaaaaacttccttactcacagccttggatcggttcttgactggctccgatcgaaacaagttttcttttgatgactttaacctggatctcaaaagtgagattaaaacgcaagtaaaatcagacttgccagataaggacaagtatactccattgggtattaggctgaatttgttgatacgatactctgaatcggatagccttgccaatctgagccgtattatgaccgaccttgacccagatcactattacatcaatcttgagttcggtctattattggaacatgactccttaaagcaattgaaaagcgactatgctgaatttcaaactaacgagaaacagaaggaggccaaaaaagaaggttataaggcgcgagatctattttatttccttcactcaaacctgattgagtatttcaaattatctaaaaagtctttgtcatgctccaaagctacaggacagccggatggaaaattctttattgatcttggtggagagaacaacatttcattgaagaatttaattcagttcaggtatataagtgcaaggcgcgatgttaccaacaaggaacaaaacagcacgctttctcttcagacttcgcgcatttatgagaaaactgaggctacagacaagcaaaatgagcatatagccaactttaaagatgccttgggagacactgatttggcgttgaccaaagtatatgatgagctattcaaggagacagtggataaagtcagcaagtttggaggtatagccgaaggtgattccaagatcagtatcaattccacactacagcatagagatttgctaaaaggcaataccacagtgatgtatagccatggggagcatacttttcctgaattctacaatggactgggctacatgaacttgatcagcgtcatcttcgaaattgaaattctcctaaaggaatttaagaaaaccaaatatgaagtgccagccgatataaaccttctgtttatagaggaacccgaagcgcacacccaccctcaaatgcaatatgtgtttattaataacataaaagggttattaaaagaaggtatcaagagggaagatggtgcaaaccgaaaccttcaaacggtcattaccacccactcatctcacattgcttccgaaagcgattttaacgacatacggtatctaaaaaaagtgaacgacaccagtgtgatagctaaaaatctcaaagctttggaagcggaatatgattcagcaggagaagaagaaaattacaggttcttaaagcagtatttaactctaaacaaagcagaactattttttgcagataaagcaattctcattgaaggtgatacggaacgaatcatcctgccggcaatgatgaaaaagatagatcaagctgaaagtgagtctccgttactatctcagaatatttcaatagtagaagtcggagcctattcacaggtattcgagagattcatcgattttattggactcaaaacattaataatcacagatattgattcagcagaggtagtaaccaaaccagtggctggaaaagacaaaacaaccagggaagcctgtaaagtgagcgatcccaaagccgagttttccaccaattattcattaaaattcttcttgaataccgactcacttgctgaattaaaaggttttgatctggatcagaagagggttgaaaaaacagaagaggcagagggaaaaaaatggaaagtaagttcaaccggtaatgttcagctcgtttttcaaactcaagaagcgaatgaagcaggtgaggagtaccacgctcgaagctttgaggatgcctttttccatgtaaacaaggcgtttattaaagaccctcataacaagtttccctcccttacgcagaagcaccttaaaacctttcggaatgataagatgcatgtctatgaatttgctgaaaaggctataggcagcaaaccatcattcgcaattgagatactactcaatagcaaaactaataaggcaggtattgaattcagcaattgggaaatacctgcttatataaaagaaggtctcacttggttaagagatattaaggtatga

SEQ ID NO: 80443 - DNA, 1908 bp, Roseivirga ehrenbergii
atgactgagatagaggaaattttcgatcatatccacaacggtaggaacttccttttgagtggtggagccggaagcggaaagacctacaccttggtggaggtcataaaaagagccattgaagaaaacccaagtgccatgatagcttgcatgacctataccaatgccgctgtaaaagaaatcgaggaaagggttgggcatgagcatttaaacgttaccaccatccacgattttctttgggatcagatcaaacactttcaaaaagagctcaagctttgtttggttgaattggccaatgaagaagaaataaaagtcataaaagtggatggtgttgatccagtaccaaatgactatttcgacaacttagaagatggcattcaatacaaagaatactctaggattaatcaaggtgtaatttctcatgatgaagtcattgcattaagcaatcgagtttttgaacgctacccaaagttgggagatatggtcaaagacaagttcaagttcatcttcgtggatgagtatcaagacacccagatcgatgttgtacgcattttcctggaccacttcaagttaaccaagaaaagaaatatcatcggtttttttggtgatgccatgcaatcgatatatgataagcgcattggccgactggatgattacaggggcactgaagaaggacaggtaagagaggttcaaaagcggcagaacaggagaaacccaaaactcatttatgagctggccaaccaattaagaacagacggattggtgcagatccattcatccgataattctgctccaaacatgacgggcgggaatgtgaaagaaggtgagatcacttttctctattcagcatccggaaatatcgatgatgtaaaagcccatttagcctgggactttgctaactcaaaagaaaccaaggagttaaatcttactcataatctgatagcagataaggccaattttcaaaccttgatgaatatttatgacaaggacaaaatcctggaatacaagaagcgcattaaggactacataaaggatcatcctgttgattgggatctgagcgaaatgaccttcggtgaagtgattgaaagacttaaagaaggcaaaaaggggagggaattgaaaaaggttgaaccaactcctacacaacaggagttcatagatatgcacacaagcctttatcaggtggccttggatatggaatacgaagccttttcaagagtctatgtagataaagatcaactgctcgatgataaaaaacaggatgaagacgacattaataaaaagggtagcaagcgtgataacctgatccggcatttatatcgccttcaagaagtcatttggctttaccaaaaccagagatactatgagtttttaagggctactgatcataaaggccaactaaatacggtggccgaaaaacgaaacctaaaaaataaaattgaaagtctcgttgatgtcggggaaaagacaatcggaaaagtcatacaagaagcaaatgattttggaatctgtttgatagatgataagctaaatagattctcagagaatcagaaatacatttatgatcaggtgataaaagtcccattcaaagagtttcaagctttgtttgattacttggaaggccgcactccattttcaacacaacacaaaactaaagggacagaatttgacaatgtcctagtcattctggacaatggaggttggaataattacaactttgaatatctctttacaaacagaacggataaggccagtgtgcttgagcgtagtcagaagattttctatgtctgctgtacacgagctaaagaacgcttagcagtttattatcatgctcctggtcaagcagttatcgataaggccattgaatggttcggtgtgaagaatgttgtcaacttagacgaaacccattga

SEQ ID NO: 80444 - DNA, 2331 bp, Chryseobacterium sp. GSE06
atgcgtatccaaacaatcaaagtgcgtaattttagacgccttaaaaatgcacagatcgacctagaagataaaacttcaatatttgtaggggcaaacaacagtggcaaaacttcagctacctatatattgcaaaaattccttgatcccaattcaaaggctttttcaatacatgactttagtagtgactgttggaaaaaaatcaatagcctagcagaaattgaagatgatacacctccggatttcccagcaatcagcttagatatttggtttgcagtaaactctacagatttacatagaattattgatcttttaccaaatttggactggaaagacattccagtcggcgttagaattgagtatgcccctaaaagcccagaacttttactatcaaactacagggaactgaatgcaaaagctgctgctaaagcaaaagatgattatcacccttggcctagaactcttaccgactatttaagcaaaaacatacgaagcgaatatgaaacaaaatattacgtcttagatcgggaacagtttgatgatgaaatgaatataataggagattatgagccattgcagctaggtaatgattcggatcggccaggcgctaaaatcatcagatcgcttataaggattgacatgttaaatgcacagcgcttcctcgatgacctcagttcgggtggacgtgcggaagacctttcaaaacgtatgaaccgcttttacgacagaaatcttgagaaaaaagaggatgactttgatgctatgcaagctcttgcaacatcagagagcgaattgacgaaacatttaaaaacagtatttaatcctactcttcaaagtctaaataaattaggttatcctggatttagtaatccaaaacttgaagttagggcaacactcaatcacgaaagtataattggacagacaaaactccattactcacttggaggcggtaccgatttcttgtccctacccgaccggtacaatggacttggttttaagaaccttatttatatgatccttgaaatactggattttcatgcccgctggttggaagaggaagatgctagggcaccacttcacttaattatcatcgaagagcccgaagcccatcttcatgcccagttacagcaggtttttataaaaaaagtttgggaaatcataaatccaactgaggcagaggacaccttcaagaatcaaataattgttactacacattcaccacacattatttatgaaagcggtttccaaccgatacgatatttccagcgacagattgcagacacaggcgttcagacaacaaatgttcttaatctaacaacattctacaataaatcacatgaagaaagtagagaatttttacagcgttatatgaagctgacgcattgtgacctttttttcgcagacggtgctattctagttgagggtaatgtcgaaagacttttacttcctcctatgatcaacaaatgtgctgaagagttgaattcatgctacctcagtattatagaggttggtggcgcatacggtcatatttttaagcaattgattgaatttttaggtcttacaacattaatcattaccgatctagacagtatagagccggttcctgctaaactagaaggtgctgataaggatacaactagttcaaccgaactccttgtagaagctgatttgaccgtggcagcaacaatcgattcaaatttggatgaacaagaaattattgatgaagatgatgaagatatattaagtaaacctggtaaatcatgcatttcagattttgaaggtgccgtcacttctaatcaaacacttataaaatggctcccaaaaatcagcggcatacgagaattgctagatgcaccaaatgaaagtaaaattcaaaataaaagtgcagataataatgctgatgtattcattacctatcaaacaagaacagaagtatcatggaatggcgagtcaggtgcttatgcaggccgaaccttagaagaaagttttgcattgacaaatctggaatggacgcaagatatagcacaaagacatttgggattacgagttataacacttaaaaagaaaaggacattggaagaagtccgaaccaggttatacaaaagagttagtggaggatctttcaataaaactgattttgccctgggtttaatgttaaaagatccagaaagttggaacgtgccaaattatattgaaaaaggtttagaatggcttaaggaaaaaatcgcatttgttgatgatgagccagatcctgtagaagaacttgaaattgcagagaataaatccgaagtaggacaaaagagtgaaatagcagatgagcaggagaataaataa

SEQ ID NO: 80445 - DNA, 1914 bp, Chryseobacterium sp. GSE06
atgagcaggagaataaataaaccggataccgctgccgatattgagttacaaaagtgtctcaaggataaaacaagcttcgttgtagtagcgggagccggctcgggaaaaactacctcgttaataaaggcactgaaatatattgatgaaaacgaaggtaaaatgcttagacaacagggcaaacgtattgcatgtatcacttacacaacaacagctgaaaaagaaattttggatgacgttgggcatgattatttatatcacgtatcgacaattcatagtttcctgtgggaacttataagaccatttcagataaatattaaaaagtgggttattaataaaatccaatctaaaattaatgagcttgaagatgcagctgaggctttcgggccgcgtgttcaacagagaacgagagagaggaaccaagctgatactcagaggtacaaagaaatggctggattaatacaaaacatacatggctttaattacgaaacaggaagtaactatcttgaagggatcttaggacacaatgacatcattgcaatggtaccagaacttataagttcgtcttccttattacaaacaattctagctgaaaaatacccttatttctttattgacgagagtcaagacactgttccaaacttcattggtgcaatgaaagttgtagataaaaatattaagaaattctgtctcggtttttttggtgatccaatgcaaaaaatttacatgactggtgctggtcctatcacgttggaagacggatggacgcagattgccaagcccgaaaattttagatgttcaacagatgtattaaatatcataaataagataagaattggaggtgatgatttacaacaaactggaggcaggcaagagaaaatagacgatgaatggaaggctgtgacggggtcaagcttattatttgtgcttgaatcagatgatcatcgtgaagagaaaatacgaatggtaaggcagtatcttgctattacaaataatgatcagctctggacttcggaagaaaaagaagctgatgtaaaaattctcgtcatggagcatagaatggctgctaagagattaagatttggagacctatttgcagcctttaacgacggatctaccgaaagcataagcacaggttttaaagaaggtactttgtgggctgtacaaccctttatcaaatttatcattccagttgctatagcgcatgggaacaacaaacattttgaggttatcgagctattacggagattttgtcctcagttggaaaaagataatttaaagcacttaacaattgagtcaagtgaactgctttccgggttaaaaaatcatgtcgagagtctttttggtctaatgtcttcaggcactgcaactgtaaaacaagtatttcaatatcttgcagaccacaagttaatggaattggatgaacggatatctaaaaggctagctggaaatgaagtcgaattattgacggaggttgatgaggctacaggaattactaatgcagtaatatctcgtttctttgatgtgcctgcgaagcaattttttggctaccagatttacataaatgatgaatccccttattctacacagcacagtattaaaggtgctgaatttgagcgcgtacttgtaatcctagacgatgaagagggtaactcgaatagttattcttacgaaaaattgctcggaatcgtaccgctttcagacagggacaaggaaaatatagaggcaggaaatgacagtacgccagccaggacaaggagattattttatgtatgctgttctcgttctttaaaagatttagctgtagtattgtttgtttcagatgtcaatacagcgttagaaaagattaaagaggtaagtatttttgatggtagcgaagtacgaacagaaactgatctaacaccttcattatcatga

SEQ ID NO: 80446 - DNA, 1752 bp, Enterobacter aerogenes
atgtatttaggtagcctaaaaatttcgcggtttcgatcttgtgatgatgtgaccgttagtctccgcccagatttaactgtattggttggtgaaaataatggtggaaagtccaatgtcgtagacgcaatcagattgcttactttgccgttgagtggacgccgcgaacgatatccagaagatgaggatgtacgacgctattcgacagtcccaagttttcaaatcgaaggggctttccaaggcctaagcgatactctaaaaggtctattgatatcagcagttcccgatcctaccaagagcgaggctaccttcggctatcgatatgaatcgcgttctgaacatgctccccgtggtaagactaccgtgtgggctggacgcttcgacactaatggaccagagcttggttcttctgagttgatcagacacgtttatctccctcctttaagggacgcacatcaggtgctgggtactagcagcggcactagagtgatggcattgctgcgtaatttcttgccaaaagagcgggagcaggatttcctcgctggtgtcaggcgtgcggataatcggcctgagatcttaactacaatcaatacggatatcagtgctgctctcggactactcactaatggagtacgtccgcagatagcggcattggattttggtagcgaaaccttactcgatgtagctcgtgatttgagatttcgtatggccgatacaggtttgataccagaagatattcggtcttctggtctggggtactcaaatttactctatatggccactgttgttgtagagttgactaaggccaaagaggcagacctcacgattttccttgttgaagaacctgaagcgcatttgcatccgcaattacaggtacttgtgcttgagttcctcttggatcaagcgcgccaatcagcatcacgtatcattgaaccaggaaagcctgaaggccgcatccaaattgttgtgacaacccattcccccaacctgacagcatgggtttctccacgtcacctagtggtcatgcgttcgcggcatcgtgaacaagatggaatatccatctcagaatcagtgagtgtgcccattgccgaaataggtctaaagccaaagacattagataaaattagccgatatcttgacgtgactcgttccgctttgctgtttggtaacagagctatcttggtggaagggatcgcggaagcactattgttgcccgtgctagcacaaaagcttgtgctagccgatgatttagatgggtggcttaggttcaagggggctgtaattgtgcctatcgaaggtgtggacttccgtccatatgttgaggtactgctacggccatatggtgatgcacgtattgctgatcggctgatagtgatcactgatgcggacccaaccgtgttgggaaataggaaagttgatctggaaaatctggctgcaacgcatggagctccagatgctctgatcgtgctaaccaatcagcatacattggagcacgaaatttttggcgctggaaatgaaagtttcctgaaaagcgtgtttcttcgtttgcatcgtaattcacgtagagactgggaagcgcagatagaggccattccagaacaagatcgccccaatgcatttcttaaattaattgaggcgaaaaagactcgtaaaggcgatttggcgcaagctatggcttcgcgcattgaggcgggtgaaccatttgttgtacctccttatctcattgatgcaattcgtggagcttcacgtatatga

SEQ ID NO: 80447 - DNA, 1776 bp, Enterobacter aerogenes
atgactggcatccacaatctaaccccagagcaagaaacatttgctgcccacattggcggagctttcgttaatgcttgtcctggagccggaaaaacacgcactatcattgctcggctagcgaggatcgccgctacgttgcctcctcgtcagggcatagcgatactttcattcacaaactccgctgtagacgagtttcgcgaacgatgcctggctgctgggctcgatacgcttttgcaatatcctagtttcatgggaacacttgatgctttcgtcagacatttcgttgtactaccaagctgtgcggtatcaaaccagatacgaccaatcatccttgatagttgggatactcttggcatagaaattcgtttatcaggtcaatttgcctttcgaggtgaaccggtaagcctcgatttgtttgatccagaaaccaatattattgttcctgataggatcggacatgtaggtttgcaaaatcatgtccgtcaacatcagcttcgataccaacaagcagcagcacatcggcgaagatctttgttacaagctggctatatgagtgcaggagatgcacgtgctcaaacattgcggttgattagagataatgtaattggtggggcacttgctcgcgcattagcggcacgttttcaagaagttatggttgatgaagggcaagattgcaatccacttgatctacaaatactgacatggctcagagcacatggggtaaatgttacgttcgtctgtgatcctgaccaagcaatctacgaatttcgtaatggtaatcctcaaggaatacaggtatttaaggatacatatcctattgcgtcacataaggagttgacgggtaattttcgtagtagtcccgcaatttgccagttagcagcctctttaaggcgagaaggtcaggttgatcggtcgcttggtgaaagtgcgaatgttgactatccaattttacttcttacctacggtggccggggtccaacggcaatgattggtcagatattccttgaacggattacggaactgggactggactcaaccaaggcgattattttggctcactcaggcaaagttgcgttacgcgcagctggtgtcacttccagcaattcaatcggaaactcgcgaattgagacgctggctcgtcaagtgtcaacgttctggtcacctgccgcaaccccaaaaacgaaggagaatgtagtccagtcagtcgaaatattattgctggatttaatgggtgtgcgtcaaccaaatgagcatctgattaaagccatagagcgtcttggtatggaccggcgtgcccatcggagatgcgccctaagtttcctcattaaccttccaaaaacgtgtagagattcggatgaagagcggcttgcctggatagcctgtgttcacgcggaaatggagaggttgcatctgccactccaggctggtgtaagcgtacgtcgtttcttccgacagccacctaatgcgcattggtcaaagcatcttcaagtgcccgcagctctcggttttgcatgtggcaatatacatgaagtgaaaggtcgtgagtacgatgccgtatgcgtcgtagtcccgccaaatcgagctcctgaaaacagagttgaagcactcttcgagtcatggcaagcgcgagtagatgctgaggcaaagcgtgtactttacgttggcttaacccgtgctcgtaattttgttgctcttgcgataccaaacgcctttgcagggcgctgtgtggatttgctggctacacgccaagtgccctatacaagagtggatttgtga

SEQ ID NO: 80448 - DNA, 2031 bp, Klebsiella quasipneumoniae; identical to SEQ ID NO: 73116

SEQ ID NO: 80449 - DNA, 1674 bp, Klebsiella quasipneumoniae; identical to SEQ ID NO: 73117

SEQ ID NO: 80450 - DNA, 2370 bp, Lactobacillus plantarum; identical to SEQ ID NO: 75772

SEQ ID NO: 80451 - DNA, 1941 bp, Lactobacillus plantarum; identical to SEQ ID NO: 75773

SEQ ID NO: 80452 - DNA, 1812 bp, Mucilaginibacter sp. PAMC 26640
atgcacttatcaaaccttaagctttggaattttagaaaattcggtacacccgtggaattggatgcgtctaaacagccaaacttatccctggacttttcgacgggattgaatgttatcattggtgaaaacgattccggaaaaactgctataatagatgccattaaactcgttctaaagacacatagctatgagtatataaaagttgaaaacagtgattttttcgacaataccaataggtttagaatagaattggtttttaccggatttgagcctgaggaagcaaagaattttacagaatggctcggctatgaaactatagatagtaaaatagtaacctatttaagggtgatttttgatgttcggaaagatggacaaaaaatacttccggccgatgttaaggctggagtagatgaggactgttatattcttactgctgaggcacgagaatatttgaaagcgacttatttaaaaccgctcagggatgccgaaaacgaacttatcgctaaaagaaattcaagattgtcccaaatccttttaggtgatgctacctttaaaggaaaagaaaaatcccatgaccttgtaaaattatttcaggtcttgaataagaacctaactgattattttaagggcacttttgaaatagtgactaaagaggaagatggcataactgagaaaaagcacctgcctcaagatggtaagcgaattaaggatagtattgatatacatgttaaacaatttcatggaaaaaaacatgaatctcattttaatgccagcccaaatgatattaaagcaatacttgaaaagttatcgctttcgctcattaatgaacaacatccagggcttggtacgcttaacaggctttttatggccgccgagctattgcatttgaataaaaaggaatggtcgggtattcggttagggctaattgaagaattggaagcgcaccttcaccctcaggcacaaatgcaagttattgaggcattgcaaagtcaagataaaattcaactgatcttaactacacatagtccaaacttagcctctaagttgaagattgagaatttgataatttgtcagcaaggcaaagcctatcctatgggggatgattatacccgacttgaaaaagacgactacaaatttttggaaaagtttttggatacaacaaaggctaatcttttttttgctaaaggcataattttagtagaggggtgggcggaagaaatacttataccaagcatcgctaaaagtattggagtaaatttaactgaagctggcatctccatagtgaatgtcgggaatcttgcactagacagatattccaaaatttttttacgcaaaactggttccgcgatggaaatgccgatagcgattgttactgaccctgatgtaagagcttattcaaggaataaaaagcccgatgggaaatatgagtattataaagtcgaggaagatcaatttaaaaaggatactgctaataaaatcaaggatatagaaagactttctgttgcaaatgtaaaatactttcctgcaaaaatatggaccttagaatacagcttatttaaatcaacctcgttaacaaaatcctttattgcagaaacaacgaaaatccattccggacaagagtggaaagatgattttgaatataatttgggtaaaagtttaatcaataaagtattacataaaacagaaattgcttataaccttgcgctttcaattgataaggatatatccaacaatgtttttattgatgccacagatgatagtgatacgattagttatattttaaatgctatcaaatatgcagctggaatttga

SEQ ID NO: 80453 - DNA, 2136 bp, Mucilaginibacter sp. PAMC 26640
atgcagctggaatttgaaattaccgatgctgacattcaatatgcagaaagcatattacttccgttaggttgtcgttttgaccatgagcgaaaagaattcatcaaaaatttagccactttagatttgcaggcggttccaggtagtgggaaaacaacagctttacttgctaagcttttaataattgaacagaaactaccattcaaaaatggtcgggggattttagttttatctcataccaattcagctgtagacgaaataaaagagaaaatacataaatattgcccgaagctattttcctatccaaattttgtgggtactattcaaagttttgtagatacattcctggctttgccatgtgggcacaatttgttaaaatcaagattttcgtggattgataaagataaatatgaagaaaccttattaaaaaaatttcatcagatcgcctggctggaagagtacggtgagccaacaaaatggttttattcacgatttataacaagggctacagcggaagccgcgaaagaagggaagtttaaaaaagaggttgtgaatggattgattgacgctgaagtaaaatcgctttattatgattttaacgatgatacaatcaaatcatttaagactttagaagtggttttaaaaacgcccgataaccttaaatttattggacttaaaaagattatactcgaagttttacaatgtggcattatctcatttgattacgcttattgtttagcaaagtactttatttcaaaaatccctaactcgaaaatttatgtccaagagagatttgcatttgtatttgttgatgaaatgcaggatatggataataggcaatatgaattattagaaacaatttttcatttcgatgccgccgatagatgcatctaccaacgtattggcgacaaaaatcaagctatttatcatgctgttaatgagtcaacaatatgggttaatagaatccccaaattgccattgcaaggcagtcaaagattaagtaggctaataggcgaaatcgttaatcagtttgcaatagagcaagatgatgaccaaaaaatagtaggtttaaaagaatgcccgcttaaagcacatttattagtatttgatgatgattcaacaggggagcttatccctttttatgtagatatagttgaaaaatataaaattcaaaatctgcttcctgattatctgaaatatccgatttgtgttatagcctggaacgctgattggaaaaatttaatagatgctcagaatattgaaaaattaaggctgatcgatttttacggcaactataataaaactattaagagccaaaagccagactatgaaaattactatgcttatttagagcattgtgataaaaataaaaatacgctggagtctttccggaaaaacatcttgaatggcctagttaaattacttaggatagaaaatctttataatacgggtggcagatttttcactaaaagaagtatgctccaatttataaacgaatatgacctgaaaaatggtactgaaaatttaacggaactaaaactacatatctataactggtcaataaaagtccttatggacgaaatagaaagcgttcacactgaggtaattgcctacgcagatcattttgtgaacatatggagcaaaccgatttcctgtaccggaaaacaattttgcagtcaaaaaacaataacccaaaatgttgttgtaggcaatcaacccgtcattgaaccatttaaagtttcaactatacacgccgcaaaggggcaaactcactgcgcaacactatacattgaaagttattatgatgggcattatgaatcggaaatactttcagacgcatttttaatgcatgctactcacgatagcctcaataagttacgggaacaagctgtagttttaaaggaaacaataacgaatctgaacggtgccaagggttctaaagcaagacagaccgatttgaattctgtatatgctaagattgctaaagtcagccaatgtgcaaaaatggcttatgtaggcttgtcgagatctacaaacttattgtgttatgccgtacataaaaagagatatgaattatatctaaaaggcttagatagagaaaaatggcaagtagagtttgtggcgggtaaagaatattaa

SEQ ID NO: 80454 - DNA, 1695 bp, Pseudoalteromonas spiralis
atgtacatcaaaaaggtaacaatcaacaactaccgcaactttcgctcttttgtagcccagcttcaacagctaacagttgtcattggtgaaaacgatactggtaagacgaactttttcaccgcactttcattaccgttaagcggcaaccaaatagactttaaccataagcgtttgagtgtttctgacattaacaaagatgctgttattgattttttgacatctgtagttaatgaagaggcagaagagaaccaacttcagaagatccctaaagtatcagtaaccgttgagttcgctgatccgaaagatgcttatgaaacagcactgttggctaagtggattgttgcgggtgatgaagaaacttacagaatcagatatgactttaagcctaaaagtgacaaggacttacttgatctcgtgaagaaatcactcgctggtaagactttggatgatattaactggtttactctacccgttgagatatacgactaccaaatcgtatctgtgaacaacgaaaagcctatcgcatacagcgacttaaaacacgtcagcgtccatagtatcaatgccgagcgagatgacttctcagaaagcagttcaatgaagtccaatagtattttcacaaagctgcttatgaacacactagacgatgacgacaaaggtcagatcaacacagcctactctgagttctttagtgctattgaaaaaactgaaacattcgataaagtcattggaactaatgaggactttgagaattacgacagtattatcaaacagcttgagtgcactcctaacctgcctaacttgaagaacattttatcgaacatcactttgagatatggtaatgaatttctgtaccaaaaaggcttgggacaacgaaatcttatctatatactcattctgtttgcttactacaagtcatgtggtgatacatttaacttatgctgtatagaagaaccagaagcacacttgagcgttaacaatcttcgtttagtaagagacttcattgagaaaagctcaagtaaaagtggatcgcttgtacaaactatcatttcttcccataacccatcgattatcaataagttgaagatttctaatgtcttggcttttacgggtgagaaagctattagtctgtccgatactccaactaaactagtgaactacctaagaaagagacctaatttcgacattctaaagttgctgttcgcaaacaaagtcattctcgtagaggggccgactgaagaaatgctgatcagcacttatttgtctaaacagccagccctcagcgacattgatattattccgatcggtcaacgtggttacgccactttcttagatatatggctcgccttgaacaaagataaccagaacaaaaaaattggtattatccgtgattatgataattcagatgcagctaaagccagacacgatgcttatgacactgcgcacgcgaacgtcactgttagaacaacgacaaattacacacttgaaattgatttagtcgaagcagaagataatttagctttgctaaatggtctattcaaaatggatggcgacctagacgaagtctccggtcacatgatagatggtaaaacagcaagaatgcttgatgtctgtgatgcgatggttgatgaagagaaaccactggatatcaagttgccggcccacatcgctgaggtcatcggggaactgtcatga

SEQ ID NO: 80455 - DNA, 1374 bp, Pseudoalteromonas spiralis
atgatagaaatacagattgctggtgcaggtgctgggaaaacttatggcttagcaaaaactttgatagaccataccaaagcttgtactagtcacaaaaagacatttgcactgacatacaccaacactgcaacagcaaagatagagcaagagataatcaaacaacatggctttattccatcgaatctctatatacagacagtacatagctttttgttgaatgaaatcatctacccattttcatcatttactctgggtgacgtctataacgatacatcaataatgagcttacctcctccgaagtacaaaaatagcctttttgcacgactaagaaagatgaatgttattcatgctgataatgtatacaatattgccaaacaaatagttgatgaaacaattagcaagcacagtaacaaggctaagaaagcaaaagtccgcagactattggctattctaaagagttgctttgataagatattcatcgacgaagtccaagatttagataaagatgcactccgctttttcgaggtcctaggtagcaacgatattgacatgtatatgattggagacccgaagcaagcaatcaagttcccccaagatcttgatacttttgtcaaaacagtagccccaaaagaatacgcgaccatactaccgatcaacaatcaaaccagacgagtaccaacagaaattctagcggtttcaaatagcttctgttatgaagaacagcaacaagagtcgctatcagaagtgattggggagcttatgtttatagaatcaacagatggacgctacgacaagttactagagggttacatagctacaaaacaacttgtttgtatcgaaaaaaagaatggtcgctatacaacttcgtctaaacacaaacaatcatttccacgagacattgaggaaatgattcgtgagtctaatcacaagaaagacaaaatgctgtttgtgaaagctgcttttatcgactttatgagtaatgtcaccgaagtcggagctagagtagctattagcaggctaagatctcgacactcattaacttttaataaatctcacttcgctcagctatatgaactttgcaacaagctcaaaaacgatgatatgcagtatactgtccaaagtattgagtctattaaagggttggaagcagaaacctgcttattaatactaagccccaacacgctgaaatatttaacaaaagaaaaacttagccaagctagtcactacaataaagaatggaaaaaaatctatgtagcccttacccgagcgaaaaaaaggctagtgttagctttggatcatgagcttttggctggttatgatatgaatgcagttcgcgaatctttgggcgcattgggattcgtcaatcatgattaa

SEQ ID NO: 80456 - DNA, 2316 bp, Klebsiella pneumoniae; identical to SEQ ID NO: 73440

SEQ ID NO: 80457 - DNA, 1878 bp, Klebsiella pneumoniae; identical to SEQ ID NO: 73441

SEQ ID NO: 80458 - DNA, 2316 bp, Klebsiella pneumoniae; identical to SEQ ID NO: 73440

SEQ ID NO: 80459 - DNA, 1878 bp, Klebsiella pneumoniae; identical to SEQ ID NO: 73441

SEQ ID NO: 80460 - DNA, 2316 bp, Klebsiella pneumoniae; identical to SEQ ID NO: 73440

SEQ ID NO: 80461 - DNA, 1878 bp, Klebsiella pneumoniae; identical to SEQ ID NO: 73441

SEQ ID NO: 80462 - DNA, 2316 bp, Klebsiella pneumoniae; identical to SEQ ID NO: 73440

SEQ ID NO: 80463 - DNA, 1878 bp, Klebsiella pneumoniae; identical to SEQ ID NO: 73441

SEQ ID NO: 80464 - DNA, 2316 bp, Klebsiella pneumoniae; identical to SEQ ID NO: 73440

SEQ ID NO: 80465 - DNA, 1878 bp, Klebsiella pneumoniae; identical to SEQ ID NO: 73441

SEQ ID NO: 80466 - DNA, 2316 bp, Klebsiella pneumoniae; identical to SEQ ID NO: 73440

SEQ ID NO: 80467 - DNA, 1878 bp, Klebsiella pneumoniae; identical to SEQ ID NO: 73441

SEQ ID NO: 80468 - DNA, 2316 bp, Klebsiella pneumoniae; identical to SEQ ID NO: 73440

SEQ ID NO: 80469 - DNA, 1878 bp, Klebsiella pneumoniae; identical to SEQ ID NO: 73441

SEQ ID NO: 80470 - DNA, 1731 bp, Klebsiella pneumoniae
ctgtttgtcgaagcggtacttgccttccctgaactggaagagcaagacgctactcctcttgatgccgttccggagttctttaatcagatggcggcttccggtgagggagggccccttaaggcccggatacgactacaagcaacatggacggatgacggtacgccggaaggagcaattgaggaggatatacgctggataagagccctggatgataattttgaatgggatgactgttccaggattcaggctgtagagcgctcttcaatccagtttatttacttaccggcaaatcgtgatgcgacgactcaagtgaccgcccttctaaaagggcggttatggcaggctgccaaatggtcgacggcatttagggatgcaagctatgttaatgccggtcagatccagagcagtttcgaagaagaggagccgtcgaagtttctgctggagcgtctttcgaagcgttggcaacaggtgcatgaagccgatacagacagtaaaccgcgtttaaggctcatcgagaaccgttttgaggagcttgttcgtaaagccgaatttacttttacgcctgatgaagaaggtcaggagcgtcatttgtccgagctgagtgacggtcagcgctctctgttccatatcgctcttacagcggcaacgctcgaaaccgagcgggaagctttttctttgcctgctgatgacagctcatttgaacaggataagttacgccgtattcacctgacgattcttgccatcgaagaaccagaaaacagcctgtcaacgttctttttatctcgcatcatcaagcaggcgagagagattggcgcactgccttccgctcaggttctgctatctagccattccccagctatcctgagccggatagagccggaggaagtgagatattttcgtatggaccggagcgctcggcgctcatcgatccgagaactgactctgcctgaagatgatgttgaggcaagcgtttatgtcaggctggctgtaaaggcataccccgaactttattttgcgcgatttgtaatcctaggtgagggagactcagagcgagtcgttattccgaaaattgcggaagagatgggggtttcccttgatccatcattcgttcccgtcgttccgctcggtggacggttcgtagcgcatttctggcggctgctgaatgatcttgagattccacatgccacattgctcgatcttgatctggggcgccgacatggtggggtgaataccatgagaagctgccttcagaatttggccgatatcgggagtaattttgggagcgccaatggagctaatgttgctcagcttaccgaccaacagctttataatgaaggcctgcaaggtcaatggcttcaagcattcaggagggaaggtgttttcttttcctatcccattgatctcgattttgccatgttgcacgcctttccaaccgcttatcaggttgccaatccaggtggcaatggtcctcagagtagtgctgttgctattcaagccaaaaaggtcagtacgctgaaaacaggtggtaatcctgccttgtataccgcgcattatgatgacgctttcaaatggtatccgtatttgttcctgagccgcagtaagcctgaaactcaccttgcggctttttcccgtatcgcggaaggtggtgttgctgcgtccgctcctgtagagctcagggcgctcattgagtacgttacggataagcttaatctgtcaggagagagtgaatga

SEQ ID NO: 80471 - DNA, 1866 bp, Klebsiella pneumoniae; identical to SEQ ID NO: 73847

SEQ ID NO: 80472 - DNA, 2316 bp, Klebsiella pneumoniae; identical to SEQ ID NO: 73440

SEQ ID NO: 80473 - DNA, 1878 bp, Klebsiella pneumoniae; identical to SEQ ID NO: 73441

SEQ ID NO: 80474 - DNA, 2316 bp, Klebsiella pneumoniae; identical to SEQ ID NO: 73440

SEQ ID NO: 80475 - DNA, 1878 bp, Klebsiella pneumoniae; identical to SEQ ID NO: 73441

SEQ ID NO: 80476 - DNA, 2316 bp, Klebsiella pneumoniae; identical to SEQ ID NO: 73440

SEQ ID NO: 80477 - DNA, 1878 bp, Klebsiella pneumoniae; identical to SEQ ID NO: 73441

SEQ ID NO: 80478 - DNA, 2316 bp, Klebsiella pneumoniae; identical to SEQ ID NO: 73440

SEQ ID NO: 80479 - DNA, 1878 bp, Klebsiella pneumoniae; identical to SEQ ID NO: 73441

SEQ ID NO: 80480 - DNA, 2316 bp, Klebsiella pneumoniae; identical to SEQ ID NO: 73440

SEQ ID NO: 80481 - DNA, 1878 bp, Klebsiella pneumoniae; identical to SEQ ID NO: 73441

SEQ ID NO: 80482 - DNA, 2316 bp, Klebsiella pneumoniae; identical to SEQ ID NO: 73440

SEQ ID NO: 80483 - DNA, 1878 bp, Klebsiella pneumoniae; identical to SEQ ID NO: 73441

SEQ ID NO: 80484 - DNA, 2316 bp, Klebsiella pneumoniae; identical to SEQ ID NO: 73440

SEQ ID NO: 80485 - DNA, 1878 bp, Klebsiella pneumoniae; identical to SEQ ID NO: 73441

SEQ ID NO: 80486 - DNA, 2316 bp, Klebsiella pneumoniae; identical to SEQ ID NO: 73440

SEQ ID NO: 80487 - DNA, 1878 bp, Klebsiella pneumoniae; identical to SEQ ID NO: 73441

SEQ ID NO: 80488 - DNA, 2337 bp, Pseudomonas aeruginosa
atgcatttgaagaagttggccgtccggaatttcaggcggctgcgaaacgttgtaattgatcttgcttccgacatctctatttttgtcggtgccaacaacagcggcaagacatcagtcgggcacgcactccagttattcactggcagtggccgcttcaacattcacgactttagtgccgaactttgggccgacatcgttgcgtttggtgagggcgatggcgaggcgagccttcccacgatggaaatcgacgtttggttcgaaatcggtccggacgatgttcaccgcgtcatcgatcttcttcccagccttgcttgggaaggcaagctggtggggatgcgtgttgcctacgcgcccaccaatcctgcggcgacgcatgcacgctatgtcgaagtgcgccagcgcgtgctcgatgcggtcgctaagggtgaagacggagcacccgccttcgatccctcgccacgtaacctgcgggagttccttcgcgacaggctacatgacgaatatgagctgcgctatttcgtactcgatcccgcgcggttcgatgcgaagatggtcgcagaggctggctatgacccagccactctcaccggacgcgaccggagcggccgtgagatcttgaacggccttctccacattgacttcttgaacgcacagcgccatctctcggacggcccaggtggctctcgcgccgaggatctctcccgtgtactcagtcgcttctacgggcgcaacctcgaacagaaaggcgaagatatcgaagcgttgcgcgccctcgcagcatccgaagtctcgcttaatgagcatctcgaacgagtgttcgaaccgacgctcaagagcttgtcgaagctcggctatccgggcctctcaaacccgcgcatgatgatccgctcggccctcgaccctgcccagatcatgagcggtcgagatggcgcgatcgttcactatgcgttgggagccgatgacgggaagcccgacccgcctaccttgcccgatcggtataacggtcttggcttcaaaaacctcatcttcatggtcgttgagctgctcgacctccacgctcaatggctggcgatcgaggaaaaccgtccgccggtccacctgatcttcatcgaggagcccgaagcgcacctccatgcccagcttcaacaggccttcatacgcaaggtgatggacatcctagcgctcaagggcgaggaccgcacgcactatacgagccaggtcgtcgtcacgacccattcgactcatatcctttacgaacgaggcttccggccgatccgctattttcgtcgaagccgtgcacagaatgtgtcgacatccgatgtgctcaacctctcggttttctacgacagcaccgatccggacatccgaagcttcctcgagcgctatttgaaactcgcgcactgcgatctgttcttcgccgatggcgccgtgctggtcgaaggcaatgtcgaacggctgctattgccgcagatgatcgccaatgccgcgccgcggctgcaatcgacctatctcaccgtcctagagatcggcggagcgttcggctaccgattcaaaacgctgatcgagtttctcggactgacaacgctcatcatcaccgatctcgacagcgtgttcggtccactggggcaggatggcgagggtgcggcacccgctggtcaaccggaagccgcggaaccagccgccgagaacgcgcaggctgccggcgctgacgctgaggacattgacgatgacgaggaggatttgcctgtggctgcggagaagcccgggaaggcgtgcatagccggtcatccgggcgcggcgacgtccaatcagactttgctccaatggctaccgaaatgcgacacggtcgccgccctgtgggaggcgacggctgagcagaagatccaggcgaggacggacgacaatgacgctttggtacgcgttgcctatcagtgccggaccgatgtcacttggggcggagaaaccctggcgctagccgggcgcacgctggaggaagcattcgcactcgaaaatcttgaatggtgtcaggacaagaaccgtaagccgcttcagctccgcatcgccaaggccgacgagaagaacctgaccacgcttgcggaacgcatccacaagcgcgtgcaggctaagagcttcagcaagaccgacttcgcgctcgccttgttagccgaagatccgagcagttggtctgtcccaacctatatcgccgagggcctgagctggcttgagaccgagattgcgccgccggaaccggacgaggaccagccgcatgagggccagccgcatgaggacgcgccccagggggcaccagtcgccgccggcgacgaggtagcggcatga

SEQ ID NO: 80489 - DNA, 1878 bp, Pseudomonas aeruginosa
atgacaagccggatcggcagtcctgacacacaagccgatctagatgttcgagcgtgtctcgatcggatgccgccacgctcgtttgtcatggtcgccggtgcggggtcggggaaaacgacctcgctgatcaaggctatggcgcacctagccgagacccgcggtcctgccctgcgccgcgccgggcaacaaatcgcctgcatcacatataccgaagtcgccgtcggtgagatttcggccgatgtcggggcctcgccgctattccacatctcgaccatccacagtttcctgtggtcagtcatccggccgttccattcggatatcgcggcttgggtagccatccgcatcgacgagaagatcgcggagcgacgcgcacactacgacaagcctcggactcaggcgaaaacgaaggcccgcctcgaacaggagatcgcagatctcgaagccgatctggctgcgatcagtgaagtagagaagttcgtctacggcaccggcagcagctacgctgaaggcatccttggccatgacgatatcctcaagctcaccccagcctgcgtcgcagcgcatccgctgctgagacaactcgtcgctaagcgctttccctacatcttcgtcgatgagagccaagacaccaatccggaggtcgtcgaggcgttacggcacattgcgggcgaacatcctggcctgtgtgtcgggttcttcggagacccgatgcagaagatctatatgagcggagcaggcactgtcccgctgaacgacggctgggcggagatcacaaagcccgagaacttccggtgcccgacatcggtgctcggggtcatcaatgcaatccgcgcccctggcgacggtcttgagcaggtgcgtggtcggacgataaccgttgatggcatcgagcagccggttgccggtacctccaatctgttcatcctgccggcggacgcggagcggagtgcgcgcctcgcggccattaggcagtggctggccgccgaaaccggcgacggtctgtggctaagcgacgtgcgggaaggcgatgtccgcctgcttgtactggtgcaccgcatggcggccaaccggctcgggttccctaatctgtatgctgcgctcaatgaccgagcccccatgagtctgagtgaagggctgagcgatggcacagcctggccgctccgtccacttgtccagcacatacttccgctcgttgtcgcggcgcaagcgggtgatcggttcacagtgatatcgaccttgcgcagcgaatgcccgaggcttgaaccagcgcggcttcgagggcaagcgacggcccccgttcttacagcgctacagcaagcgctcgacgggcttgtcggtctgttggcagcaggatcgcaggcgactatccgggacgtcttgacgcatgtgcgagataacgagttgctgcgcctcgatgatcgcttcgccatgcatctggttgcagagcctgtggatgacggcagcagcggcttcgagaacgttcaagcctatctggcatgcggtgtcgacgaactctgggcctaccggcgctactttacagaggagtcaccgttcgcgacgcatcatggggtgaagggtgcccaatttgagcgcgtattggtcgtcatcgacgatgaggaagcgggcttccggcagtattcttacgggaagtatctcgggtacgtccccctctcggacaaggacgaagccaacctggcggcaggtgaagagtccgtactcgatcgaacccgccgcctcttctatgtgtgctgctcgcgtgcaacgaaggacctggcagtcgtggcctttgtgcccgatgtcgcagcggctcgcaccgcgatcgtggcgcagaatctattccccgaggccgtaatccgaggtgcggagcatctgggctga

SEQ ID NO: 80490 - DNA, 2139 bp, Pseudomonas aeruginosa; identical to SEQ ID NO: 75460

SEQ ID NO: 80491 - DNA, 1800 bp, Pseudomonas aeruginosa; identical to SEQ ID NO: 72909

SEQ ID NO: 80492 - DNA, 1752 bp, Limnobacter sp. CACIAM 66H1
atgtatttaggcggtttaacaatttcacgttttcggtcttgcgacaatgtgacagtcagtctccgacccgatctgactgtcttggttggtgaaaataatggaggtaaatccaacgttattgatgcgatccggttgcttaccttgccactgagcggacgaagggagcgttatcctgaggatgaggatataaggcgacacgcggctgtcccgaactttcaaattgaaggcgctttccggggcctaagcgatacacagaaagggctgttgatttcagcggtaccagatctcactaacagcgaagctgtattcggctatcgatatgaatcgcgttcagaacgtctcccaaggggtaaaactactttctgggctggacgctttgacaccaacgagcctgaggcgggttcatctgacctgataaggcatgtttatctacctcccttgcgcgatgcgtatcaagcacttggcacaggtagcgggacccgagtcatggcactactacgcaattttttaccaaagaaccaagaacaagactttttgactggagtcagtcgcggagaaaacagacctgacgtccttatgacgatgaacgctgagataggcacagccttgggtttgcttactaacggagttcgtccccaaacagcgattctggatttttgcactgaaacattactcgatgttgcccgagatttaaggtttcgattagccgacactggcttagtgcccgaagacatccgcgcttctggtttgggttactccaacttactctatatggctactgtggtcgttgaactaacgaaggcaaaagaggcggacctcacaattttcctcgttgaggaacctgaagcacatttacacccacagctgcaggtactcgttcttgaatttcttctagaccaagcgcgtaggtcgaccagttgcaatattgagccaggcaagccggaaggccgcatccaaatcgttgtgactacccattcgccgaacttgacagcatgggtttctcctatacatctggtggttatgcgttctcgtcgaagcgaacaaaacggggtaacggtttcagaatctgtcagcgtacctattgcggaactaggactgaagccaaaaaccttagataaaatcagccgctacttggacgtaacacgctcatcgctgctgttcggtaatagagccatccttgtagaaggaattgcggaggctcttcttttgccggtgatagcccaaaagctcgttctcaatgatgataccgacggatggctccgcttcaagggtgcggtaattgtaccgatcgacggagtggactttcgcccttatgtcgaagtgctgctacgtccacatggcgatgctcgcatcgctgatcgattaatagttatcaccgacgcggacccaactgtgttgggaaatcgaaaagttgatctggaaaaccttgctgcaacacatggcgcatcgcaagcactgactgtgctaaccaatcagcacactttagaacatgagattttcagcgctggaaacgaggtctttctcaagcaagtatttcttagtctgcaccgcaagtcgcgcagcgactgggaagacaaaatcgagcggatcgagttagacaaacgccctgatgcatttctcaagcttattgaggtaaaaaagaccagaaagggtgacctggcccaagctatcgcgtcacgtattgctgtgggcgatgaatttgtagtgcctaactacttggtcaatgcgattcgtagcgcatcccaagcatga

SEQ ID NO: 80493 - DNA, 1776 bp, Limnobacter sp. CACIAM 66H1
atgaccggtattggcggactaacagctgagcaagatgcattcgccttacatgttggcgaggtctttgttcatgcttgccctggcgctggaaaaacccgcacgatccttgctcgcttatcaaggatcgtctccgagttaccaccgcggcgtggtgtagcagtgttatcgttcacaaactccgcagtagatgagtttcgcgaacgttgccagatcgcaggattagattcactattgaagcatcccagtttcatgggaacacttgatgctttcgtacggcattttgttgtacttccacactgcgcagcgacacgctcgatacgaccaaccatcctcgacagttggaacactttgggtgtggaaattcggctatctggaaaattcgcgtttaaaggtgagtcagttagcttagatttgttcgacccggaaaccaatattattgatccaagcaagattggacatcttgggctgcaaaatcacgtgcgcctgcatcaagtccgatatcaacagacggctgcgcaccgtagacgtggcttgttgcaagctggttacatgagtgctgccgacgcccgcattcaagcactgaaactaattcgcgatccagtaaacggtacaacactaggacgatctttggcagctcgtttccacgagatcatggtagacgaaggtcaggattgtaatccgcttgatttgcagatcctttcatggctacgagcgcacggtgtacatgttactttcgtctgtgaccccgatcaatcaatctacgagtttcgtcatggcagccctgcgaggattctagaatttaaggaaacatatcccgttgactcgcatatccagttaactggcaattttcgtagcagtccagtagtctgccggttggccgccacactcaaaagctctggtcaagtagatcattcacttggggatacagtgaatgttgaacatcccgttttgcttctaacatacggaggccgtagcccaatggctacgatcggtcaggctttcctagatcaagttactgaacttggcttggaggtaacagacgctattatcttagctcatgcaggtaaaatcgcgctgcaggctgctggggtgatcaccaaagatccaaacggtaactcgcgaatcgaatcgctggcgcgtaaagtggcggagttctggtcacccgctacgacagcgcggacgagggaggctgtgcttcaggtagtggaaatgctgcttttagatttcatggggctcagcaagccaaacgagtatttatcgagggccatcgaacgccttggtttgaatcgacgggcacatcgaagacgtgcgctgagcttcctactcagtcttcccagagcttgtggtgatagcgatactgatcggctcgcttggatcaactgcgtgcacaaagaaatggaaagattagatttgccgacaccaactggtgtatcggtgcgcaatttctttcggcgaccagccaacgagcagtggtcgaaccatcttcgaataccaccagaacttggcctttcgtgtgcaaaaattcatgaagtgaaaggtcatgagtacggggcagtatgtgtcgtgattccgcccaatcatactcgtgaaaatcgaagtgaagctcttttcgattcgtgggaaacacgcaccgactcagaggccaagcgtgttctctacgttggtttgacgcgtgctcagcatctgagcgcgctcgctgtgccagtcgctttcgccaatcgctgcacggccatattagccgcaggccaagtaccctacacaaggcgagacttgtaa

SEQ ID NO: 80494 - DNA, 2112 bp, Bacteroidetes bacterium UKL13-3
atgcacatatcttccttatccatcagaaattttaggaatttcaaaaatgtaaagctgaatttcaaaaatgggataaatacaataattggtgaaaatggttcaggcaagacaaacttgttttatgcgttaagaattttgcttgacgacacactaccgagatacattaatttttattcctctgattttaacagagctttagggagttgggctggacattggataattatttcaattgcctttgacgagttagaggccagtgaagaagcacaagcgttagcggttcaatcaagcggacacatggacaccgaaacgaaaggcagttatgctgtttatttccgaccaaaatatcaattcagaaaagagctttttgactattcccaaacagcaggcaagaacacaactgacttacaactgatattagacaaactaacacttgaagattacgaaacggtttatttaagcaggggttcagccgactttagtgttgatgcaacttacaatcagtatgtaggaaactttgaaaaagttgagtttccagaccctgacaataaagaagaactaatctttggaacttggctgcccaaagaaatcaatattcacaatgaagtatcatgcacatttattaaagcgttacgagatgttgaaagcgatttaaggtcttatgcaaacaatccactactaaaccttttgagaggaaaggaaaaaacagttgaagttgcaaagcaaaccgaaatcattgagagcattgacaaactaaatgaacagataagttcgcttgatgaagtaaaagaaataaaacgaggtattgacaagagcattaaagaagcggttggaacaacctatgcaccgaacattgatataaaatcagagttgccaaatgaaatggagaagctatttcaatcattgaaactgtgggtaggcgaccccgatgatgaaggttataaaggaaggatttgggaattaagtttaggcggtgctaaccttatttatctttccttaaaactacttgaatatgaaaaagtaaagacagacagaattgcaaactttcttttgattgaagaacccgaagcacacattcatactcacattcaaaaaacactcttcaacaacttaaaagagaataaaacacaagtaataatttcaactcactcaacacacatttcatcagtaagtaaaattagcagcgtaaatattttaagtcgtggcgaaagacaagcgttagtttttcatccttcaaacaatttagagcctgacgaaattgttagagttgaaagatacttagatgcagtgaggagcaatttgctttttgctaaaggaattattttagttgaaggcgatgcagagcaaattttaattcccgaaatgttcaaaaaagtatttggactttcacttgatgaaataggaattagcttgataaatataggcagcacaggttttgaaaatgttgcgagcatttttcacttcgacagaatacaaaagaattgtgcaattctcactgacttagacaaatcaattgtaacacttcctgctaacccaattgacgatgatgattatcaaaaacattgtagagcatcagaaaagagtggagcagaaagaaaagttagacttactgacttttgcaacggaaatgattttttaaaacctttctatgctaagaacacttttgaagttgattttctaatgaaaggtaacagctatgagtttgttcaatgccttgaaaaaatttattcaagagaagcagacaggactaaggcaaaagtaaaacttgaggatgcctctgttgaaattgctggtgttgaagtattaaggattgcagataagcaaggtaagggttggttagcattgttggtcgctgaacaaatattttacaatacctatatcccatcatacatccttaaagccattgcatttgcttctgcacacattaatcaatcctcaaaagtgaaagcaattatttatcgcttgaattcaattaggaataatgaaaatgacgacttacaagacgaagcgaaaaaatttaagacaagaggaaaaagcgaagaggaaattttaaaaacattctgtgacacattcacagaagaccaactgacgaagttcttagcactgatatga

SEQ ID NO: 80495 - DNA, 1776 bp, Bacteroidetes bacterium UKL13-3
atgatacttgataaattaaatgatgagcaaagattagcagttcagcaagacggaaatgttttgttgacggcttgtcctggaagcggaaaaacaagagtaattattcacaaacttgcttatgaggttagtcgacttgaagaaggaagcaagaaaagaattgcagcggtaacttttacagttagagcatcagaagaaatttttaggcgacttaacgctttaggaataagcagcgaaagaatttggtcaggaacattacatgccttttgcttggagtggataatgaagccctactcctgttacctacccgaactgaaaaacggtttttcaattgcagatgaaactttttgctctgatttaattagcgaactgaaagagaagtatggacttcaacaaatagaccctgtaaatcttcggtttaacagagacggtagttttgtagagccaaaaagtgttcagaaaaaacttttaaaagagtatcacgaaatattaaaacagaaaaaacttattgattttgaattgctgctttattactcttatcaaatattggaaacctatccgaaaattcaaaaaacactttcaaatatcttcaaactgatttgcgttgacgagtatcaagatacacaagatttactttatgctatcatttctacaataatcaaagcaggcaatggcaatacttctttgtttcttgttggcgatacagaccaagcaatttatgcttctctaggcggtgttgccaaaagcatggacgaaattcaagccgagttgaatggaatgcaaataactccattaacacttactggcaattataggtcaagccaaagagtaattgatttttacagacactttcaaactcaatcaatagaaattgaagctgtcggaaacaatgcagcaaccgaaggtttaattacacttaacaatactattcacagctcaaaaattgtggatgaaattactcgactaatacaaaatagtttagacaacggaactcctgaagatgaaatatgtgttcttgttcctcaatggtggttgattacttctgtttcaaaaaaattaagagctactttacctgaggtaaactttgatgcttcgggattagcaccaatgtcaagaaatagagaaaatatttggtataaactttctcgactttttctcacagaaccaaatccgaaaatttattcttcaagatataggtgggctaacgagttaattgaaaactttagagttattacaaatacagagtttattgagaaatacaagatagaaagaaatttattacgacttattaattctataaagtctgatgaagcagaaggcatcgactatcttgttgattgctttgaccaatttctttctgctgttgaaattgattacacaaagtatcctcaattggttgaaaacagaaaactattctttgacaatattgaaagtcgcttgaatgaccctgattttaaagtcccaagcgacattcaatcattcaaaagtttttatagagaaatgactggcgtgattataaatacttgtgttggagtaaaaggtgaagaatttgaaacggtaattgcctacggactactgtatggatacattccacattggaatgaaatcttttcaggcaatgcaatggaggcatcaaagaaactgttgtatgttatttgttcaagagcaaaaacaaacttgcatcttatcagtgagacaggtagaacaacaagacgaggagatgaacttacaattacacctgaattagcaagcaaagtatttgagtatgatgaaatatga

SEQ ID NO: 80496 - DNA, 2079 bp, Bacillus cereus; identical to SEQ ID NO: 80282

SEQ ID NO: 80497 - DNA, 1743 bp, Bacillus cereus; identical to SEQ ID NO: 80283

SEQ ID NO: 80498 - DNA, 2070 bp, Streptococcus pneumoniae; identical to SEQ ID NO: 71978

SEQ ID NO: 80499 - DNA, 1818 bp, Streptococcus pneumoniae; identical to SEQ ID NO: 71979

SEQ ID NO: 80500 - DNA, 2001 bp, Listeria monocytogenes
atgagtaatccatatctttcaaaagtaagaataaaaaattttagaaattttaaggatgtagctgtagaattagagaagcagcaaattgttattggtgaaaataatgttggtaagaccaattttattagagcaattcaattaattttagatccttctctgtccgaagaagagagatacttaaatgaaaccgatttttttgaaggtcttgaatcacctttcgagaataatgaatttattgaaattgagattgaattaagaaactatgaaaataatttaaaacttttgactattttatcaggtgcaacagtcagtaataatccagatactattagaattacttatcaattttttccagaagttgactcaatgggaaatactgaatataaatatcgaatttttcaaggggaaaacaaagaactaaattttggtcataatgaacgtagattcttgaatatgaaagtaattcctcccatcagagatgtggaaaaagatattcgtagcaataagaaatcacctataaaagccttaattaaagattatgatatagattctaaagagttagaagctatatctgaggaattagatgaggcaacaagttctttgttagatatggatgaactaaagtatctaacaggttcaattaacgataggtttagtgcagtagtgaatagccaaattgatttgccagtatcatttaaaactatggatattgctcccgctaagttattaaactccttgaaaattgttttaggagagagtggaagaggattacatgatacaagtcttggaataaataaccttttgtatatatcattacttctactttctttagaagataatacagttcctagcatactctctgaaaaacaatataatattcttctagaagatgatacagagctgattattgataaattatacaaagttacttctaatggaaaacgtataataaactctaacatttcagaagcagactataaaaaattatatactttcatggatgaaaataataaaaataaaaattttcaaggattctcaattcttgttattgaggaaccagaagctcacttgcatccggcgatgcaacgtacgatttacaaagatatatttaatagaaatgtctcaatgctcatgacgacacattctcctcatattacttctgtggcaccgataaatagcatcgtacatttaaggaagagtagtcaaggtactttgataaatagcacagcaaatttagattttactgacggagaacaaaaagatttagagagatatattgacgtaaaacgtggagaactgtactttggaaaaggtattctcttagtagaaggagttgcagaagaatacttaattccggaattctctagagtgttggagaaagatcttgataaacatggaataatttgctgcaatataaactcaactaatttcaaaccatattacaaatttttaagagcactaaaaatgccaactgcaataataactgatggcgatttctatttccaagaagagaaaatagaaaatggtgaaaaaaagataatatctacttttcataaaatggaatataacacacctactggagcaaacaagttttatgatggattggaaagaatgagacaacttgtaaaagatatagggatgttctcagaggctgttgatacccttgatgatgaatctttagaagctaccttaaacaaagaaggcatctttatcggtttttatactttagaaatagacatttttgaaaatttagatgccattgacaaagataatgtctggaacctatttaatgaattaaccgcaggtggggataatcataaaagtaatttcaaagaccatctggacaataaaagatttgacaaatgtttaaagatgatagaaggcaccacgtctaaaattggtaagggaaggtttgctcagagattatcattagacatttctccagaaatggtaccagattatattaaaaatgctataaattatattgtcgaaaatgtttaa

SEQ ID NO: 80501 - DNA, 1779 bp, Listeria monocytogenes
atgactaaatattttgaaaaactatcccagataaaagaagataaaaatcagtatgaagcactattagcaaactctaatgctgtaattaaagcaggacctggcagtggtaaaacaacagttttaacggtaaagttaaaacaattactgatggaaaaaattgttgaccctagagggatcgtttgtttaacctatagtaattctgcggtgaaaaactttactcaaaaattaagagagttaggtgtgaacaaatccaatagggttatcctttcgacggttcatggattttgcatttcacaaattcttatcccctttgggaagatttatgacacgagaataaattttccaattaaaattattaatgaaaaggaaaaaaacgaaatatttagagtttctgaaaatgaattagctatttcaaaacaatatactttaaaaaatgttgaagaatatagaaatgaaatgtatggttcacgtagttccgtagacataaataaagataaacagctagagaaactgtgtttgctatttgaaggaaaaatgttagaaaaaaatttttgtgatttcaatttaattataagtgaatctcttcgtttaatggagaaacgtccatatattcttaaatgtttagaggcaaaattcccatggattttgattgacgaataccaagatttagggaaaatattacatgagattgttttattgtttcttgaaaaaactaaaattaagtttttcgttgttggcgatcctgatcagtcaatctataaatttcagggtgcttcgccattttattttttagaactttatgatcatccagatatgaagaaaataaatttaactactaattacagaagtgatcaatttttaattgattctgtattaaagacattagactgggatgatagggagtatgtgtctggaataattaatgagaagcctgcaaaaataaatttttttgaatgtgaaaatggcatggaacaacagtataaattagttgctcaacgattaattccaacgtgtattgctaatgatatttccctttcagaaatctgtattttggttggatacaataaacaattagatgagctttccaatgtattagatgaagaagatatagcctattatagagaaggattgccatttttaaaattaaaatttgtgttatggctacaagaatgctgtctatatttatcaggtagtaataaagtaaacttcaatgatatatctgatgaatggttgtttataaataataaagatatacgtaattttgatgaaaaaatgaatctatataagagtctagaaaaaagtaaattgaataaagctagttttaaaaagtggcttaaagaaatttttatagatttggatttgtctaatgttctatcttgttctccatacagcaatgaagttgacgatgttaagaagttcatcatacaagttatccagaatgaagtcttgaaaaatcatacagttaatcaatttggaaacatctcagctatagacaaccaagtaactatctctactcggcatagttctaaagggttagagtttgaggtagtcattattcttggcttagaggatggaagttttcctcactatacgcatgagataggtggtcaagaatatcaagaagacctgagagttttttttgtctcacttactagagctaaaagagtagtgtatttagttagatcaaaaagtatatctggtatcagtaaatatggaaatccatattcttttaagaaggaaccatcaccgttttggacattattaaaacaaaatttttga

SEQ ID NO: 80502 - DNA, 1758 bp, Streptococcus pneumoniae; identical to SEQ ID NO: 73330

SEQ ID NO: 80503 - DNA, 1539 bp, Streptococcus pneumoniae; identical to SEQ ID NO: 72173

SEQ ID NO: 80504 - DNA, 2190 bp, Staphylococcus aureus; identical to SEQ ID NO: 71904

SEQ ID NO: 80505 - DNA, 1794 bp, Staphylococcus aureus; identical to SEQ ID NO: 71697

SEQ ID NO: 80506 - DNA, 1758 bp, Streptococcus pneumoniae; identical to SEQ ID NO: 73330

SEQ ID NO: 80507 - DNA, 1539 bp, Streptococcus pneumoniae; identical to SEQ ID NO: 72173

SEQ ID NO: 80508 - DNA, 1758 bp, Streptococcus pneumoniae; identical to SEQ ID NO: 72172

SEQ ID NO: 80509 - DNA, 1539 bp, Streptococcus pneumoniae; identical to SEQ ID NO: 72173

SEQ ID NO: 80510 - DNA, 2070 bp, Streptococcus pneumoniae; identical to SEQ ID NO: 71808

SEQ ID NO: 80511 - DNA, 1818 bp, Streptococcus pneumoniae; identical to SEQ ID NO: 71809

SEQ ID NO: 80512 - DNA, 1671 bp, Acinetobacter baumannii; identical to SEQ ID NO: 71826

SEQ ID NO: 80513 - DNA, 1782 bp, Acinetobacter baumannii; identical to SEQ ID NO: 71827

SEQ ID NO: 80514 - DNA, 1794 bp, Acinetobacter baumannii; identical to SEQ ID NO: 71916

SEQ ID NO: 80515 - DNA, 1782 bp, Acinetobacter baumannii; identical to SEQ ID NO: 71827

SEQ ID NO: 80516 - DNA, 1758 bp, Streptococcus pneumoniae; identical to SEQ ID NO: 72172

SEQ ID NO: 80517 - DNA, 1539 bp, Streptococcus pneumoniae; identical to SEQ ID NO: 72173

SEQ ID NO: 80518 - DNA, 1758 bp, Streptococcus pneumoniae; identical to SEQ ID NO: 72172

SEQ ID NO: 80519 - DNA, 1539 bp, Streptococcus pneumoniae; identical to SEQ ID NO: 72173

SEQ ID NO: 80520 - DNA, 1794 bp, Acinetobacter baumannii; identical to SEQ ID NO: 71916

SEQ ID NO: 80521 - DNA, 1782 bp, Acinetobacter baumannii; identical to SEQ ID NO: 71827

SEQ ID NO: 80522 - DNA, 1758 bp, Streptococcus pneumoniae; identical to SEQ ID NO: 72172

SEQ ID NO: 80523 - DNA, 834 bp, Streptococcus pneumoniae; identical to SEQ ID NO: 76279

SEQ ID NO: 80524 - DNA, 1758 bp, Streptococcus pneumoniae; identical to SEQ ID NO: 73330

SEQ ID NO: 80525 - DNA, 1539 bp, Streptococcus pneumoniae; identical to SEQ ID NO: 72173

SEQ ID NO: 80526 - DNA, 1917 bp, Listeria monocytogenes; identical to SEQ ID NO: 73702

SEQ ID NO: 80527 - DNA, 1908 bp, Listeria monocytogenes; identical to SEQ ID NO: 73703

SEQ ID NO: 80528 - DNA, 1758 bp, Streptococcus pneumoniae; identical to SEQ ID NO: 72172

SEQ ID NO: 80529 - DNA, 1539 bp, Streptococcus pneumoniae; identical to SEQ ID NO: 72173

SEQ ID NO: 80530 - DNA, 1758 bp, Streptococcus pneumoniae; identical to SEQ ID NO: 72172

SEQ ID NO: 80531 - DNA, 1539 bp, Streptococcus pneumoniae; identical to SEQ ID NO: 72173

SEQ ID NO: 80532 - DNA, 1758 bp, Streptococcus pneumoniae; identical to SEQ ID NO: 73330

SEQ ID NO: 80533 - DNA, 1539 bp, Streptococcus pneumoniae; identical to SEQ ID NO: 72173

SEQ ID NO: 80534 - DNA, 1758 bp, Streptococcus pneumoniae; identical to SEQ ID NO: 73330

SEQ ID NO: 80535 - DNA, 1539 bp, Streptococcus pneumoniae; identical to SEQ ID NO: 72173

SEQ ID NO: 80536 - DNA, 1758 bp, Streptococcus pneumoniae; identical to SEQ ID NO: 73330

SEQ ID NO: 80537 - DNA, 1539 bp, Streptococcus pneumoniae; identical to SEQ ID NO: 72173

SEQ ID NO: 80538 - DNA, 1758 bp, Streptococcus pneumoniae; identical to SEQ ID NO: 72172

SEQ ID NO: 80539 - DNA, 1539 bp, Streptococcus pneumoniae; identical to SEQ ID NO: 72173

SEQ ID NO: 80540 - DNA, 1758 bp, Streptococcus pneumoniae; identical to SEQ ID NO: 72172

SEQ ID NO: 80541 - DNA, 1539 bp, Streptococcus pneumoniae; identical to SEQ ID NO: 72173

SEQ ID NO: 80542 - DNA, 1758 bp, Streptococcus pneumoniae; identical to SEQ ID NO: 72172

SEQ ID NO: 80543 - DNA, 1539 bp, Streptococcus pneumoniae; identical to SEQ ID NO: 72173

SEQ ID NO: 80544 - DNA, 1758 bp, Streptococcus pneumoniae; identical to SEQ ID NO: 73330

SEQ ID NO: 80545 - DNA, 1539 bp, Streptococcus pneumoniae; identical to SEQ ID NO: 72173

SEQ ID NO: 80546 - DNA, 1758 bp, Streptococcus pneumoniae; identical to SEQ ID NO: 73330

SEQ ID NO: 80547 - DNA, 1539 bp, Streptococcus pneumoniae; identical to SEQ ID NO: 72173

SEQ ID NO: 80548 - DNA, 2001 bp, Listeria monocytogenes; identical to SEQ ID NO: 80500

SEQ ID NO: 80549 - DNA, 1779 bp, Listeria monocytogenes; identical to SEQ ID NO: 80501

SEQ ID NO: 80550 - DNA, 1758 bp, Streptococcus pneumoniae; identical to SEQ ID NO: 72172

SEQ ID NO: 80551 - DNA, 1539 bp, Streptococcus pneumoniae; identical to SEQ ID NO: 72173

SEQ ID NO: 80552 - DNA, 1758 bp, Streptococcus pneumoniae; identical to SEQ ID NO: 72172

SEQ ID NO: 80553 - DNA, 1539 bp, Streptococcus pneumoniae; identical to SEQ ID NO: 72173

SEQ ID NO: 80554 - DNA, 1758 bp, Streptococcus pneumoniae; identical to SEQ ID NO: 72172

SEQ ID NO: 80555 - DNA, 1539 bp, Streptococcus pneumoniae; identical to SEQ ID NO: 72173

SEQ ID NO: 80556 - DNA, 1758 bp, Streptococcus pneumoniae; identical to SEQ ID NO: 73330

SEQ ID NO: 80557 - DNA, 1539 bp, Streptococcus pneumoniae; identical to SEQ ID NO: 72173

SEQ ID NO: 80558 - DNA, 1758 bp, Streptococcus pneumoniae; identical to SEQ ID NO: 72172

SEQ ID NO: 80559 - DNA, 1539 bp, Streptococcus pneumoniae; identical to SEQ ID NO: 72173

SEQ ID NO: 80560 - DNA, 1758 bp, Streptococcus pneumoniae; identical to SEQ ID NO: 73330

SEQ ID NO: 80561 - DNA, 1539 bp, Streptococcus pneumoniae; identical to SEQ ID NO: 72173

SEQ ID NO: 80562 - DNA, 1758 bp, Streptococcus pneumoniae; identical to SEQ ID NO: 73330

SEQ ID NO: 80563 - DNA, 1539 bp, Streptococcus pneumoniae; identical to SEQ ID NO: 72173

SEQ ID NO: 80564 - DNA, 1758 bp, Streptococcus pneumoniae; identical to SEQ ID NO: 72172

SEQ ID NO: 80565 - DNA, 1539 bp, Streptococcus pneumoniae; identical to SEQ ID NO: 72173

SEQ ID NO: 80566 - DNA, 1971 bp, Haemophilus influenzae
atgaaaattatatatgtgaaaattaaaaattttagacttctttctaatgttgaattggagttagaaaaggatacaacagttattgttggaagaaataatagtggaaaaacatctttaacagaagttataaggcgtttcttaggaaatgattccccatcatttcaattagaagatttttctacagagagctatgataattttttaaacttatttgaaagaaaattatctagtgaagaacaaacagaagaatctttagatgaatcaccagaaattaaatttcgtaatagtttacccgcaatagaactatgtttaacaatagaatatgataaaagtctccctaattttggcgcattatctccttttattattgatttgaatgaagattgcacaaaaactcatatcattatcagatatgagttagaatatggaaaaatcaatgagttttttttaagtgaaattaatctagaaaataaaattttatttttacaagaattaaggaaacgaatatcaaaattttttaccacaaaagtatgggcacaagatcccaatgatataaataatcaaaaagagctaacattaaaagatgttaaaaaactaatacaagttgattttattaatgctcaaagaggattagatgatgtgacaactaaagaatccaagcctttagctagactacttgaaggattttttgatacaacatcaatgtcaaaagaagatcaggataaatcaataactcaagaattagaaaatgctgttgctagtgtacagaccagtataaataaagatatttctgaaaaactaaaagatttattcccatcattaaaaaaatttggctatccaggattaggaacacgatcacttcaaacagaagttattctagatgtaaagaaattattatccaattttactcatgtttattatcctaatagtggagtaaatttaccagaatcctacaatgggcttggtacaagaaatctaatcttaattttattgcagcttgctagatttcataaagaatattctacgaaaaatgatggaaggaatattcatctcatctttatagaagaaccagaggctcacctacatccacaaatgcaagaggtgtttataaaacagcttgaagaagccacaaaaatgttagctagtacaggaacctcttggatacctcaattcataatctcaacacattcctctcatatatcaaatgctgtaggatttgagcatatacgctatttcttacaaaataatcagcaaaaaacaatagtaaaagatctaaaaaaagatttttcagattgtggcaagaacaaggaatttattcataaatatatgacattaacaaaatcagatctgttttttgctgataaggctattttagtagaaggacttacagaacgtttaatgattcctaaaatgatagaaaaattagataaagaagaaaaaaccaatctagagggaaattaccttacactattagaaataagcggagcatttgcacataaatttatcctattgctagacttcttagaattaaagactttaattatcacagatttagattctgtcactgaagaagttaagggtaaatcatgtgaggttcataacggaaaatcaacgagtaatgcttgtattaaattttggtttgacgatgagaaagatctttatactattcaacagaaaaccgattcagataaaatcaaaaataaaattcgcatagcctatcaatgtccagaatcaaaagattctgcatgtgggcgatcatttgaagatgcgtttatgattgcaaataaagaaatgttttgtctacaaataactaatgctaacgagttagaatgtgctgcatatgaagaagctaagaaatatgcaaataaaaaatcagattttgcaattaaatatgccattgatgaacctgataattggaaaaccccaaaatacattaaagatggtttagtttggttagctacaggggaataa

SEQ ID NO: 80567 - DNA, 1734 bp, Haemophilus influenzae
atggaacaattaaccttaactgaggccgataaagcaagtaaaaaagcgttagaggaattatttaaatgccttgataatcaaagacacttccgtttagaagctggtgcaggagctggaaaaacctattcacttattaaagcactaaattacataatagataacaaacaagatttatatctaaaacaggggaaaaaaattgcttgtattacatataccaatgtggcgaaagatgaaattcttacaagaatagataataatcccatcatcttttgtgaaactaatcatgcattctgttggaatttaattagccaattccaaaaaaaattacaagagttaatcaatgaaattcgagaatggggtaaaaaattggaggaggaatcagaaaatactgatggaaaacagataatatatgaattgggccatcgttctataaaagatgggaaaatatcattacatcatgatgatgttattactcttacgattaaactattagatatagctaaatttcgtcaaataattattgaacgatatccaataattttaatagacgaatatcaagatactgataaagattggatcgacgcaattaaaaattattttttagataataaaatctcgccacaatttggtttctttggtgatcattggcaaaaaatttatagtaatggttgtggattaatagaacataaaaatattacagaaataggaaagaaagtaaactttcgctcaaatcatgttattgtctctgcactaaataaaatcagacaagatctcccacaagcttctaatgatgaaagctcagatggcgctattcgtatatttcatactaactcttggtctgtaaatagacaaactgcatcacattggaaaggagatttatcagaggaagattttcaaaaagcatttaaactaactaaagattatttaactattcaaggatgggatttatcttctagtaaaactaaaatactcatgcttacacataagttattagcaaaaacacaggggtatacggaaattgcaaatgcttttaaatataatgaatcttttgtaaaaaaagagcataaatatattgaatttttcattgataaactagaaccagtttgtgaagcatttattaataaaaagtacggggaaatgtttagtattttagaacatagattccctttactatatagtcattcagagaaaactgaatggcaaaatgcaatgaaaaaattaattgatataagaaaatcaggaacaattaaaaatgttattgatttactaaaagaaacatcgaaacctaaattacctgattctatattaactatggaagaaagattattgatggttaataaatcagatgaactatccagtaaccagagggaattacttgcattacataatattgcttactctgaaattatagagttaaaaacttttttagatggccattctccatttcaaactcaacatggagtaaaaggtgctgagtttgagaatgtacttgttattataggtagaggatggaatcaatataattttggtgatatgctaaaatgggtaacagatggaattccaaggggaaaagaagaagcttttgaaagaaatagaaacttattttatgttgcttgttctagacctaagaaacggttagctattttatttacacaacagctagaaacttctgccattataacgctcaatgaatggtttaaaaaagaaaatgttatttctttatctcaagaataa

SEQ ID NO: 80568 - DNA, 1794 bp, Acinetobacter baumannii; identical to SEQ ID NO: 71916

SEQ ID NO: 80569 - DNA, 1782 bp, Acinetobacter baumannii; identical to SEQ ID NO: 71827

SEQ ID NO: 80570 - DNA, 1671 bp, Acinetobacter baumannii; identical to SEQ ID NO: 71826

SEQ ID NO: 80571 - DNA, 1782 bp, Acinetobacter baumannii; identical to SEQ ID NO: 71827

SEQ ID NO: 80572 - DNA, 1794 bp, Acinetobacter baumannii; identical to SEQ ID NO: 71916

SEQ ID NO: 80573 - DNA, 1782 bp, Acinetobacter baumannii; identical to SEQ ID NO: 71827

SEQ ID NO: 80574 - DNA, 1758 bp, Streptococcus pneumoniae; identical to SEQ ID NO: 72172

SEQ ID NO: 80575 - DNA, 834 bp, Streptococcus pneumoniae; identical to SEQ ID NO: 76279

SEQ ID NO: 80576 - DNA, 1758 bp, Streptococcus pneumoniae; identical to SEQ ID NO: 72172

SEQ ID NO: 80577 - DNA, 630 bp, Streptococcus pneumoniae
atgagtgatattgctacacaggacaagaatgtcaaaaaagaattgttagaataccaaggaaatattttaattttagcgaacgcaggttcgggaaaaacaacttttttaactaaaaagctaaaaagtgattctaaacgattaaataattatcaaaaattagcagcaataacttttactcgaaatgcaacggaggaaataaagcaaaaattagttgatattccggacaacgttgttgtatcgaccatagattcgtttttagataaagaaataatccttccttttcttaatcagaaatacgaaattcaaacatctgtacagtttagctttcggatagaccataattttagcgactatagcactggaataaaacaaatattgcaggatggtattttcgggacttacgactttcctacttctaaacacggcaagaatttcaaatgtgaagttgctttagatattttgaagacaatagattctgcgtcagaatatataaaatataaatttaatactttgtatattgatgaatttcaagattgtgaccagtctatgaatgatttatttctgtatctaaaaaatgagttagggattcctttatttattgtaggagatgataagcaatctatttattag

SEQ ID NO: 80578 - DNA, 1758 bp, Streptococcus pneumoniae; identical to SEQ ID NO: 73330

SEQ ID NO: 80579 - DNA, 1539 bp, Streptococcus pneumoniae; identical to SEQ ID NO: 72173

SEQ ID NO: 80580 - DNA, 1758 bp, Streptococcus pneumoniae; identical to SEQ ID NO: 72172

SEQ ID NO: 80581 - DNA, 1539 bp, Streptococcus pneumoniae; identical to SEQ ID NO: 72173

SEQ ID NO: 80582 - DNA, 1758 bp, Streptococcus pneumoniae; identical to SEQ ID NO: 73330

SEQ ID NO: 80583 - DNA, 1539 bp, Streptococcus pneumoniae; identical to SEQ ID NO: 72173

SEQ ID NO: 80584 - DNA, 1758 bp, Streptococcus pneumoniae; identical to SEQ ID NO: 73330

SEQ ID NO: 80585 - DNA, 1539 bp, Streptococcus pneumoniae; identical to SEQ ID NO: 72173

SEQ ID NO: 80586 - DNA, 1758 bp, Streptococcus pneumoniae; identical to SEQ ID NO: 73330

SEQ ID NO: 80587 - DNA, 1539 bp, Streptococcus pneumoniae; identical to SEQ ID NO: 72173

SEQ ID NO: 80588 - DNA, 1758 bp, Streptococcus pneumoniae; identical to SEQ ID NO: 72172

SEQ ID NO: 80589 - DNA, 1539 bp, Streptococcus pneumoniae; identical to SEQ ID NO: 72173

SEQ ID NO: 80590 - DNA, 1758 bp, Streptococcus pneumoniae; identical to SEQ ID NO: 73330

SEQ ID NO: 80591 - DNA, 1539 bp, Streptococcus pneumoniae; identical to SEQ ID NO: 72173

SEQ ID NO: 80592 - DNA, 1794 bp, Acinetobacter baumannii; identical to SEQ ID NO: 71916

SEQ ID NO: 80593 - DNA, 1782 bp, Acinetobacter baumannii; identical to SEQ ID NO: 71827

SEQ ID NO: 80594 - DNA, 1758 bp, Streptococcus pneumoniae; identical to SEQ ID NO: 72172

SEQ ID NO: 80595 - DNA, 1539 bp, Streptococcus pneumoniae; identical to SEQ ID NO: 72173

SEQ ID NO: 80596 - DNA, 1758 bp, Streptococcus pneumoniae; identical to SEQ ID NO: 72172

SEQ ID NO: 80597 - DNA, 1539 bp, Streptococcus pneumoniae; identical to SEQ ID NO: 72173

SEQ ID NO: 80598 - DNA, 1758 bp, Streptococcus pneumoniae; identical to SEQ ID NO: 73330

SEQ ID NO: 80599 - DNA, 1539 bp, Streptococcus pneumoniae; identical to SEQ ID NO: 72173

SEQ ID NO: 80600 - DNA, 1758 bp, Streptococcus pneumoniae; identical to SEQ ID NO: 72172

SEQ ID NO: 80601 - DNA, 1539 bp, Streptococcus pneumoniae; identical to SEQ ID NO: 72173

SEQ ID NO: 80602 - DNA, 1758 bp, Streptococcus pneumoniae; identical to SEQ ID NO: 72172

SEQ ID NO: 80603 - DNA, 630 bp, Streptococcus pneumoniae; identical to SEQ ID NO: 80577

SEQ ID NO: 80604 - DNA, 1758 bp, Streptococcus pneumoniae; identical to SEQ ID NO: 73330

SEQ ID NO: 80605 - DNA, 1539 bp, Streptococcus pneumoniae; identical to SEQ ID NO: 72173

SEQ ID NO: 80606 - DNA, 1758 bp, Streptococcus pneumoniae; identical to SEQ ID NO: 72172

SEQ ID NO: 80607 - DNA, 1539 bp, Streptococcus pneumoniae; identical to SEQ ID NO: 72173

SEQ ID NO: 80608 - DNA, 2064 bp, Staphylococcus aureus; identical to SEQ ID NO: 72502

SEQ ID NO: 80609 - DNA, 1749 bp, Staphylococcus aureus; identical to SEQ ID NO: 72503

SEQ ID NO: 80610 - DNA, 1758 bp, Streptococcus pneumoniae; identical to SEQ ID NO: 72172

SEQ ID NO: 80611 - DNA, 1539 bp, Streptococcus pneumoniae; identical to SEQ ID NO: 72173

SEQ ID NO: 80612 - DNA, 1758 bp, Streptococcus pneumoniae; identical to SEQ ID NO: 72172

SEQ ID NO: 80613 - DNA, 1539 bp, Streptococcus pneumoniae; identical to SEQ ID NO: 72173

SEQ ID NO: 80614 - DNA, 1917 bp, Listeria monocytogenes; identical to SEQ ID NO: 73702

SEQ ID NO: 80615 - DNA, 1908 bp, Listeria monocytogenes; identical to SEQ ID NO: 73703

SEQ ID NO: 80616 - DNA, 1530 bp, Listeria monocytogenes
atgaaattaaaaactgtgaaaattaaaaattttagaggctataggcatgaaacaagcacagattttgggaatttgacaacgtttgttggtaaaaatgatattggaaaatctacgttattggaagcacttgatattttttttaatgatgcaaaagcatgtgtaaaaattgataaagaagatgtcaatatttattctagtgcagatgatgacaacgaaattattatatcagcatcttttactagcctacctaatacagtagtaattgatacaacaaatactactacgcttgaatctgaatatttactaaatgataacggatacttggaagtagtgaaaaagtataaaaatacaggaaagcctaagacttatattcgagcatttcatcctacaaatgcaaattgttctgatttacttttacgaactaatgcttgtctaaaggatattgttgagagtaataatatagagtgtgaggataaaacaaagaatgcaatacttagaaaagcaatatgggaatattataatgcttcacttgaattacaattaattgaaatagatgttacaagaggagatactaaaagtatttgggataaattacaaacctatttaccaatatatactttatttcagtcagatagaaaaaatagtgatggtgataatgaagttcaagacccacttaaagaagctgtaaaagaaatattatcagatgaaaaaattcaagatacatttagatgcattacagaggaagttacacaaaagcttagcgaagtatctaatagaacattagaaaaattaagagagatgagccaggacacagcaaatacgctggagccattaattcccgaatttagcagtttaaagtggggggatgtttttaaaaatgtttcaataacaggagaccaaaatataccaattaataaaagagggagcggggtcaagagattaattttattgaatttttttagagctgaagcggaaagacgcttagaagtcttaaatgcatcaaatgtcatctatgcaatagaggagccggaaacatcgcagcatagtgataatcaaaagaaacttatagatgcatttattgacttatcaaatgtgcctaacacacaaattgttttaactacacatagtgcaaatatagtaaaaaaattagatatttctcatttgcgtctaattacaataagtgggactagtaaagtgatcgaatgtgtttctaaaggtcaattaccttatacatcattaaatgaagtaaattatttagcttttaatgaaatttcagaagagtatcataatgagttgtacggttatattgaagaacaagggatactaaaagtattcaaacaaaacaaaccaactcaaccttataatagagttagaggaggaagtaaagttactgaacagaaaattttaactgagtatataagacaccaaattcatcatcctgaaaatcaattaaataaaagatatactgaatcagaacttgcaagctctatagaacttatgagagattttattgacaataaacaaaattaa

SEQ ID NO: 80617 - DNA, 2382 bp, Listeria monocytogenes
atgaagatggataagaattttggaagaacgattatcaattggttattttcctatagtgatgagaggagaatgatgggttataatattttatctcttaaaaaatctaaggatgaattactgaatgtagtttcaaatttagaaaaagagataagaaatttaaaggaaaatcaagtcaataatgaaagtgaacaaaaaaaattaagtatgcttgtgaacgaatatacaaatagatttggtactattagtaatacaaacaattttgcttcagatgttgtgaggatggaagatgaagatgctaatatttttcatcatttagtaagtttaaatggaggtaacgaatttaacaaagagcaagtaaatgctattcgatttgatatgagaacacatcttaggattatcgctggtgctggaagtggaaaaacgcaaacaatttgtgcaaaggcagcttatttagttttgaaagaaaaaattcaagaacgaaatatagtgatgtgcacattctctaaaaaagcaagccaagaaatgaaggaacgtgtcaacgagtttcttggtggcaatagtcgaatagaagtattgactttccatggatggtttcaaaaagagtacaatgtacttattaaaaaatatccgtatctagaaaagtatgggatagcgggagaggtacccggaaaaggctctggaaaagatagccatgataggattttaatgaatttaattaagcagtatcatttatataattttgataaatatgaagaaaaaccaattaatgaacgacttagttattggcgaaatatgggatataatgatgaggaaattgttgcttttatagcaagatattttgatgacaaagaaatattaaaggatcaactacttagtgaagttttttcagagatgttaaaagaattggaacgaattaagagaagagagaaagtcattaattttgatgatatgttaattaatttaaagtgtgtattggagaacgactcaaatgctctttctttaatacaaactcgatatcaatatatatttattgatgagtttcaggatatcaatcccttgcaaaaacagataattgaacttatttgtccaccagattacgagaagagtgttatcaattctactaaattaattattgtaggagacgatgatcaaagtatttatttcttccgtggtgctgaaccacgttacattaaagaatttgatagacaatacaggcaaacgtcaatagagttaatgactaactatcgttctattgctcctgtggtacatataggaaatactctgatatcaaacaatcaacatgatagaataaagaagtctatgatacctcacaaactaaatgaaggtgattgttacgcaaaaatatttcaaaatgaacagctagaagctaattggattgcaatgcggatattaagcttgtcttcagaagagaaaccattccaagatcaaattggtaaaccgaattatacggaaacaatcgtattataccctaataaaaatcaattaaaatctatgattattgctttacaggaaaaaggaattccctttgtcacaaaatcggatgatgatttacttggtatatttggtattaatttttttaaacgatcattcaatctattaatggatattattgatgcagaaacgatagaaataaaaaagcatttatacaagcaactcataaaaaatatttgtttatattattatataccatttgcaaaaagtatagattttgtctcagatgagactaattatacttcggaaaagttaactgattttatatgcaaagaaaagaaagttagtaaaaaagagatggcgcttattaaatccatattccgagatattaatgaatttataaaaaccgaagaattgaatattaaagtttttgttaattggcttgtagaaactccgaaagtaaagaaacaattaattgatgaagagaaagattggttgcttaaagaggttagcaatgttaaaacgctaaaagagttaatacttaaatataaagcagcgagaaccttaaaagaagagatggctgacaaattaagagaatatgataataataactataatgcagtgtatctattaacaattcattcaagtaagggattgggatataaaaatgtttttgtaaaaggtatttataaaaactcactaccagactatcgatcagtggataaagaaagtattgaacttcagccattaattgaacaagcatctccaccaacaacaatggaagagcaaagaagattaatgtatgtagcgctaactcgagcaaaagaaaatctttatgtaacttaccctagagaagtaaacgagaagcctacacttgtgtcaccatttataaaagaatctaatattatgtttagggtgggaaaaatttag

SEQ ID NO: 80618 - DNA, 1758 bp, Streptococcus pneumoniae; identical to SEQ ID NO: 72172

SEQ ID NO: 80619 - DNA, 1539 bp, Streptococcus pneumoniae; identical to SEQ ID NO: 72173

SEQ ID NO: 80620 - DNA, 1971 bp, Haemophilus influenzae; identical to SEQ ID NO: 80566

SEQ ID NO: 80621 - DNA, 1734 bp, Haemophilus influenzae; identical to SEQ ID NO: 80567

SEQ ID NO: 80622 - DNA, 1758 bp, Streptococcus pneumoniae; identical to SEQ ID NO: 73330

SEQ ID NO: 80623 - DNA, 1539 bp, Streptococcus pneumoniae; identical to SEQ ID NO: 72173

SEQ ID NO: 80624 - DNA, 1530 bp, Listeria monocytogenes; identical to SEQ ID NO: 80616

SEQ ID NO: 80625 - DNA, 2382 bp, Listeria monocytogenes; identical to SEQ ID NO: 80617

SEQ ID NO: 80626 - DNA, 1758 bp, Streptococcus pneumoniae; identical to SEQ ID NO: 72172

SEQ ID NO: 80627 - DNA, 1539 bp, Streptococcus pneumoniae; identical to SEQ ID NO: 72173

SEQ ID NO: 80628 - DNA, 2064 bp, Staphylococcus aureus; identical to SEQ ID NO: 72502

SEQ ID NO: 80629 - DNA, 1749 bp, Staphylococcus aureus; identical to SEQ ID NO: 72503

SEQ ID NO: 80630 - DNA, 1758 bp, Streptococcus pneumoniae; identical to SEQ ID NO: 72172

SEQ ID NO: 80631 - DNA, 1539 bp, Streptococcus pneumoniae; identical to SEQ ID NO: 72173

SEQ ID NO: 80632 - DNA, 2190 bp, Staphylococcus aureus; identical to SEQ ID NO: 71696

SEQ ID NO: 80633 - DNA, 1794 bp, Staphylococcus aureus; identical to SEQ ID NO: 71697

SEQ ID NO: 80634 - DNA, 2064 bp, Staphylococcus aureus; identical to SEQ ID NO: 72502

SEQ ID NO: 80635 - DNA, 1749 bp, Staphylococcus aureus; identical to SEQ ID NO: 72503

SEQ ID NO: 80636 - DNA, 1770 bp, Staphylococcus aureus
atggaaattgaatggataaaaataagtggattcagaaattttgataatgacaaaataaatttatctaaaaacactttgattataggagcgaatgatgttggtaaaactaatttattgtatgcattaagattattatttgatcgtagtttaagtgataaagagcttgatttatctaatagtgattataatgtatacacaaaatcagaaacaatagaaattactgtaaagttaactaatgtttatgaagattgtttaaaatctacatttaaagaagatattaaggatggtagtttatttattcagtataaaaattcaaaacatggagaatattctattcttaccggttcatcggaaaaattactagaacctaaaaattcaagattttatctaaaacgtttgaatatggagtatgtacatacaaaccgcaatttaactgcgtttattaagaaagaaaaaaatcagatattagaatatgcaaaatcacaattaaatgacgaaaaaaataatcaagataaaaatgtaatagaaggaattgaaaataaattaaatgatataaatatagaagtagacaagttaaattatatacaagagtcattgataaaagtaaatgaagagttagagtctcttgctatacataatgaaggccaaaaactaacttttaaaaatgtaaattcaaatatagatagaatgttaaataacattgagttgacatacaatactgacgaaggtgcattaacaattggtggagatggtagaaataatcaaatctttttagctacatggatttctaaacaaaagaatataaaatcattagaaagagtaactttttatgctatagaggagccagaagcacatttacatccacatcaacagcgtaagctgtcaaactatttgttagaaaattttagtgaacaaatttttatcactacacattcaccgcacatagcaaacgattttaaacctaataagattgttaagttatatagacaaaataaaaaaaccaaaatagcaaaaggtggttgtagcgaagatttagaattgatttttgatgattttggctatagattaaatgcaattacatcagatttgttttttgtaaatgcagtatttttagtagagggaccatcagaaaaattattttattatgcattatctaaatcattaaacattgatttagatagattaaatgtatcgattataagcgttgatggagttggctttaaaccatttttaaaagtctgtttagcattagatatcccctttgtattaagaacagacaacgatatttttactaaaacaaagaaagttaatgataaaaatgttaaattttcttatcaagcaggaatttctcgagttattagaatctacgaagacatattaacaagtgaaaataaggataaattgttaaagttttgggatgaaattaaacatgaaactgaatgggaaaaatctaaaggagcaccccaagttgctcatgaaaatgtaaaatatatcattgaaattgtcgaatgtgataacatatactttgctgaaaaagatctcgaaaatgatattgttaacagtgctttgtttaactctcttaaagaattttatcaagcagaagataagaatgagattgtcaaaaaaatgcaaactgcaaaagcgaacaatatgtttaattatttaaaaaacaatatcgatcaattaagttatttgaaaagtgattctcttgctaaaccactatatcaaataaaagatttagctgaaaaggtcgcttcatgttatgagtag

SEQ ID NO: 80637 - DNA, 1611 bp, Staphylococcus aureus
atgagtagatatcttaacctaacaaaagaacaaaatgaagttataaacgaagaaggcaatttagtggttacagctaatccgggaagtggcaagaccctaactattgtagaaaagattttgaacatatcacaaactttatacagctatcaaggtgtaattgcaatttcatttacaagacaatctagtaaagaattagaggtgcgctataataaaaagaaaacaaatgataataatcatttttttgggaccattgataaattttatatatctgaaattattattccgttttcaaaacaaatttgtgggattagaaagtcaatagaagtaataaactcattgaaaagccacccccaatacgaaagtttattaaagttaaaagaaaatagtaataatcaagaaattaatgttttacttgaaaagtccttgaaagaaggtttaatatttttagagatttgcggagaaacagcattatatatactgagaaaagtgccgcaatgtgcatactatctaaaatcaagatacactcatatatttattgatgagtatcaagattgtggtgaaatccaacataaaatatttttagaattaataaatcatggtattaaaggtatagcagttggagatttaaaccaagcaatatttgcatttagttataggtttccaaaatatctgcactcattaatcgggaatcaggattttaggcatgtactactaactcggaatttcagatgtcataaatcaatttcagattattctttacaattgattgaaaagagaaaagtgacgaatactgatgtgaaaagagtatttaaagttaatgttataggaaatgataaaacggttatagatgctatagagaaaaattttgtgaatttgaagaaaaaatacaaattaaataataatgattttgcaatactttgccgttctaggttatcagctgaaagagcttcaaaatttttgaacataaaaaacaaactatttgataatactgattttgaaaaagaaacaagcattttagcaaacttttataaggaccttctaaattcctactttttatataaaataaataaaactacagtattagattttgtaatcaaatatcttaatgaagaagtaaattattttaattttcgaaaaggtctagaaactgttaatgaaatctttaatttagagctaacaaattttgtaagtaacattgagaaattttatgatttagcacaactagtttatcctgatgattttgatgaagttgtttttaataagttggtaggattattaaaagacagaaaagatttaaacagttttaaacctgctacagaagatgaaataaatattatgacagtacataagtctaaaggactcgaatttaaatgcgtttttctattagacttatataaatatgtatttccacgtgaaaatatagatgaggagagtttaaatcaagacttacatttgcattatgtaggaattacaagagcaatagaagcatgttacataatagtagcaactgaaagatacagacctagcaaaaaagattattgtaatgcaatggaatctccttttttatacagaaataatgtgcaagatttaagggaagatattaaatggtga

SEQ ID NO: 80638 - DNA, 1794 bp, Acinetobacter baumannii; identical to SEQ ID NO: 71916

SEQ ID NO: 80639 - DNA, 1782 bp, Acinetobacter baumannii; identical to SEQ ID NO: 71827

SEQ ID NO: 80640 - DNA, 1758 bp, Streptococcus pneumoniae; identical to SEQ ID NO: 73330

SEQ ID NO: 80641 - DNA, 1539 bp, Streptococcus pneumoniae; identical to SEQ ID NO: 72173

SEQ ID NO: 80642 - DNA, 2070 bp, Streptococcus pneumoniae; identical to SEQ ID NO: 71808

SEQ ID NO: 80643 - DNA, 1818 bp, Streptococcus pneumoniae; identical to SEQ ID NO: 71809

SEQ ID NO: 80644 - DNA, 1758 bp, Streptococcus pneumoniae; identical to SEQ ID NO: 72172

SEQ ID NO: 80645 - DNA, 1539 bp, Streptococcus pneumoniae; identical to SEQ ID NO: 72173

SEQ ID NO: 80646 - DNA, 2070 bp, Streptococcus pneumoniae; identical to SEQ ID NO: 71978

SEQ ID NO: 80647 - DNA, 1818 bp, Streptococcus pneumoniae; identical to SEQ ID NO: 71979

SEQ ID NO: 80648 - DNA, 2190 bp, Staphylococcus aureus; identical to SEQ ID NO: 71904

SEQ ID NO: 80649 - DNA, 1794 bp, Staphylococcus aureus; identical to SEQ ID NO: 71697

SEQ ID NO: 80650 - DNA, 2190 bp, Staphylococcus aureus; identical to SEQ ID NO: 71904

SEQ ID NO: 80651 - DNA, 1794 bp, Staphylococcus aureus
atgacaaatatcttcgaaaaaatcgtaaatgatttaaatttagaacaaaaagatgttgtggaaagtgaagataacctttatgtaaatgcatgtcctgggagtgggaaaacaagggtacttacaagaaaaattgcttaccaagcaattaaacacgatggatcactaaaaagaataattgctatcacatacactaatagagctgctgaagaaattaaggaacgcctaagtttacttagtatagatgatgatattaatatttgggtggggacaatacatcagttttgtcttgaatttattatttatccttttaaaatgaatctctcaagagtatcaaaaggatttacaattattgatgattatactcaaagagcttacgtcagccaaattaataatatgctgaatttaaatctcaaaacgtatgaactgaacaaaattgatttgtcactttctcatgattttaaaattaatgaagttcagtatactcaagtttctgaaatgtatcacactatgttggaaaaaaataaagaaattgattttgatatgattttactagtagcgtataaaattttaactgtaaacagtaacgttgcacgtaatattgctagtaatataagggcgatttatgtggatgaatttcaagatactagagaattacaatacaatgtaatagctaaattacttcaaaacaaccctcaaattcagtcaatgtttgttggagatattgaccaagcaatttatggatcattagatggtatagctaaatcagttgaagaactagaaatgctaactagtcacacttttcaatcaaagacgctacatggctgttacaggtctaatcagagattagtagacttctactctaattttcagagttgtccttacgagattgaaagcagagggaataataaaaacgaccgtggttttataagttatgattgcaaagttactaaggaggatttacccaacataataaaaaatataataaaggaaaagattgaaagcggcattcatgaaaaagatatttgtgtacttgctcctcaacactatcctctgttttcactgggtgagtatttaaagaaagaattaccgtattgcaattttgatgctataaatatatcaccaattaaggtaaataatcatagtttatttttcaagttagcaattttgtactttactgaatcaggtgaaaaggttcgaagaagaaagctaattgcaaacgatattttaattatattaaaaaatgaatttggaatagaagttaaagattattttattgacttagatttattacagctaataaacagtgtgaaaagaatgtatagtggagacgacaacggtgttgatttatacaaatttgttaccaaacatatatttgttaatcttaatattgacgagaaaaattacccgtctatttttaagcactatctattttttattaacgaagtagaagatcggataaaaaataattcattatctagtagtgtatctagttttaagaagatgtttaaatctcgagatggtatcacacttactacagcacataaagttaaaggaaatgagtatgatactgttatcgctattaatcttctaaacgggaaaattcctcattggaatgaaatttttaatgtttctgataaaggaattagttcagcgagaaaactactatacgtaatttgttcaagagcaaaaaataatttatttcttttctcagaggtgggttattttacgagtaaaggagacttgctttatcccactcaattattagataaaatagaatttgattataatatttaa

SEQ ID NO: 80652 - DNA, 1794 bp, Acinetobacter baumannii; identical to SEQ ID NO: 71916

SEQ ID NO: 80653 - DNA, 1782 bp, Acinetobacter baumannii; identical to SEQ ID NO: 71827

SEQ ID NO: 80654 - DNA, 1794 bp, Acinetobacter baumannii; identical to SEQ ID NO: 71916

SEQ ID NO: 80655 - DNA, 1782 bp, Acinetobacter baumannii; identical to SEQ ID NO: 71827

SEQ ID NO: 80656 - DNA, 2064 bp, Staphylococcus aureus; identical to SEQ ID NO: 72502

SEQ ID NO: 80657 - DNA, 1749 bp, Staphylococcus aureus
atgattattaatgctcaaacgaaattaaatatagaacaagattttaaaatacaggctggtcctggtgctggaaaaacagaatttttggtgaatcatatcaaaaatgtaatacaaacttctgaaaagctcgaacgtatgaagaaaatagcgtgtattacttatacgaatacggctgctcagacagttttacaaagattaggaaaaagtgtttcaaatagagtagatatatctacaatacatagctttttgtatagaaacgtagttaaaccatattgttcttttctacccaaagaatacggaatttgtgtgcaaaaattaaaaggacatagtgatccaattgtgattaacaaatatgtaaatgcatggttaaaaactgaatattttacgaaattaaaaccgcctagtaatagaaatcaactactaaaaatgccagtactaaagaaagctttgcaaaactggctactatctatgaaactttcttacgaaaataatgatgtgcaatttatttgtgataataccaaagctcaagcaattgataaaaaaagtaaaaaaagaatgggaataaataaatcaaacttaaatatactagaaaagcaattattaaattataaaaaaatatattgggagaaaggaattatcgatcatgatgatgttttgtttttttcatatgtattaattagagattacccattcattctcactattttatgtgctaaatatccctacttttttatagatgaatttcaagatactagtcaattacaagattttattatagataaaataagacagaaaggctgcatagtgggggttattggcgataaggcacaggcaatttacagctttcaaggtgcacgggtttccttatttgagaagtttaaagttgatttaataaattctcacactatcttagaaaatcatagaagttcatatcaaatagttacttttttaaatagtatcagagaagatattactcaaacagtatatagtggtattgaaaatgataaagttacaattttgattggaaatcggattcgcagttatactaaggtagttaatatttgtaacaaggagtcacttgttaccttgtcaagagataatattacttctaatgcaatgagaataaagttggaaggaaataattttgataaaaagttattggaaaaatttcaagaaattgatagtaatagtaaaagaaggaatactattatttcgcttataaaagctattgaattagctaagaatactaaatataaagatgccttaaaaatagtcgaatcgatttataaagatgaaaataatcctaaaaaaatagctcttaattctctaataaatatgattaataaatatgataaatacggtaatggtacattaatgaatttctacaatactttatgtaaaactttagatattaaactttcagggtttagaaaggggcaagtaaaagatttttacgaaaacactttatataaaaatatggtgatatgtacaaatatcgttgaagacacaagtaatcatattactatccacaaagcgaaaggcgcagaattcgaaaatgtatttgttataggtaataaagacactttaagtctacttttgaaaccagatttaatgaacgatgaagagcatcgtatattctatgtagctatgagtcgagcaaaaaagaaactttttttacaatttgattatcttgataataatgaacaaaagaaaattaaggaacgttatgatgtaagtattatacaataa

SEQ ID NO: 80658 - DNA, 2064 bp, Staphylococcus aureus; identical to SEQ ID NO: 72502

SEQ ID NO: 80659 - DNA, 1749 bp, Staphylococcus aureus; identical to SEQ ID NO: 72503

SEQ ID NO: 80660 - DNA, 1758 bp, Streptococcus pneumoniae; identical to SEQ ID NO: 72172

SEQ ID NO: 80661 - DNA, 1539 bp, Streptococcus pneumoniae; identical to SEQ ID NO: 72173

SEQ ID NO: 80662 - DNA, 2070 bp, Streptococcus pneumoniae; identical to SEQ ID NO: 71978

SEQ ID NO: 80663 - DNA, 1818 bp, Streptococcus pneumoniae; identical to SEQ ID NO: 71979

SEQ ID NO: 80664 - DNA, 1830 bp, Streptococcus suis
ttgacaatttgggaaaatataaaaaaggttgcgtatacccctgactcggaattagaacctattttaggaataaaccttcaaatttggattcagtactcagaagaagattcttatcaaaacatccagccacttatgatggatttaaatcctgataataattatattattcttgatttttcgtatatagtccctatttcgagacttcatgacttaaataccgaaataagcaatttttcagatgatttttcaaaatttgagtcatttatgaagaagagcatgagtaaattttttgagatgcagattaactcacggggatataatcctgatatacagaaattgacagaagaaaagtctgatttacttgaaatgaaagatattcataaacttattaaaataagagggattagagctaatcgagaagtatcaaataaagaaaataatcattcattatctaaaacatcaaatctattttataaatcaaataatggtgatgatattgacaatgctacaaaaaatttacttcaatctgcaattacagaggcagatgaagctttaaccaaggcatatagtggtgatggtgaagacgatggggttttcacctcgatctttgaaagagtaaaaaaatttggtggaaatgatagtgaatcagagttggaaattcattcatctctttctgagaaagacattttgagtaataatacaacactatactataggcatgacgatagtttattaccagaaacatacaatggtttgggatatttaaatctatatgggatgatttttgaaatagagacgttgatggcagatatcaaaaataatcctgctgatattaatttagtttatattgaggagccagagtcgcataaacatccacaattgcaatatgtttttatcaagaatattaaaggtttgctgaaggaacatgatgatgaactaaaagcaagtggatatactagtggtattcaaactttaattacaactcattcatcacacatagtgtctgattgcaactttgatgatttaatttattttaagcatgataatggcacagctatatcaaaggcttttaattcattgaaagaagaatatgaagatgataaacttgggtacagatttgttaagcagtatttgacactcaatagtagtgaactattttttgctgataaagtcatttgtattgaaggtgacacggaaagaattttactgccaacaatgatgcaaaaagtggatatagcaactccaatagaacaaggttcaaatataatgccattactttctcaaaacatttcaatcattgaaacaggtgctcattcacaagtgtttaggaaattttttgactttttagggataaaagtattgataattactgatattgatcctgtaaataaaaatgaaaagaatcgttttatcgcttgttcagcagtaaatgctacatctacgtcaaatacttctcttaaaagtttcttcaatatttcaggagatggaattttttcaacagtaactcaaaaaagttttgctgaaaaaataacaccagataatagaatccgtattgcatatcaaattcccgaagataacaatggttatcagcctgctagttttgaagattcctttatcggtttaaataaagaattcattattaaacaaaaagatggtcttattgaatatgaagctttaaaaaactttgatgacgatgaaatagaagatttctatacatttgctaggaataaagtgaacaaaaagtctgcctttgcatcaagtttattatactttgaagatgaagaaaatacttggaaagtacctaaatatatttcggagggattattatag

SEQ ID NO: 80665 - DNA, 1794 bp, Streptococcus suis; identical to SEQ ID NO: 72161

SEQ ID NO: 80666 - DNA, 1830 bp, Streptococcus suis; identical to SEQ ID NO: 80664

SEQ ID NO: 80667 - DNA, 1794 bp, Streptococcus suis; identical to SEQ ID NO: 72161

SEQ ID NO: 80668 - DNA, 2088 bp, Streptococcus suis; identical to SEQ ID NO: 71734

SEQ ID NO: 80669 - DNA, 1818 bp, Streptococcus suis; identical to SEQ ID NO: 71901

SEQ ID NO: 80670 - DNA, 2235 bp, Legionella pneumophila
atgcatataacaaaaattctaataaaaaactttcgtttattgaaagacatatctattgatttggaagataatttatcgatcatcttaggaaaaaataactcaggaaaaacgtcaatactactccttttagataagttccttagcagcacaatgagtagaccgtcgtttacttttgacgattttaatacagaatttaaagaaattttaaaatcaaaagtagaaaataacgaagatattgatactttcccttgcttcccaggcatctcattaaagttattcatcgaatacaatgaagacgataacctttctaatattggcaacaatgtaattatggatttagatccagataataaaatggttgtactagctttcgaataccatatctctcaagaaagattatctgccctgaaagaacaataccatgagtatttagagagaggccataccggaaatgacttgttttcattcctgaagaataactatgcagatttcttccagactgccaaaaaaagtcttttgtttgatatcgaaaatcaaaaagaaaacgatgatattttcacggatcttattaaagaaaatatacaaatagataaaataatcaattttaaatggattagtgctagaagaaatgtatcaaataaagattctgaaaaagctctttctgccctttcatcaaaaatatataaaaaaatagaagctagaaaagataattcagaaataattgaaaaatttaaagccacactgactgaaactgataaagaactagatattgtatataaggaaatttttgaagacgtaatccaagatgtaaaaaaatttggtggaatacgccaagatgattctgttattaaaataatttcttcgttaaagcataaagaattgctcgaagaaaacactactgtaatgtatgagcttaagaccccaggccattctctaccagaaagctacaatggcttaggatatatgaatcttattagtatgatctttgaaattaaaatactacttcatgactttcaaaaagaaataaatgagagtccttcagatattaatcttctttttattgaagagccagaggcgcatactcatccacaaatgcaaagagtattcattaataatattaaatcattgttagataggggtataagtaaggaggacggtagaaaatataatttgcaaacaattttaagtacccactcatctcatattgtatctgagagtaactttgaagatatcaagtacttaaaaagggaaaataatggaatcgtttcaaaaaatcttaaggatctgaaaaatgaatatcatggttatgaacaaaattataaatttttgaaacaatacttaacattacatagagcagaattatttttcgcagataaagcagtttttatagagggagatactgaaagaatactacttccagcaataatgaagaaaatcgatcaagaagattttattcaagaattttcaaaaggaaaaatacattcaattccattattatcacaaaatatctctgttattgaggtaggtgcttattcgcacgtattcgaaaaattcatcgatttcataggaataaagtccttaattattactgatttggattccggcaaaactgttacagatacaaacgagacaggaacccccataaaaaataaagatggaactgataagaaaaagatagagccctgtccagtttgtgatggatccctaactagcaatacttcattaagatttttttatggtgatgacaaaaatcttaatgaatttatgtcaatgcgcctagaaaacaagcgccttaagaaggacccaacatctaaaaaatggattgcacatgaaaatggtcatttattatgcgtgtaccaaaccgaagaaactgttgatggtaaaaaatatcatgcaagaagttttgaagatgcatttttccatgtaaatagatctttcataaaggattcatctattaataagaatatggactttataggtgatatatcatttccaagtttaaccaagaaaaagttaagaaattttatcgaaaataaaattaatgtttggcaaatcgcagaggatgtgaaaagcaaaccatcctttgccatggaaatattattaagcagtaaggacaaaaaaataacgattaagaataatagcactggcgaagaaacaactgttgtagatgagttttcaaattggaagataccaaaatatattgaagagggtttgaaatggttaaaaacagattaa

SEQ ID NO: 80671 - DNA, 1938 bp, Legionella pneumophila
atggttaaaaacagattaagtttggaacctgaagtaaatcaaattttagagcaaatatatcttggtcataattttttgcttagtggaggcgctggtagcggtaaaacattttcattggtccagttaataaggcaacttattctagacaatcccaatgttaatattgcctgcataacatacacaaatgctgcagttaaagaaattgaagatagagtccaccacaagaatcttaatgtgatgactatccataattttctttgggataacattaaatcctatcagaaagaactcagagcaactcttataaatttaataaatgacgataatgttaatcaaataaaaagcaatgatacaaaactgcctaatttcttcttcgatgataaaagaataacatataaagaatatactttactcaatgaaggaatcatatctcatgatgaacttctgattctggcacaatatatgtttaaagaatatccaaaactttgcgatattcttatagataaatttaactacatctttattgatgagtatcaagatacaaatccactagtaattaatatttttttagaacaattagtgcgttgtaaacgaaaaaatataatagggctttttggtgatgctatgcagtcaatttacgatgatggagttggaaatctaaataactacattaaatcaggcatagtttatgaaattaaaaaagaacaaaatcgaagaaatcctagactaatttacgaattagcaaacaagctaagaactgataatatcacgcagcgattcgccaatgattctaatgcacctaatatgaaagatggcactgttaaagaaggaaatattaaattttattacactgataatgaagaaaacctcgataaaataaagaaattacttgattgggatttcactgattcaaaaaaaacaaaagagttaaatctaacgcacaatcttattgcaccaaaagctggctttcaaaaattaatggcagtctacgacggagacaaaatattagaataccgcaatcgaatcaagaaatacattaaagataaagctatccaagaagacttttcagatctctcttttggacaagtcatagaaaaacttcttgaaggaaaagctactgacagtgaaagaaaacctattttgcctacaccggcaatgacagaattcataaataaaaacccagatctttatgaacgagcaaagagtattcaatttgatatatttaagaaaatatacgtagataaagagtctttacttgatgacaaaaaagaggatattgaaagtgatggaaagcaaacttcaaaacgagataacttaatcaagcacctttttaaaatacaaagtaatttaaatttatataataataataagtacaatgaatttttaaggaaaatagaattcaatataggatctatagctgataaaaagaggctgaaggaaacaatattccaacttcaaaatttgactgatagttctatcgaagaagtaattgaatttgcgcatgaaaaaggtatttgccgaaaagatgataaactgtcagaatttataaagtccaatcaatacatatatgatcaagtaaaagtgttaaacttcaaagaattccaaaatctgtttaattaccttgaaggctacacacccttttctactcaacataaaattaaaggtgctgaatttgataatgttttagttattttggataatggtagttggtcaaaatataatttcgaatatctattccatccagaaatatttgacagtttatccaaatcgcaaaaatcaacatttccccaaatccttgaacgttcgcaaaagcttttttacgtttgttgcacaagatcaaaagaaaatcttgttgtttattttaattcaccatcttcagagacaataagtaaagcaaagaagtggtttggtgagagtaatgttcagtttatcacataa

SEQ ID NO: 80672 - DNA, 2310 bp, Legionella pneumophila
ttgaaaattgtttatatagacattcaaaatttccgaaaattaaaagcttgtcgcgtagacttggccgatcaaagtacaatttttgttggtgcaaataatagcggaaaaacatctgcaatggatgcgctgatcatgtttttaaaacgatctaagcgcagagatctttcaacaactgatgtaacactatccaattggtcagcactcaatgagattgccaatgactggattactacaaaggaagatcaggctccaaacctttcacttgatacttggcgtccattactgcccacaattgatatttggcttcatgttgatgagtcgcaaatacactatgtaagccatattctacctaccttagactgggatggtggtttattaggtgtaaggctgattctggaacctaaggatatggaaaatctatataaatcttacatcacgactcatgcagcatcccaagaaacgttatcagcgcgcaagattttgaaagaaaaagaacctgcatccacattaacactatggccaacatcaatgcgtgattttttggatagaaaacttcatgacttcttttctattagcgcttatgtgttagatccagcgcgctcaaaagatgctcaacctcagccgtttacagagttaatggaaccacttgaaggtgacccctttgatggcttattcaaaatcgacatcatcaatgcccagcgggggttttctgatccgaatgcaggtgaaggaacagtcaatactgaccgacgcctttcttcgcagttaaggcattattttgataagcatctagacccaacggagctaccagaggcaagtgatttagatgcgcttgaagcgctggaagctgctaggacagcatttgatcagaaactaaaaacaagcttcagtgccgccattggtgagctcgagagactcaattatccagggtttagtgatccgcaaattcttctatcgagtaaagtgaatccattggaagggttaaatcatgactcagccgttcagtttaaagtcgcttgcagtgaagcttcctcaggcaatgaactatgcttgccagaaaaatacaacggattaggataccaaaatctgatctctatgatttttaacctgatacgttttcgtgatgaatggatgcgcgttggtaaagtaggtaaacgggaagaggacaccagtaaaccgagagaacctttgcacttaatgcttattgaagaaccggaggcgcatctacacgtgcaagtacaacaggttttcattaaaaaagcctataatgtattgcgtaaccatcctgagctagtgaaagagcatcagtttacgactcaaatggtagtgagcactcattctagccacatagcacatgagacagactttactggattacgttatttccgcaggaaacctcttgaaagcaactcagaaattccttgcgcatcagtaatcaatatgaccaccacatttagcacagaaaaaaatgatctcatggataagacagcggaagataaagaaaaaatagaaacagctaagttcgctactcgttatctaaaaacaacacactgtgacctattttttgctgatgctgttatcctcgttgaaggaccggcggaacgattgctgatacctcactttattcgtcatcattattcagatctcgatagaagttatatctccttgttagagattggcggcagtcacgctcacaggttacgcccgcttattgaagctttgggtatacctacactagtgatcactgatcttgattcaatcaaggccgaatcatcgggtaaagtacgcccagcaaccggcaaggaccatagaacgggaaacaatacgctaaaaagctgggtgccaaaaaaaaccaccttagatgaagtattggctgctaaatttgaagacaaaataaccagcaacggtttggtgagggtcgcttatccctgtgtaacctcaattcaatatgacactgcaaattataccaatgctcagccagatcaagctattccctatactttagaagatgctctggtactggacaacatttcgctttttaaggctctgacagataaaacaggactcattaaaaaaatggctgatgccgttaataaaccaactctcgatgaagcctgccagtcgatgtttgatgccctcgataaaaatgctaaaaaggcagaaatggctttggaattgctttacaccaccgaaccaagtcaactcaatcccccaaaatatattgcagacggccttgattggctcaaaaataaattagttaccagcgcctctttaatgaataaccctttaaatacatcggagggtgaataa

SEQ ID NO: 80673 - DNA, 1890 bp, Legionella pneumophila
atgacgagcataattgatacggacactgttgatgatgagatctatagttgtctcgacctagataacccaaaaagtttctttttatttgcaggtgcaggttcagggaaaaccaggtctttggtcgaagtgctaaagcgttttcgtaaaaacaatacccatcgtttgcgatcaaacgcacaacaggcggcaattatcacgtatactaatgctgcttgtgatgaaattaaacgacgattggaattcgaccctacttttaatatctcaactattcatagtttcgtatgggagctcattaaaccgtacaaacatgatattagagaatggctcagaataaagcttctatcagacattgaagaacttgaagaagcgcaacgcaaaggacgtgcaggtacaaaagctgcggaagatagacctaggcaaatagaagctaaacgcaggaggctagaatcactaaattctattaggaagttcagctacaatcctaatggtgacaactcaggcatggatactctcaatcatgcagaagtgataggcataacagcttctttgctgtcgaatcgcccacttttacaatctattctaatcagaaaatttccagttttgcttatagatgaaagccaagacacaaaaaaggagttgatcgaagcgctctttactatacagggcttacataaaagtcaattttcgcttgggcttttcggcgacattatgcagcgcatttatactgatggaaaggaagatctagggatcacacacctccctgatggatggttggcaccgaagaaaatctataattacaggtgccctcgtcgaattgttaaactcattaacaagattagatcggacgttgatcaaaatctacaagaaccacgcaatccagatgaaggcttagttaggttatttattgctgataccagccgaaccatagataagactgcatttgaagaagccatttgcgaagaaatggcaaagcttactgttgatgagctgtggagagataaaacaaagagtaataaaatcctcaccttagagcatcatatggcagctcaacgaggcggcttttcaaattttttcaacccactgtacagcgttgataagctgaaaacgggcttacttgaaggaagcctatccagcattacttttttttctgaaaaggtacttcctcttatcaactatttagaggcaggaaatcagtttgctgtatttagaatactcagtaagcattcaccattaatgtccaaagaacatattgagcacagcaaaaaccctaaagctgaattggtgaaagctaaggaggctgttaatgcctttcacgccttatggagccatggcgcagatccaactttacatagcatacttaaagaaattcaaaacagtaggttattcaaggtgcctgataatcttgttcctatcgcggagagacaggaaaagaactacgaaggagcaaaagatgagtatgatgctaaccagatgatggatgcttgggacgatgccttggcatcttccttcagtgagtttaagaagtacgttctgtacatatctgatgaatcccgatttggtactcatcagggtattaagggactcgaatttcctcgtgtgatggtgattcttgatgatgaggaagctcgtggctttctattcagctacgacaaattatttggagcaaaggcccctacaaaatcagatatcgataatctggagaaaggtaaagaaaccagtattgatcgcacgagacgcttattttatgtaacttgcagccgagcagaaaaaagtttagcaattattgcttacaccaatgagcctaataaagtgaaggaaaatgttctaggtcaagggtggtttaatgaggaagaaattatattgtcctctgaaatcgacatgcacaattaa

SEQ ID NO: 80674 - DNA, 2070 bp, Streptococcus pneumoniae; identical to SEQ ID NO: 71808

SEQ ID NO: 80675 - DNA, 1818 bp, Streptococcus pneumoniae; identical to SEQ ID NO: 71809

SEQ ID NO: 80676 - DNA, 2034 bp, Streptococcus suis
atgaaaataaaaaaaattaatgttcaaaattatcgtttattgaaggatttttctttagagttgaagagtgaattgtcattaattgtgggaaaaaataattgcggtaaaacctcagttttatctgtattggaaaagataatcaataaaagttctagtttaacctgggaagatataaatttgtatcatagaaaagtaatttttgaaaatataaaaaaggttgcgtatacccctgactcggaattagaacctattttaggaataaaccttcaaatttggattcagtactcagaagaagattcttatcaaaacatccagccacttatgatggatttaaatcctgataataattatattattcttgatttttcgtatatagtccctatttcgagacttcatgacttaaataccgaaataagcaatttttcagatgatttttcaaaatttgagtcatttatgaagaagagcatgagtaaattttttgagatgcagattaactcacggggatataatcctgatatacagaaattgacagaagaaaagtctgatttacttgaaatgaaagatattcataaacttattaaaataagagggattagagctaatcgagaagtatcaaataaagaaaataatcattcattatctaaaacatcaaatctattttataaatcaaataatggtgatgatattgacaatgctacaaaaaatttacttcaatctgcaattacagaggcagatgaagctttaaccaaggcatatagtggtgatggtgaagacgatggggttttcacctcgatctttgaaagagtaaaaaaatttggtggaaatgatagtgaatcagagttggaaattcattcatctctttctgagaaagacattttgagtaataatacaacactatactataggcatgacgatagtttattaccagaaacatacaatggtttgggatatttaaatctatatgggatgatttttgaaatagagacgttgatggcagatatcaaaaataatcctgctgatattaatttagtttatattgaggagccagagtcgcatacacatccacaattgcaatatgtttttatcaagaatattaaaggtttgctgaaggaacatgatgatgaactaaaagcaagtggatatactagtggtattcaaactttaattacaactcattcatcacacatagtgtctgattgcaactttgatgatttaatttattttaagcatgataatggcacagctatatcaaaggcttttaattcattgaaagaagaatatgaagatgataaacttgggtacagatttgttaagcagtatttgacactcaatagtagtgaactattttttgctgataaagtcatttgtattgaaggtgacacggaaagaattttactgccaacaatgatgcaaaaagtggatatagcaactccaatagaacaaggttcaaatataatgccattactttctcaaaacatttcaatcattgaaacaggtgctcattcacaagtgtttaggaaattttttgactttttagggataaaagtattgataattactgatattgatcctgtaaataaaaatgaaaagaatcgttttatcgcttgttcagcagtaaatgctacatctacgtcaaatacttctcttaaaagtttcttcaatatttcaggagatggaattttttcaacagtaactcaaaaaagttttgctgaaaaaataacaccagataatagaatccgtattgcatatcaaattcccgaagataacaatggttatcagcctgctagttttgaagattcctttatcggtttaaataaagaattcattattaaacaaaaagatggtcttattgaatatgaagctttaaaaaactttgatgacgatgaaatagaagatttctatacatttgctaggaataaagtgaacaaaaagtctgcctttgcatcaagtttattatactttgaagatgaagaaaatacttggaaagtacctaaatatatttcggagggattattatggttacgagaacagtag

SEQ ID NO: 80677 - DNA, 1926 bp, Streptococcus suis
atggttacgagaacagtagagccagaagtagaaaaagtatttgaagcaataaaacaaggtcaaaattttattcttgaaggcggtgctggaagtggtaaaacttattcgctaatttcaattattgaaaaaatattgattgaagaacctaaaaaatcaattgtatgtattacctatactaataatgctgttgcagaaattaaatcacgaataattaatgataatttatgggtatcaacaattcatgagtttatctggcatatcattggaaatttccaaaaagagattaaagaatgtcttgttgagttaataaatgatgattcacaaaagttatttgtttcaccaaaggatgtaattgaagaagaaagtatttcacttgattactttgatgatgtccgtgttgactatgctgaatggtactctatgagtataacagagcaaaataaagtccaaataagtcatgaccatattctaatagttgccgaaaaaatgttttcaaaatataagaagttatgtgatgttttagcggatactgcaaactatatttttgttgacgaatatcaagatacaagtccactaattgtgaaaatattattagagcatcttcaaaagagtactaagaaaaatgttgtaggcttttttggagattctatgcaagctatctatgattcaggggtaggagacttaaattcttataatttggcaaagatacaaaaaactcaaaatcgtcgtaatcctaaaaaagttattgatttagccaataaagttagaaatgatggtttagttcaaactccatccaacgatgatacggctcccaatatggacgatgggagtgtcattgctggaacagtgaaatttgtctacgggaacgatattaatcaacttgatgttcttagaaatagtaaactatataaagctttagaatttgatatagctaaaaaaacaaaagaattacgtctgacacataaacttaatgcagaaatggcaggtttctctaagttatttgaattatataatactgatttatttgtgaaattaattacaggtataaagaaaaaaatcaatgaaaataagatagctgataaaggaaaaacgtttgaagaactggtagaagaggctaaaatagctgtcggaaagggaggtccattaataattgatgtggttaattccatcccagaacttttggctttttacgatgaaattaagacgtgctcgtttgaagaagttagtaataagagtaaagttaataaagaatcgctgttagcttataaatttaatggattaagtagtagatatgaagcgggcacagatagggataggattcttaaaaggttagatttaatctatgagctattagagctgtataaaacaggtaagcataatgaattcttacgtattactaaatttaatataacttcatcagaagataaaattagtctatctaaagttatgacaaaaatctctgttgatgatattacaattggaaaagtcatagaacttgcagaggaaagtggattaatttcaaaggatgacttatttactaattttattgaaagtaggggacattatttatggtcacgacttaagataatgccatttcaagaatatgtaaatagtattgcttatctcagagaatatgtatctgttataacgcagcataaggttaaaggtagtgaatatgataatgttttagttttattagataatggaaaatggaatcaatataattttgatagcctatttggtaaaggttcagttaatgagaatgtccaaaaaagaactaagaagttattctatgttgcaattactagagcaatgaaaaatttaattgtttacatgccgagtaatgatagtcagattattcaaaaagcacaagattattttgaaccaattgatattattgatgttttgtctttagttgatgagtaa

SEQ ID NO: 80678 - DNA, 2070 bp, Streptococcus pneumoniae; identical to SEQ ID NO: 71808

SEQ ID NO: 80679 - DNA, 1818 bp, Streptococcus pneumoniae; identical to SEQ ID NO: 71809

SEQ ID NO: 80680 - DNA, 2088 bp, Streptococcus suis; identical to SEQ ID NO: 71734

SEQ ID NO: 80681 - DNA, 1407 bp, Streptococcus suis
atggtgaagagtgacgattggtttcctaaaggagtcattaaattagaggatgctgctttagaagtagttaaagatgttactaacagtctagtcattgctggaccaggtgctggaaaaacagaattactggctcaaaagttagactatcttttttctacaaataaatgtatttctccaaaaaagattttagctttaagttttaaaacagatgctgctgcaaatttgaaagatagagttaaaaaacgttatggtgatgaatatgcttctcgttttacctcattaacctattcggcttttgaaaagagaattttagaccaatttagagatgttctacctgaggatatacgaccatcaagagattatttgattgaagattgggatactataaaagaactactctctatgaatggaattaatgttaatggatggaggatgtcagatataagaaattttgtcgaaaatattatacttaatgacgggaatactcacaaattaaaaaaggatttactaaaaggaacacaagataataagccggtcctcttgtataggcaaataacaaagttgagtactcaaataatagctactaacgaatacatccgtaaagcacttcaaatgacatacgattttgtatttctagatgaatttcaggatactacatatgcccagtataatttattaaaaacttgttttttaggttcgtcttgtaaattaacagcagttggagataataagcaagccattatgagatgggcaggtgcaaaacctgatatttttccagactatattcgagactttaattcaaatgaatatcaattgttgatgaatcaccgctctgtacctaaacttgtaaaatttcaaaaagaggttcatcagatattaaatagtaatcacagttctattcagccaaataattatccagaatttcaagagggtgaaataacattatttgaatttgaaaatgaaagtttagaagctgagttaattgcaaatgatatagaatcaaaaattcaaggaggtatacgaccatcagaaatctgtatcctagcaaaacagaaggttgatgattatagttcaaaattgataactacattaaacagtaaagggattaaagcaagaattgaaaatgaatatcaagagcttttaaaagaccctacttgtaacctattattagatttaatatcatgcagtcaaggaaaacgagatcctttaatttgggaaaatattagtaatttttatggaaatatcaatggaatagatgagtttactgatgaattaattttagcaaaatcctataaggagattgacaatatagttagtgatattacttacctaatttcaaattttattcccaatgaagaaagtaagtttagttcagttaagtttttttcattttctttattattatag

SEQ ID NO: 80682 - DNA, 1830 bp, Streptococcus suis; identical to SEQ ID NO: 80664

SEQ ID NO: 80683 - DNA, 1794 bp, Streptococcus suis; identical to SEQ ID NO: 72161

SEQ ID NO: 80684 - DNA, 2088 bp, Streptococcus suis; identical to SEQ ID NO: 71734

SEQ ID NO: 80685 - DNA, 1527 bp, Streptococcus suis
atggtgaagagtgacgattggtttcctaaaggagtcattaaattagaggatgctgctttagaagtagttaaagatgttactaacagtctagtcattgctggaccaggtgctggaaaaacagaattactggctcaaaagttagactatcttttttctacaaataaatgtatttctccaaaaaagattttagctttaagttttaaaacagatgctgctgcaaatttgaaagatagagttaaaaaacgttatggtgatgaatatgcttctcgttttacctcattaacctattcggcttttgaaaagagaattttagaccaatttagagatgttctacctgaggatatacgaccatcaagagattatttgattgaagattgggatactataaaagaactactctctatgaatggaattaatgttaatggatggaggatgtcagatataagaaattttgtcgaaaatattatacttaatgacgggaatactcacaaattaaaaaaggatttactaaaaggaacacaagataataagccggtcctcttgtataggcaaataacaaagttgagtactcaaataatagctactaacgaatacatccgtaaagcacttcaaatgacatacgattttgtatttctagatgaatttcaggatactacatatgcccagtataatttattaaaaacttgttttttaggttcgtcttgtaaattaacagcagttggagataataagcaagccattatgagatgggcaggtgcaaaacctgatatttttccagactatattcgagactttaattcaaatgaatatcaattgttgatgaatcaccgctctgtacctaaacttgtaaaatttcaaaaagaggttcatcagatattaaatagtaatcacagttctattcagccaaataattatccagaatttcaagagggtgaaataacattatttgaatttgaaaatgaaagtttagaagctgagttaattgcaaatgatatagaatcaaaaattcaaggaggtatacgaccatcagaaatctgtatcctagcaaaacagaaggttgatgattatagttcaaaattgataactacattaaacagtaaagggattaaagcaagaattgaaaatgaatatcaagagcttttaaaagaccctacttgtaacctattattagatttaatatcatgcagtcaaggaaaacgagatcctttaatttgggaaaatattagtaatttttatggaaatatcaatggaatagatgagtttactgatgaattaattttagcaaaatcctataaggagattgacaatatagttagtgatattacttacctaatttcaaattttattcccaatgaagaaagtatgctaaatttaattgattgtattattgaaaaaatagatgaaaaaagaattatttccaacttttcaacatacaatggaaaaagtgacctatttaattatcagtttcagtgtcgcaattcttatctgcttgctggtagcgtttgtattcaaacgggttcgctatga

SEQ ID NO: 80686 - DNA, 2100 bp, Streptococcus pneumoniae; identical to SEQ ID NO: 73328

SEQ ID NO: 80687 - DNA, 1818 bp, Streptococcus pneumoniae; identical to SEQ ID NO: 73329

SEQ ID NO: 80688 - DNA, 2088 bp, Streptococcus suis; identical to SEQ ID NO: 71734

SEQ ID NO: 80689 - DNA, 1407 bp, Streptococcus suis; identical to SEQ ID NO: 80681

SEQ ID NO: 80690 - DNA, 2100 bp, Streptococcus pneumoniae
atgaagttaacaaaaatggttattaataattttagatcttttggggagtgtcaagcaattaactttaataatcaaactgtactgatagggaataatagttcaggaaagacaactgtattacaggcattgagtaagttgttttcagataagcaaagtgatagaatcattcgaaaaagtgattttcatttaccaaaagggttaagacctggtaaaaacacaagaaatctttttatagaaactatttttgagtttgatgaacttgctggaactgtctatggaccagccattccaacatttttcgagcactttacagtttctcaagatggtgcaaaaccttttttacgaatcagattagaatcttcctgggaagatgatggaacagttgaaggaagtattgatactcaaatttattatatttcatctgatgaagatactattagagatgaagacaaacatcgtgctcctagaaaggatttggataaaattagagtactttatgtaccagcttcaagaacacctgagaaggagttgggtaatgcttcaggtagtatgttaagtaggttggtaaatagtataaattggactaaagatgagataaatgaaattaaagataaaattgatgagttgaataacatctttttatctgaaaatggagcattaactcagatcaacaatgagattcagaaatcatgggaattatatcatgaagataaccgtttttctcaagcagagttgattattaattcttctgagatggcggcagcacttagacagattgccttaaaattttcaccaacaaccactgaagaagcatttacagtttcagatctaggagatggactgagatctattttttatttttcacttgttgattcgatacttgatattgagttagaaattaccaaagaccgtgaagagaatcctgataatccaagatttaagttggtacctccaatactaactatcttagcaatagaagaaccagaaaatcatattgctccacatcacattggaaaactgataaaaaggtttaagcaattaggcaataatgacaactctcaagtaattttaacgtcacattctccagctattgtaaaaagaattgaaccagaagatttgagatatttaagaattgaaaataatgatagagtgcttcaaactattgtttctgatatacagctacctcaagctattgatgaatcttataaatacattaagggagcaattcaagcctatcctgaactatattttgcaaagttagtagtactgggtgaaggtgatagtgaggaactgctattaccaaagttttttgatttacttggactggaaattgatagttctcagatttcagtagttcctttaggaggtaggcatgttaattatttttggaaattattgaacgctctcaggattcctcatattaccttattagatttcgataacgaaagatatggaggtggctggggaagaattcaatatgccataaaacaattgatactaaatggggttgctaaagaaaaacttgttactgtaacaaccgaatttcaaaaatcacgagttctagatgatgatgagattgataaaataaaggactggaagattgatagacctgataaccagttgcttgaggggtggattaaaatgttagaaaagttcaatgtgttcttttctgcaccgcttgatattgacttcttaatgttacaacattatagggaatattatctggatatgttatctgcgaaagaaggaccagtcatttcatatgctgattcaggcgggaataataaaaaagtaaaattaactgatttggatcgtattgataaattgcagttagaaggtctcgaaaaacgtatagaagaagcaaagatagctactttaaaggataagagtggaccgggggatagttttactagagaagagaaagaattaatgatttggtatcaatatttctttttaggtagaggaaaaccaacaactcatatgcaatttttatcatctattagcgatgatgaattaaaaagatgtctacctcctgtgtttgaaaaaatggttaaacgtgctgaagaattacttggagatattgaacatgatgaggagtga

SEQ ID NO: 80691 - DNA, 1818 bp, Streptococcus pneumoniae
atgatgaggagtgaagagtggcatcctaaaggagatattgatttagagaaggctgctttaggggctgtcaaggatgtgaccaacagtctagtcattgctggaccaggtgcggggaaaactgaattactagctcaaaagttagactatctattctctacaaataaatgcgtttctccgaaaaaaattctagcattaagtttcaaaacggatgctgcagcaaatatgaaaaatagagttaaaaaacgttatggtgatgagtatgcttcgcgatttacatctttaacctattcagcatttgagaagatgattttagatcaatttataaatgctctcccagaagaaataagaccagcaagagactatctgattgatgattgggatgttataaaagaaacacttattaaaaatggtattaatgttaatgggaggagaatgtcagatataagaatgtctgtcgaaaacaccgtacttaatgatgaggctaatttaaagtttaaaaaagaattattaaaagggacacagaataataaggctgtcctcctttataaacaaataactaagcttgctacgtatataatatatacaaataaatatattcggaaagcacttcaaatgacatatgaatttgtctttttagatgaatttcaggatactacatatgaccagtataatttattaaaaatatgttttttaggttcgacttgtaaattaactgcagttggagataataaacaagcaattatgagatgggcaggtgcaaatcctgatatttttcgagattataagcaagattttaaagcaaatgaatatcaattattgatgaatcaccgctctgtacctaaacttatagaatttcaaaaagaggttcatcagatcttagatagtaataatagtccttttcagacaaataatcatccgaattttgagaagggggaaataacattatttgaatttgaaaatgaaagtttagaagctgagttaattgcaaatgatatagaatcaaaaattcaaggaggtatacgaccatcagaaatttgtatcctagcaaaacagaaggttgatgattatagttcaaaattgataactacattaaacagtaaagggattaaagcaagaattgaaaatgaatatcaagagcttttaaaagaccctacttgtaacctattattagatttaatatcatgcagtcaaggaaaacgagatcctttaatttgggaaaatattagtaatttttatggaaatatcaatggaatagatgaatttactgatgaattaattttagcaaaatcctataaggagattgacaatatagttagtgatattacttacctaatttcaaattttattcccaatgaagaaagtatgctaaaattaattgattgtattattgaaaaaatagatgaaaaaagaattatttccaatttttcaacatacaatggaaaaagtgacctagatatcattgtcaagaacttttcaaagttattatacatagaatattctcaaatacaaggtgaatggctagatacagtctctagtttcaagggtgaaaactcaattccaattatgactatccataagagtaaaggattagaatatgaggtagtctattttctaggcttggaggattctgcattctggagttttaatgatcaaccggaagaagataaaagtgcgttctttgtcgcactttcaagagcaaaaagtcacttaatattcacatactgtaaattgagaaataatagtccgcaaaataatagaaatattaatgagatatattcattgctgactcaatccaatttagttgatgttattaattaa

SEQ ID NO: 80692 - DNA, 1830 bp, Streptococcus suis; identical to SEQ ID NO: 80664

SEQ ID NO: 80693 - DNA, 1794 bp, Streptococcus suis; identical to SEQ ID NO: 72161

SEQ ID NO: 80694 - DNA, 2088 bp, Streptococcus suis; identical to SEQ ID NO: 71734

SEQ ID NO: 80695 - DNA, 1818 bp, Streptococcus suis; identical to SEQ ID NO: 71901

SEQ ID NO: 80696 - DNA, 2088 bp, Streptococcus suis; identical to SEQ ID NO: 71734

SEQ ID NO: 80697 - DNA, 1818 bp, Streptococcus suis; identical to SEQ ID NO: 71901

SEQ ID NO: 80698 - DNA, 1830 bp, Streptococcus suis; identical to SEQ ID NO: 80664

SEQ ID NO: 80699 - DNA, 1794 bp, Streptococcus suis; identical to SEQ ID NO: 72161

SEQ ID NO: 80700 - DNA, 1830 bp, Streptococcus suis; identical to SEQ ID NO: 80664

SEQ ID NO: 80701 - DNA, 1794 bp, Streptococcus suis; identical to SEQ ID NO: 72161

SEQ ID NO: 80702 - DNA, 1842 bp, Legionella pneumophila; identical to SEQ ID NO: 80178

SEQ ID NO: 80703 - DNA, 1812 bp, Legionella pneumophila; identical to SEQ ID NO: 80179

SEQ ID NO: 80704 - DNA, 2088 bp, Streptococcus pneumoniae
atgaagttaacaaaaatggttattaataattttagatcttttggggagtgtcaagcaattaactttaataatcaaactgtactgatagggaataatagttcaggaaagacaactgtattacaggcattgagtaagttgttttcagataaacaaagtgaaagaatcattcgaaaaagtgattttcatttaccaaaagggttaaaacctggtgaaaacacaagaaatctttttatagaaactatttttgagtttgatgaacttgctggaactgtctatggaccagccattccaacatttttcgagcactttacagtttctcaagatggtgcaaaaccttttttacgaatcagattagaatcttcctgggaagatgatggaacagttgaaggaagtattgatactcaaatttattatatttcatctgatgaagatactattagagatgaagacaaacatcgtgctcctagaaaggatttggataaaattagggtactttatgtaccagcttcaagaacacctgagaaggagttgggtaatgcttcaggtagtatgttaagtaggctggtaaatagtataaattggactaaagatgagataaatgaaattaaagataaaattgatgagttgaataacacctttttatctgaaaatggagcattaactcagattaacaatgagattcagaaatcatgggaattatatcatgaagataaccgtttttctcaagcagagttaattattaattcttctgagatggcggcagcacttagacagattgccttaaaattttcaccaacaaccactgaagaagcatttacagtttcagatctaggagatggactgagatctattttttatttttcacttgttgattcgatacttgatattgagttagaaattaccaaagaccgtgaagagaatcctgataatccaagatttaagttggtacctccaatactaactatcttagcaatagaggaaccagaaaatcatattgctccacatcacattggaaaactagtaaaaaggtttaagcaattaagtaataatgataactctcaagtaattttaacgtcacattccccagctattgtaaaaagaattgaaccagaagaattgaggtatttaagaattgaaagtaatggcagagttcttcaaaccattgtttctgatataaaactacctcaagatactgatgaatcttataaatatattaaaggagcaattcaagcatatcctgaactatattttgccaagttagtagttctaggtgaaggtgatagtgaggaactgctattaccaaagttttttgatttacttgggaatgagatagatagctctcagatttcaattgtgcctttaggaggaagacatgttaactatttttggaaattattaaattctctaaaaatacctcatattactttactagactttgataatgaaagatacggaggtggttgggggagagtacaatatgttatccaacagttactaaaaataggtattgcgcgtaatgatttagtgagaatgaaagatggtagaatattggacgatcaagacattgctagaattagttctaatcagatatctgatatcctctctcaaccattgttatcctggataaatcatttagaaaaattcaatgttttcttttctgcaccccttgatattgattttttaatgttacagtattataaggattattatctggaaactttatctaccaatgagggacctgttgtttcttatactgacgaaaatagtgacaataaaaaaataaaaataactaaaatggacagaacaaatgattatcaattaattggttttaaaaatcgcatcagtgaagctatacaagcgactttaaaagataagagtggccctggtgatagcttcactgaagaagaaaaggaactcatgatttggtatcaatatttctttttaggtagaggcaaaccgacgactcatatgcaatttttattatctattcgtgatgaagaattaatcgaaagcctaccttctgtatttgagaaaatagttaaacgagctaaagaattacttggagatattgaatatggtgaagagtga

SEQ ID NO: 80705 - DNA, 1818 bp, Streptococcus pneumoniae; identical to SEQ ID NO: 76075

SEQ ID NO: 80706 - DNA, 1752 bp, Legionella pneumophila
ttgtatctatcaaaattaaacatttctaattttcgaaaactcaagcaaatttcattggagttcgaaaaaggacttaatgttattgtgggagcaaacaatattggaaagtcagccgttgttgatgcattaagagccttgttgacaggatttgatggggcatttcttcgtttgactgtagatgatgtttacactgatcaaagcatgagtgagccatcaccaaatataatgtttcattatatatttgacggattatcattagatgatgaagcagattttttgcctgcacttatacaaaatgaggataactcatttgaagctcatttttacgtgagttatatgaatgatggtttaaattctaggttaagagtaaagcgatggtgtggtaaacatgaagaaatcggtatttctagtgatatgatggaaaatattagaggtgtttatctacaacctttgcgagatgcatctaaaggtttaatgcccggcagaaatagtcgattatctcatctaatacaattactttctgatgaaaacagcagacaagctgttgaggaaaagctaggacagttagatagttttctgacaaacgagattccaatagcagacactcgaactgcagtcataaacaatcatgaaaacatgttggggcaagttttagcccaatccttagaattagatattggtggtgccgattttagaagtttgtcttctaggctatctttgtatgccgataaatttgacattgaacaaaatggcttggggtataataacttaatatatatggctgtggttctttgtgagttggctaaagatccatatattttgtacagaggattgattattgaggagccagaagcacatttacatccgcaattacaagctattctgcttgattatcttgaaaatattaaggctgacaaaggtgaggggcatgttcaagtttttgttacaagccactcccctaactttggtagtattgctcaattaaactccataacttgtctcgttgatgtaaacgatgaagtaaagacattttttccgcgaaaagtaaattttgaaccacagaagcgagaaaagcttgaaaggtacttggatgtaacaagagcagaaattttctttgctcgaagaattatttttgttgaaggcactgctgaattaatgcttataaatatttttggtaaaatgcttggggaagaatatgatcttagaaaaaatggagtaagtgtcataagtgttgatggtttaaattttgactcttttttaccattatttggtagagacgctatttccattcccgttgccgtgattacagacgcagatccaattgctgatgaaaatgatgatttgaaatctgtctatccggatcttaatgaggatataacggtgtcttcaactatagaaaaaatgaaaaaatgtgaaagtgattttgttaaaattttctatggagttaaaacatttgaatatgatcttgcattacatgaaaagaatcgagaaaagatgttaacagcacttgagtctatacaccctcaaattggagcagaactaagaaatctggttaatgaagcacaatcaaatcgtgataaagcaagagagttgttttgtggaatgtttgaacgaggcaaaggaaagagtaatgttaaaaaaggggtttttggacaggcattggctcaaaccatatctagttcaaaatatgatttcatagtgcctgattatattgaaaatgcaataaagtttgtttgtgattataaaaaatga

SEQ ID NO: 80707 - DNA, 1749 bp, Legionella pneumophila
atgaacctatcaaggaaacagattgaaattataaatagtccttcagaatcattatgtgttcttgcatgtgctggaagtggtaaaacaatgactgctgttcatcgattaaatcacatacgaactattaacaaggacagtcggtcatggtttgcacttctatcattctcaaatgtagcaattgatacctttaaagaaaaatatttggatttagtcgaaggtcagattttatcctcataccaaaatagaattttaatagaaacatttgatagttttttgacaaatgttattttaaagcctcatgcttctcaagttatggggtgtgaaaactcgccttttttattgagtggaaatgaaggttttcttaaaaatgataattataagttttggtataaatctagcagcaaggatatccctgttccacctcaaaaaatagataatatttttatcgacatatcagggggcaattttgtattcaaatatcgagatgataagggaaatatatcaatcattaataatggaagaaaggtaacagaaaatctaggggctataggagcatatactcacgaatttggaaggttttgggcacttaaaacgttaaaaatgcatcctgaattactacgaacaatatcaaaaagatattctcatattattattgatgaagcccaagacattggattacttcataaatattgtattgatctcttaattaaagaaggaagctcaatttcgttaattggtgatccgtgccaagcaatctatgagtttgcgggtgctgatggattttttttgcgtgacttttatactcgctctggagtttctaactatgaacttataatgaattatcgttctatccctgaaataaacgcagtatcttcagttatatctggaaaaaatatttcgtcgaagaaaactaattttaatcaaaatttgggggcattttttgttacatatgatcctaagaaccctgttttattgaaagaattattctcgaataaaatatcacagtgcaatattagtagtaataatgccgcaatcttatgtcgtagtaatgaaatggtgaataagctcacaattgaaaattcttctttaggtcaaggtaaaattaaacttctcacaaatgctgctattcagcgagatttacatagagattataatacggcatttaaccttgtaacgaagtgtatagttggcttactaatcaatccccccaatgatttatataataagatactgcaatcaaatcgattttttgaattttatgatttaaaaaaggatatttggtcattcataagagatgctgagaaaggtctaccattatcttctttaaacgccaagcaagattgggtaaaaatccttcggacaaacttagaagagttactaaacaaatgcaatcaaagatatggatttgagattttacctaatattaattctgtcttaagtacacgtggactttcaaattctccactatattctttggatgttacttccactaaagacgaaaaattacgtgtcgacactgttcataaatctaagggtgaaagtattgatgctgttttatatattgctaatggcaaccatattgaggcaatgttagatggcgtaaatacagaaacaggcagaattgggtatgttgcattaactcgtgctagaaatttatttattcttggagtccccaataataaaacaaataccatcagaactaaattaatagatttgggcttcaaggaaatagaagtagaaaattgctaa

SEQ ID NO: 80708 - DNA, 2070 bp, Streptococcus pneumoniae; identical to SEQ ID NO: 71808

SEQ ID NO: 80709 - DNA, 1818 bp, Streptococcus pneumoniae; identical to SEQ ID NO: 71809

SEQ ID NO: 80710 - DNA, 1830 bp, Streptococcus suis; identical to SEQ ID NO: 80664

SEQ ID NO: 80711 - DNA, 1794 bp, Streptococcus suis; identical to SEQ ID NO: 72161

SEQ ID NO: 80712 - DNA, 2088 bp, Streptococcus pneumoniae; identical to SEQ ID NO: 80704

SEQ ID NO: 80713 - DNA, 1818 bp, Streptococcus pneumoniae; identical to SEQ ID NO: 76075

SEQ ID NO: 80714 - DNA, 2088 bp, Streptococcus pneumoniae; identical to SEQ ID NO: 80704

SEQ ID NO: 80715 - DNA, 1818 bp, Streptococcus pneumoniae; identical to SEQ ID NO: 76075

SEQ ID NO: 80716 - DNA, 1758 bp, Streptococcus pneumoniae; identical to SEQ ID NO: 72172

SEQ ID NO: 80717 - DNA, 1539 bp, Streptococcus pneumoniae; identical to SEQ ID NO: 72173

SEQ ID NO: 80718 - DNA, 1758 bp, Streptococcus pneumoniae; identical to SEQ ID NO: 76066

SEQ ID NO: 80719 - DNA, 1539 bp, Streptococcus pneumoniae; identical to SEQ ID NO: 72173

SEQ ID NO: 80720 - DNA, 1752 bp, Legionella pneumophila; identical to SEQ ID NO: 80706

SEQ ID NO: 80721 - DNA, 1749 bp, Legionella pneumophila; identical to SEQ ID NO: 80707

SEQ ID NO: 80722 - DNA, 1752 bp, Legionella pneumophila; identical to SEQ ID NO: 80706

SEQ ID NO: 80723 - DNA, 1749 bp, Legionella pneumophila; identical to SEQ ID NO: 80707

SEQ ID NO: 80724 - DNA, 2070 bp, Streptococcus pneumoniae; identical to SEQ ID NO: 71808

SEQ ID NO: 80725 - DNA, 1818 bp, Streptococcus pneumoniae; identical to SEQ ID NO: 71809

SEQ ID NO: 80726 - DNA, 1830 bp, Streptococcus suis; identical to SEQ ID NO: 80664

SEQ ID NO: 80727 - DNA, 1794 bp, Streptococcus suis; identical to SEQ ID NO: 72161

SEQ ID NO: 80728 - DNA, 2088 bp, Streptococcus suis; identical to SEQ ID NO: 71734

SEQ ID NO: 80729 - DNA, 1407 bp, Streptococcus suis; identical to SEQ ID NO: 80681

SEQ ID NO: 80730 - DNA, 2088 bp, Streptococcus suis; identical to SEQ ID NO: 71734

SEQ ID NO: 80731 - DNA, 1260 bp, Streptococcus suis
atggtgaagagtgacgattggtttcctaaaggagtcattaaattagaggatgctgctttagaagtagttaaagatgttactaacagtctagtcattgctggaccaggtgctggaaaaacagaattactggctcaaaagttagactatcttttttctacaaataaatgtatttctccaaaaaagattttagctttaagttttaaaacagatgctgctgcaaatttgaaagatagagttaaaaaacgttatggtgatgaatatgcttctcgttttacctcattaacctattcggcttttgaaaagagaattttagaccaatttagagatgttctacctgaggatatacgaccatcaagagattatttgattgaagattgggatactataaaagaactactctctatgaatggaattaatgttaatggatggaggatgtcagatataagaaattttgtcgaaaatattatacttaatgacgggaatactcacaaattaaaaaaggatttactaaaaggaacacaagataataagccggtcctcttgtataggcaaataacaaagttgagtactcaaataatagctactaacgaatacatccgtaaagcacttcaaatgacatacgattttgtatttctagatgaatttcaggatactacatatgcccagtataatttattaaaaacttgttttttaggttcgtcttgtaaattaacagcagttggagataataagcaagccattatgagatgggcaggtgcaaaacctgatatttttccagactatattcgagactttaattcaaatgaatatcaattgttgatgaatcaccgctctgtacctaaacttgtaaaatttcaaaaagaggttcatcagatattaaatagtaatcacagttctattcagccaaataattatccagaatttcaagagggtgaaataacattatttgaatttgaaaatgaaagtttagaagctgagttaattgcaaatgatatagaatcaaaaattcaaggaggtatacgaccatcagaaatctgtatcctagcaaaacagaaggttgatgattatagttcaaaattgataactacattaaacagtaaagggattaaagcaagaattgaaaatgaatatcaagagcttttaaaagaccctacttgtaacctattattagatttaatatcatgcagtcaaggaaaacgagatcctttaatttgggaaaatattagtaatttttatggaaatatcaattgtattagataa

SEQ ID NO: 80732 - DNA, 2100 bp, Streptococcus pneumoniae
atgaagttaacaaaaatggttattaataattttaaatcttttggggagtgtcaagcaattaactttaataatcaaactgtactgatagggaataatagttcaggaaagacaactgtattacaggcattgagtaagttgttttcagataaacaaagtgatagaatcattcgaaaaagtgattttcatttaccaaaagggttaagacctggtgaaaacacaagaaatctttttatagaaactatttttgagtttgatgaacttgatggaactgtctatggaccagccattccaacatttttcgagcactttacagtttctcaagatggtgcaaaaccttttttacgaatcagattagaatcttcctgggaagatgatggaacagttgaaggaagtattgatactcaaatttattatatttcatctgatgaagatactattagagatgaagacaaacatcgtgctcctagaaaggatttggataaaattagggtactttatgtaccagcttcaagaacgcctgagaaggagttgggtaatgcttcaggtagtatgttaagtaggttggtaaatagtataaattggactgaagatgagataaaagaaattaaagataaaattgatgagttgaataacacttttttatctgaaaatggagcattaactcagatcaacaatgagattcagaaatcatgggaattatatcatgaagataaccgtttttctcaagcagagttgattattaattcttctgagatggcggcagcacttagacagattgccttaaaattttcaccaacaaccactgaagaagcatttacagtttcagatctaggagatggactgagatctattttttatttttcacttgttgattcgatacttgatattgagttagaaattaccaaagatcgtgaagagaatcctgataatccaagatttaagttggtacctccaatactaactatcttagcaatagaggaaccagaaaatcatattgctccacatcacattggaaaactgataaaaaggtttaagcaattaggcaataatgacaactctcaattaattttaacttcacattctccagttattgtaaaaagaattgacccagaagatttgaggtatttaagaatagaaaataatgacagtgttcttcaaaccattgtttctgatatacagttacctcaatcgaatgatgagtcttataaatacattaagggagcaattcaagcctatcctgaactatattttgcaaagttagtagtactgggtgaaggtgatagtgaggaactgctattaccaaagttttttgatttacttggactggaaattgatagttctcagatttcagtagttcctttaggaggtaggcatgttaattatttttggaaattattgaacgctctcaggattcctcatattaccttattagatttcgataacgaaagatatggaggtggctggggaagaattcaatatgcaataaaacaattgatactaaatggggttgctaaagaaaaacttgttactgtaacagccgaatctcaaaaatcacgagttctagatgatgatgagattgataaaataaaggactggaagattgatagacctgataatcagttgcttgaggggtggattaaaatgttagaaaaattcaatgttttcttttctgcaccacttgatattgatttcttaatgttacagtattataaagaacattatctggaaactttatctaccaatgagggacctgttgtttcttatactgatgaaaatagtgacaataaaaaaataaaattaactaaaatggatagaacaaatgattatcaattaattggttttaaaaatcgcatcagtgaagctatacaagcaactttaaaagataagagcggacccggtgatagcttcactgaagaggaaaaggaactaatgatttggtatcaatatttctttttaggtagaggaaagccaacaactcatatgcaatttttatcatctattagtgatgatgaattaacaagaaatctaccccctgtatttaaaaaaatagttaaccgtgctgaagaattacttggagatattgaatatggtaaagagtga

SEQ ID NO: 80733 - DNA, 1818 bp, Streptococcus pneumoniae; identical to SEQ ID NO: 73329

SEQ ID NO: 80734 - DNA, 2088 bp, Streptococcus pneumoniae; identical to SEQ ID NO: 80704

SEQ ID NO: 80735 - DNA, 1818 bp, Streptococcus pneumoniae; identical to SEQ ID NO: 76075

SEQ ID NO: 80736 - DNA, 2088 bp, Streptococcus pneumoniae; identical to SEQ ID NO: 80704

SEQ ID NO: 80737 - DNA, 1818 bp, Streptococcus pneumoniae; identical to SEQ ID NO: 76075

SEQ ID NO: 80738 - DNA, 1986 bp, Legionella pneumophila
atgcatttagaaaaaatttgtgtatcaaattttagatgttttcctgaaagcgaaacatcaattttcatggaacaagatcttacctgctttgtgggcaataatggctctggtaaaactactatgattttagctctcaaaagactatttggagcaaataggcaagatcgagttattacgagagaagatttttatcttgctatgaatgaaacttataaggatattgttggacgtgaattatatatagaggttgtctttatattcccagaacttaatgacgatatacaaaacgctagagaaacatgtccagcatttagttcggtgatttttgcggatgaaaatgataaaaaattaaaggcaaggatgcgattagaagctgtatggtctgaaacagaatacgaagatgaagtacagtcacgactatactggatcaccacttcagaaaagatagaatttggagacgaaacggatttaaaatatcctgtttctccccaagatagaaaacatattaaattaagatacattcctgcatttagagattcaacgtccatacttagggacgaagttaagttacttgcaaagttgcttgcagactacagtgatattaatcatacaactcaagaaacaattaaaaaagccagtgaaaaattaagctcggaagttcaaggactggatgctataaaaacaacaacaggtattcttaaatcgatttggcaagaagttcacgataacacccttaagcattaccaagagccaaaaatcgaagcgacaccaactgaagtcgatgagcttttacgatcaatatcaataaaacttgctccaactgaaaatggcgaaagttgtgatctgaaagggttaagtgacggtcaagtatcccttctttatgttactctttctatggcattgtatgagcttgaacaaaagcattatgctagggaaataaaaggctttaaagaacttgataaggatattgcagtatttactatattcgcatttgaggagccggaaaaccatttatctccatattacttgggcaaagtcataaagcttttacatctaaaaactcaaacagcaaaggctattggcatcatcacctctcattcatcaagtgttgtacggagaatgaaaagagttgagcaaattaggtattttcggcaggaaataaatactgatatacgctattcagtggtcaaaaaaattctccttcctcttacaagatcagacgatgattataagtatattaatcaggccgttactgctcacccagaattatatttttctaaacttgtaatacttggagaaggtgattctgaggaaattgtcattccacaattagccaataagctaggtttagatttagatccctcttttgttgcttttgtaaaacttggcgggcgtcatgtgattcacatgtggcgacttctaaatgatttagctataccatatgttactttgcttgatcttgacttgggcagacaaagtggtgggccagtaagaattaaaaatataattgatgaattagaaaagcaagataaatatatagagctacctaaaggcatgaataaaaaggatttaagtgctacttcgataaagcaagatcaattgaatgaattactgattcaactagagaaatgtaatatctttttttctgtcccattagatctcgatatggtaatgattcaatcatttccaagctattattgtgcaaatgcaagagattccaagcgaaagattctcgaaaaagctgttttaggtgatgcttgtatacctgatgcatatagtcaatctggtttttctctttcagacgatgaattaaaaaaatatagatatttattctgtacaaaaagtaaggtggcatcacactatcaagcaatggcagaaattagggaactcccagtgagtgagcttgaggagcattgtccagattcaataagacaattaattaagttatgttcaaaattaataacaagagtgctagataatgagtaa

SEQ ID NO: 80739 - DNA, 1857 bp, Legionella pneumophila
atgagtaagtatctatctctcgaacaatggaagccgagcaaagaatttttaacatcggatttcttagaaagaattatcagagaaaaccaaaataatttagcaattcttgcgggtccgggtgcagggaaaacggaaattttagctcaacgtgccagttttttacttcaaacggggacttgcagagctcctcaaaaaatcttggcactaagcttcaaaaatgacgcagctgctaatattcaaaagcgagtagttatgcgatgtggacaagagctgtctcgcaggtttgattccttcacatttgattcattctttatttctcttgttcgaagatttataacactgttacctgattggattaacatacatgcagattttgatatttatagtttcgatagtaattggtggaatgagtatgagaagtttgttcttaacgggagcccttgtttgtataggaatacttatagtcaatcggatcgccattcaccttcagatctaagtcaaaaaccagaagatgaaatagtaaaaatttgggattattgttcgactaaaagtgttgttgattacgctatgtgtcgatctatggcttataccattatcaaaaatcatagccaagtaagaaacttaattttatcaacatataaatatctttttcttgatgagttacaagatgtaactgacttccaatacaattttataaagacagtttttgaaaatagtaacgttgttatcacagcagttggtgatactaatcaaatgataatgggctgggctggtgccaatcctcttaattttaaaaaactacaaagtgattttgactccgaaattattcctttagcgattaatcatcgttctaattcaaagattatcaatctaatcaattttattattcatgatttaactcctcaaggggaggtggctgtagtatatgagggtactcgaaaagatcctccgccctcaaggtgtttaggagcaagatcgtttaattgtattaatgatgaaggcgaatatattgctcattatataaaacaacttatgcaacaaaatccgggattaaaaccttgtgattttatccttgttttaagacaaaaagcacaggaatattttgtccaagtaaatgacatttttacgatgaatggacttcatctccgaaatgaagatatggaggtgacaaaaaatggaataaaaatccaggatttgatggaagaacccttatctagttttttaattttattaataagaaaaagaataggcgctataaactatgagcaagaaaaagagctggaaagactgattgcctccgtcggcggctatcatatggatcaagacagagagtataaaaggctccataaacatttgtccgatctaatatctattataaatttttctacccctctaaaaactattgtttccagagtgatagaaaacatcgggctaacaaaacttaaaaatgtgtttccgcaatatagatccaaatatttaaaaaaaacagagaattcattttgtgcattctttcaagaagcactagatcgaaatttacaagacataagattagcgattgaaagttatgagggacataaccaaattaaactgatgactattcataaaagtaagagtttagagtttgatactgttttttttgtagattttaatactagctcttggtggggattagaaaatgctgttaaggataataatgcaaaaaagcagcgagaagagaaaaatgctttttttgttggcctgtctcgcgctaaagagcgacttttttttactagaggccaaggagactggccacaaaccatcctaaacttattaatagaatcaaaattactaataaaacttccagacattaataaataa

SEQ ID NO: 80740 - DNA, 1758 bp, Streptococcus pneumoniae; identical to SEQ ID NO: 72172

SEQ ID NO: 80741 - DNA, 1539 bp, Streptococcus pneumoniae; identical to SEQ ID NO: 72173

SEQ ID NO: 80742 - DNA, 2088 bp, Streptococcus pneumoniae; identical to SEQ ID NO: 80704

SEQ ID NO: 80743 - DNA, 1818 bp, Streptococcus pneumoniae; identical to SEQ ID NO: 76075

SEQ ID NO: 80744 - DNA, 2088 bp, Streptococcus pneumoniae; identical to SEQ ID NO: 80704

SEQ ID NO: 80745 - DNA, 1818 bp, Streptococcus pneumoniae; identical to SEQ ID NO: 76075

SEQ ID NO: 80746 - DNA, 2088 bp, Streptococcus suis; identical to SEQ ID NO: 71734

SEQ ID NO: 80747 - DNA, 1407 bp, Streptococcus suis; identical to SEQ ID NO: 80681

SEQ ID NO: 80748 - DNA, 2088 bp, Streptococcus suis; identical to SEQ ID NO: 71734

SEQ ID NO: 80749 - DNA, 1407 bp, Streptococcus suis; identical to SEQ ID NO: 80681

SEQ ID NO: 80750 - DNA, 2034 bp, Streptococcus suis; identical to SEQ ID NO: 80676

SEQ ID NO: 80751 - DNA, 1926 bp, Streptococcus suis
atggttacgagaacagtagagcaagaagtagaaaaagtatttgaagcaataaaacaaggtcaaaattttattcttgaaggcggtgctggaagtggtaaaacttattcgctaatttcaattattgaaaaaatattgattgaagaacctaaaaaatcaattgtatgtattacctatactaataatgctgttgcagaaattaaatcacgaataattaatgataatttatgggtatcaacaattcatgagtttatctggcatatcattggaaatttccaaaaagagattaaagaatgtcttgttgagttaataaatgatgattcacaaaagttatttgtttcaccaaaggatgtaattgaagaagaaagtatttcacttgattactttgatgatgtccgtgttgactatgctgaatggtactctatgagtataacagagcaaaataaagtccaaataagtcatgaccatattctaatagttgccgaaaaaatgttttcaaaatataagaagttatgtgatgttttagcggatactgcaaactatatttttgttgacgaatatcaagatacaagtccactaattgtgaaaatattattagagcatcttcaaaagagtactaagaaaaatgttgtaggcttttttggagattctatgcaagctatttatgattcaggggtaggagacttaaattcttataatttggcaaagatacaaaaaactcaaaatcgtcgtaatcctaaaaaagttattgatttagccaataaagttagaaatgatggtttagttcaaactccatccaacgatgatacggctcccaatatggacgatgggagtgtcattgctggaacagtgaaatttgtctacgggaacgatattaatcaacttgatgttcttagaaatagtaaactatataaagctttagaatttgatatagctaaaaaaacaaaagaattacgtctgacacataaacttaatgcagaaatggcaggtttctctaagttatttgaattatataatactgatttatttgtgaaattaattacaggtataaagaaaaaaatcaatgaaaataagatagctgataaaggaaaaacgtttgaagaactggtagaagaggctaaaatagctgtcggaaagggaggtccattaataattgatgtggttaattccatcccagaacttttggctttttacgatgaaattaagacgtgctcgtttgaagaagttagtaataagagtaaagttaataaagaatcgctgttagcttataaatttaatggattaagtagtagatatgaagcgggcacagatagggataggattcttaaaaggttagatttaatctatgagctattagagctgtataaaacaggtaagcataatgaattcttacgtattactaaatttaatataacttcatcagaagataaaattagtctatctaaagttatgacaaaaatctctgttgatgatattacaattggaaaagtcatagaacttgcagaggaaagtggattaatttcaaaggatgacttatttactaattttattgaaagtaggggacattatttatggtcacgacttaagataatgccatttcaagaatatgtaaatagtattgcttatctcagagaatatgtatctgttataacgcagcataaggttaaaggtagtgaatatgataatgttttagttttattagataatggaaaatggaatcaatataattttgatagcctatttggtaaaggttcagttaatgagaatgtccaaaaaagaactaagaagttattctatgttgcaattactagagcaatgaaaaatttaattgtttacatgccgagtaatgatagtcagattattcaaaaagcacaagattattttgaaccaattgatattattgatgttttgtctttagttgatgagtaa

SEQ ID NO: 80752 - DNA, 1758 bp, Streptococcus pneumoniae; identical to SEQ ID NO: 72172

SEQ ID NO: 80753 - DNA, 1539 bp, Streptococcus pneumoniae; identical to SEQ ID NO: 72173

SEQ ID NO: 80754 - DNA, 2088 bp, Streptococcus pneumoniae; identical to SEQ ID NO: 80704

SEQ ID NO: 80755 - DNA, 1818 bp, Streptococcus pneumoniae; identical to SEQ ID NO: 76075

SEQ ID NO: 80756 - DNA, 2070 bp, Streptococcus pneumoniae; identical to SEQ ID NO: 71808

SEQ ID NO: 80757 - DNA, 1386 bp, Streptococcus pneumoniae
atgtcagatataagaagatatgtcgaaaacatcatacttaacaatggggataatcacaagtttaaaactgacttactaaaaggaacacaagataataagccggtcctcttgtataggcaaataacaaagttgagtactcaaataatagatactaacgaatacatccgtaaagcacttcaaatgacatacgattttgtatttctagatgaatttcaggatactacatatgcccagtatgatttattaaaaacttgttttttaggttcgtcttgtaaattaacagcagttggagatgataagcaagccattatgagatgggcaggtgcaaagcctgatatttttccagactatattcgagactttaatccaaatgaatatcaattgttgatgaatcaccgctctgtacctaagcttgtagaatttcaaaaagaggttcatcagatattaaatagtaatcacagttctattcagacaaataattatccagaatttcaagagggtgaaataacattatttgaatttgaaaatgaaagtttagaagctaagttaattgcaaatgatatagaatcaaaaattcaaggaggtatacgaccatcagaaatttgtatcctagcaaaacaaaaggttggtatttatagtttcgaattgatatctatattaaatagcaaagggattaaagcaagaattgaaaatgaatatcaggatattttaaaagatcctacgtgtaacctattattagatttaatatcatgcagtcaaggaaaacgagatcctttaatttgggaaaatattagtaatttttatggaaatatcaatggaatagatgagttaactgatgaattaattttagcaaaatcctataaggagattgacaatatagttagtgatattacttacctaatttcaaattttattcccaatgaagaaagtatgctaaaattaattgattgtattattgaaaaaatagatgaaaaaagaattatttccaatttttcaacatacaatggaaaaagtgacctagatatcattgtcaagaacttttcaaagttattatacatagaatattctcaaacacaaggtgaatggctagatacagtctctagtttcaagggtgaaaactcaattccaattatgactatccataagagtaaaggattagaatatgaggtagtctattttctaggcttggaggattctgcattctggagttttaataatcagccggaagaagataaaagtgcattctttgtcgcactttcaagagcaaaaagtcacttaatattcacatattgtaaattgagaaataatagtccgcaaaataatagaaatattaatgagatatattcattgctgactcaatccaatttagttgatgttattaattaa

SEQ ID NO: 80758 - DNA, 2088 bp, Streptococcus suis; identical to SEQ ID NO: 71734

SEQ ID NO: 80759 - DNA, 1818 bp, Streptococcus suis; identical to SEQ ID NO: 71901

SEQ ID NO: 80760 - DNA, 1830 bp, Streptococcus suis
ttgacaatttgggacaatataaaaaaggttgcgtatacccctgactcggaattagaacctattttaggaataaaccttcaaatttggattcagtactcagaagaagattcttatcaaaacatccagccacttatgatggatttaaatcctgataataattatattattcttgatttttcgtatatagtccctatttcgagacttcatgacttaaataccgaaataagcaatttttcagatgatttttcaaaatttgagtcatttatgaagaagagcatgagtaaattttttgagatgcagattaactcacggggatataatcctgatatacagaaattgacagaagaaaagtctgatttacttgaaatgaaagatattcataaacttattaaaataagagggattagagctaatcgagaagtatcaaataaagaaaataatcattcattatctaaaacatcaaatctattttataaatcaaataatggtgatgatattgacaatgctacaaaaaatttacttcaatctgcaattacagaggcagatgaagctttaaccaaggcatatagtggtgatggtgaagacgatggggttttcacctcgatctttgaaagagtaaaaaaatttggtggaaatgatagtgaatcagagttggaaattcattcatctctttctgagaaagacattttgagtaataatacaacactatactataggcatgacgatagtttattaccagaaacatacaatggtttgggatatttaaatctatatgggatgatttttgaaatagagacgttgatggcagatatcaaaaataatcctgctgatattaatttagtttatattgaggagccagagtcgcataaacatccacaattgcaatatgtttttatcaagaatattaaaggtttgctgaaggaacatgatgatgaactaaaagcaagtggatatactagtggtattcaaactttaattacaactcattcatcacacatagtgtctgattgcaactttgatgatttaatttattttaagcatgataatggcacagctatatcaaaggcttttaattcattgaaagaagaatatgaagatgataaacttgggtacagatttgttaagcagtatttgacactcaatagtagtgaactattttttgctgataaagtcatttgtattgaaggtgacacggaaagaattttactgccaacaatgatgcaaaaagtggatatagcaactccaatagaacaaggttcaaatataatgccattactttctcaaaacatttcaatcattgaaacaggtgctcattcacaagtgtttaggaaattttttgactttttagggataaaagtattgataattactgatattgatcctgtaaataaaaatgaaaagaatcgttttatcgcttgttcagcagtaaatgctacatctacgtcaaatacttctcttaaaagtttcttcaatatttcaggagatggaattttttcaacagtaactcaaaaaagttttgctgaaaaaataacaccagataatagaatccgtattgcatatcaaattcccgaagataacaatggttatcagcctgctagttttgaagattcctttatcggtttaaataaagaattcattattaaacaaaaagatggtcttattgaatatgaagctttaaaaaactttgatgacgatgaaatagaagatttctatacatttgctaggaataaagtgaacaaaaagtctgcctttgcatcaagtttattatactttgaagatgaagaaaatacttggaaagtacctaaatatatttcggagggattattatag

SEQ ID NO: 80761 - DNA, 1794 bp, Streptococcus suis; identical to SEQ ID NO: 72161

SEQ ID NO: 80762 - DNA, 2070 bp, Streptococcus pneumoniae; identical to SEQ ID NO: 71808

SEQ ID NO: 80763 - DNA, 1818 bp, Streptococcus pneumoniae; identical to SEQ ID NO: 71809

SEQ ID NO: 80764 - DNA, 2034 bp, Streptococcus suis; identical to SEQ ID NO: 80676

SEQ ID NO: 80765 - DNA, 1926 bp, Streptococcus suis; identical to SEQ ID NO: 80751

SEQ ID NO: 80766 - DNA, 2088 bp, Streptococcus suis; identical to SEQ ID NO: 71734

SEQ ID NO: 80767 - DNA, 1407 bp, Streptococcus suis; identical to SEQ ID NO: 80681

SEQ ID NO: 80768 - DNA, 2088 bp, Streptococcus suis; identical to SEQ ID NO: 71734

SEQ ID NO: 80769 - DNA, 1260 bp, Streptococcus suis; identical to SEQ ID NO: 80731

SEQ ID NO: 80770 - DNA, 2064 bp, Staphylococcus aureus; identical to SEQ ID NO: 72502

SEQ ID NO: 80771 - DNA, 1749 bp, Staphylococcus aureus; identical to SEQ ID NO: 72503

SEQ ID NO: 80772 - DNA, 1758 bp, Streptococcus pneumoniae; identical to SEQ ID NO: 76066

SEQ ID NO: 80773 - DNA, 1539 bp, Streptococcus pneumoniae; identical to SEQ ID NO: 72173

SEQ ID NO: 80774 - DNA, 2070 bp, Streptococcus pneumoniae
atgaagttaacaaaagtaattattaataattttagatcattcggtgaaagtcaaattattgaattaaacaatcaaactgtactgattgggaataatagttcgggaaaaacaactgtattacaagcattgagtaagctgttttcggacaaacaaaatgatagaataataaaaaaaagtgattttcaccttccaaaaggttcaaggcccggagaaaatactagaaacctctttatagaaactatttttgagtttgatgaacttgatggaactccctatagtcaagcaattccatcgtttttcgaacactttacagtttctaaagatggtgccaaaccatttctacgaatcaggttagaatcttcttgggaagatgatggaacagttgaaggaagtattgatactcaattctattatatttcatctgatgaagatactattagagatgaagacaaacatcgtgctcctagaaaggatttggataaaattagggtactttatgtacctgcttcaagaacgcctgagaaggagttgggtaatgcttcaggtagtatgttaagtaggttggtaaatagtataaattggaccgaagatgagataaatgaaattacagataaaattgatgagttgaataacacctttttatctgaaaatggagcattgactcagatcaacaatgagattcagaagtcatgggaattatatcatgaagataaccgtttttctcaagcagagttgattattaattcttctgagatggcggcagcacttagacagattgccttaaaattttcaccaacaaccactgaagaagcatttacagtttcagatctaggagatggactgagatctattttttatttttcacttgttgattcgatacttgatattgagttagaaattaccaaagaccgtgaagaaaatcctgataatccaagatttaagttgattccaccagtactaactatcctagcaatagaagaaccagaaaatcatattgctccacatcacattggaaaactgataaaaaggtttaagcaattaggcaataatgacaactcccaagtaattttaacgtcacattctccagctattgtaaaaagaattgacccagaagatttgaagtatttaagaatagaaaataatgacagagttcttcaaaccattgtttctgatatacagctacctccagctatagatgaatcttataaatatattaaaggagcaattcaagcttatcctgaactatattttgcgaagttagtagttctaggtgaaggcgacagtgaggaactgctattaccaaagttttttgatttacttgggaaagaggtagatagctctcagatttcaattgtccctttagggggcagacatgtcaactatttttggaaattattgaatgctctcagaattcctcatattaccttgttggattttgataatgagagatacggaggtggttggggaagaataaaatacatttctcaacatctgtatgagctgaacacagagtttcaagaatggttccatactcagagacttgattttaatgaaattgggtcacgaggttgtgaatcgataggagctcaacgtctgattaattggtttaataaactcgaagaatttaatgtctacttttcatcgcctttagatattgatttcttgatgctacaacattataaagacaattatctgaatactttatccccaatagaaggaccagttgtttcatataatgattcggatggaagtagtaaaaaagtgaaattgagtgatttagactgtcttgatagattgcagttagaaggtttcaacaaacctaaagaggaagcaataagagctactttaaaagataagagtggacatggcgatagtttcaatgaagaagaaaaagaattaatgatttggtatcaatatttctttttaggtagaggaaaaccaacaactcatatgcaatttttatcatctattagtgatgatgaattaacaagaaatctaccccctgtatttgaaaaaatagttaacagtgctgaagaattacttggagatattcaacatggtaaagagtga

SEQ ID NO: 80775 - DNA, 1818 bp, Streptococcus pneumoniae; identical to SEQ ID NO: 71809

SEQ ID NO: 80776 - DNA, 2088 bp, Streptococcus suis; identical to SEQ ID NO: 71734

SEQ ID NO: 80777 - DNA, 1407 bp, Streptococcus suis; identical to SEQ ID NO: 80681

SEQ ID NO: 80778 - DNA, 1758 bp, Streptococcus pneumoniae; identical to SEQ ID NO: 72172

SEQ ID NO: 80779 - DNA, 1539 bp, Streptococcus pneumoniae; identical to SEQ ID NO: 72173

SEQ ID NO: 80780 - DNA, 2034 bp, Streptococcus suis; identical to SEQ ID NO: 80676

SEQ ID NO: 80781 - DNA, 1926 bp, Streptococcus suis; identical to SEQ ID NO: 80751

SEQ ID NO: 80782 - DNA, 1167 bp, Streptococcus suis
atgaaaataaaaaaaattaatgttcaaaattatcgtttattgaaggatttttctttagagttgaagagtgaattgtcattaattgtgggaaaaaataattgcggtaaaacctcagttttatctgtattggaaaagataatcaataaaagttctagtttaacctgggaagatataaatttgtatcatagaaaagtaatttttgaaaatataaaaaaggttgcgtatacccctgactcggaattagaacctattttaggaataaaccttcaaatttggattcagtactcagaagaagattcttatcaaaacatccagccacttatgatggatttaaatcctgataataattatattattcttgatttttcgtatatagtccctatttcgagacttcatgacttaaataccgaaataagcaatttttcagatgatttttcaaaatttgagtcatttatgaagaagagcatgagtaaattttttgagatgcagattaactcacggggatataatcctgatatacagaaattgacagaagaaaagtctgatttacttgaaatgaaagatattcataaacttattaaaataagagggattagagctaatcgagaagtatcaaataaagaaaataatcattcattatctaaaacatcaaatctattttataaatcaaataatggtgatgatattgacaatgctacaaaaaatttacttcaatctgcaattacagaggcagatgaagctttaaccaaggcatatagtggtgatggtgaagacgatggggttttcacctcgatctttgaaagagtaaaaaaatttggtggaaatgatagtgaatcagagttggaaattcattcatctctttctgagaaagacattttgagtaataatacaacactatactataggcatgacgatagtttattaccagaaacatacaatggtttgggatatttaaatctatatgggatgatttttgaaatagagacgttgatggcagatatcaaaaataatcctgctgatattaatttagtttatattgaggagccagagtcgcatacacatccacaattgcaatatgtttttatcaagaatattaaaggtttgctgaaggaacatgatgatgaactaaaagcaagtggatatactagtggtattcaagtccactaa

SEQ ID NO: 80783 - DNA, 1278 bp, Streptococcus suis
atgcaagctatttatgattcaggggtaggagacttaaattcttataatttggcaaagatacaaaaaactcaaaatcgtcgtaatcctaaaaaagttattgatttagccaataaagttagaaatgatggtttagttcaaactccatccaacgatgatacggctcccaatatggacgatgggagtgtcattgctggaacagtgaaatttgtctacgggaacgatattaatcaacttgatgttcttagaaatagtaaactatataaagctttagaatttgatatagctaaaaaaacaaaagaattacgtctgacacataaacttaatgcagaaatggcaggtttctctaagttatttgaattatataatactgatttatttgtgaaattaattacaggtataaagaaaaaaatcaatgaaaataagatagctgataaaggaaaaacgtttgaagaactggtagaagaggctaaaatagctgtcggaaagggaggtccattaataattgatgtggttaattccatcccagaacttttggctttttacgatgaaattaagacgtgctcgtttgaagaagttagtaataagagtaaagttaataaagaatcgctgttagcttataaatttaatggattaagtagtagatatgaagcgggcacagatagggataggattcttaaaaggttagatttaatctatgagctattagagctgtataaaacaggtaagcataatgaattcttacgtattactaaatttaatataacttcatcagaagataaaattagtctatctaaagttatgacaaaaatctctgttgatgatattacaattggaaaagtcatagaacttgcagaggaaagtggattaatttcaaaggatgacttatttactaattttattgaaagtaggggacattatttatggtcacgacttaagataatgccatttcaagaatatgtaaatagtattgcttatctcagagaatatgtatctgttataacgcagcataaggttaaaggtagtgaatatgataatgttttagttttattagataatggaaaatggaatcaatataattttgatagcctatttggtaaaggttcagttaatgagaatgtccaaaaaagaactaagaagttattctatgttgcaattactagagcaatgaaaaatttaattgtttacatgccgagtaatgatagtcagattattcaaaaagcacaagattattttgaaccaattgatattattgatgttttgtctttagttgatgagtaa

SEQ ID NO: 80784 - DNA, 1830 bp, Streptococcus suis; identical to SEQ ID NO: 80664

SEQ ID NO: 80785 - DNA, 1794 bp, Streptococcus suis; identical to SEQ ID NO: 72161

SEQ ID NO: 80786 - DNA, 1752 bp, Legionella pneumophila; identical to SEQ ID NO: 80706

SEQ ID NO: 80787 - DNA, 1749 bp, Legionella pneumophila; identical to SEQ ID NO: 80707

SEQ ID NO: 80788 - DNA, 2190 bp, Staphylococcus aureus; identical to SEQ ID NO: 71904

SEQ ID NO: 80789 - DNA, 1794 bp, Staphylococcus aureus; identical to SEQ ID NO: 71697

SEQ ID NO: 80790 - DNA, 1830 bp, Streptococcus suis; identical to SEQ ID NO: 80664

SEQ ID NO: 80791 - DNA, 1794 bp, Streptococcus suis; identical to SEQ ID NO: 72161

SEQ ID NO: 80792 - DNA, 2088 bp, Streptococcus suis; identical to SEQ ID NO: 71734

SEQ ID NO: 80793 - DNA, 1818 bp, Streptococcus suis; identical to SEQ ID NO: 71901

SEQ ID NO: 80794 - DNA, 1830 bp, Streptococcus suis; identical to SEQ ID NO: 80664

SEQ ID NO: 80795 - DNA, 1794 bp, Streptococcus suis; identical to SEQ ID NO: 72161

SEQ ID NO: 80796 - DNA, 2088 bp, Streptococcus suis; identical to SEQ ID NO: 71734

SEQ ID NO: 80797 - DNA, 1407 bp, Streptococcus suis; identical to SEQ ID NO: 80681

SEQ ID NO: 80798 - DNA, 1758 bp, Streptococcus pneumoniae; identical to SEQ ID NO: 72172

SEQ ID NO: 80799 - DNA, 1539 bp, Streptococcus pneumoniae; identical to SEQ ID NO: 72173

SEQ ID NO: 80800 - DNA, 1830 bp, Streptococcus suis; identical to SEQ ID NO: 80664

SEQ ID NO: 80801 - DNA, 1794 bp, Streptococcus suis; identical to SEQ ID NO: 72161

SEQ ID NO: 80802 - DNA, 2088 bp, Streptococcus suis; identical to SEQ ID NO: 71734

SEQ ID NO: 80803 - DNA, 1260 bp, Streptococcus suis; identical to SEQ ID NO: 80731

SEQ ID NO: 80804 - DNA, 2088 bp, Streptococcus suis; identical to SEQ ID NO: 71734

SEQ ID NO: 80805 - DNA, 1407 bp, Streptococcus suis; identical to SEQ ID NO: 80681

SEQ ID NO: 80806 - DNA, 2106 bp, Streptococcus suis
atgagaattgatgaaatttatattgatgggtaccgaaaatttaataaggggactattaatttagaacatggaaattttgctatcttagcaggtgcgaataatagtggaaaaacatctttgatacagttattagattttgtgtttaataattcatctagacgctcactaacttttaatgatttctctatagaattaaaggcttttctggataaaaaaattaaagaattgaatctttcctcagagtttgatgaagataaatttatgaattttatagagtgtattgataaaaaaataaaaataaaacttcaactgaaattatcttatgatctaggagaacctattggtttatttgcaaactatttaatggatttagaagatgatatgcataatttttattttgaatacaactatgggattaatactccaaaaatacggaaagagtttattgaacaaggtatcaaatcatctgaaacacttcaagagattattgaacggaataccgaaagtatttatttttatactgacaaagattttgataataagaagaatattgagtataaagaatttaaaaagttatttcattttgaatacatatctgcggatagagaactagatgatgaaaatcttaaaaataaaaagataactacgttaattctctcatcagctgattctacatgggataataaatttaatgacttaaaaaataaaatttctgataacttggatgactctaaaattgatttgagtgttcaagaagaaacacaaaaagttttagcaactttaaaagatagtctagataatgtatcaaaaaatgaaattgaagctttggaagcaaaattcaattttaatgaaaagaatttattgaaccttattaaagatagtttgttaattagctattcacataattcagctgattttgtattcagtctgactgaagaatctcaaggacttggagttagtaatttaatttatatcagtctccaaattgataaatttagcagggctatccaagaaaatccacataatagtgttaatctttttgtcatagaagaacctgaagcacatatgcatattcagatgcaaaaagtgctagttagctatattgaaactatttttagtaaaacggataatgttcagggaattattacaactcattctacggaaattgtaaaaaatgtagatgttaatgatataaaagtgattcgtccagaaaaaaattttatgaatcgtatagttgatttgcatctgtttcttgtcaaaaatggagataaagaattttatgaaacattttttaaattgaattttgcagatttaattttttcagatgctgttatcttctacgaaggagatgcagaacgaatgtactttgagaatttaattaataggaaacagttgaagtatgataatttggctcgtcagtatatcagttattgtcaatgtggaggagcatatgcccataaatattttccgctcttgaatgaattaggaatgaaggcatgtatttttaccgatattgattacggtaaagaacgggaagatataactgaaatagaacaagataaatctactaatgcaacactaaattcattattatctgatgctacaggggacataggtagcatatatcgacagcagaaacaaattagaagaaatagtatcgaaatttttacacagacctctaaagatgggtttgcgaggacgttagaagaagctattttttataaattaatcattccaaaatcaaattactctgaagtaaatatgaggaaatacagaggaaagttgatttcaggatggagtaatgttaaaagagttagaagaattatagaatcaaaaaaatataacatttcaatgaagaataaatatagaggtgtatttgttagacatagtaggaatttttgggaagaattaaaggacgaaacaaacttaaaattctcaatttcaaacaagaaagtattcatcagtatccgagatattgtgaagagtttaaacaaaacaaatttcatgtattctattattatgaacaacaaagtaatcgaagtattacctaactatattgaggagggattgtcatggctcgacaagaaagtaatttctacagagtga

SEQ ID NO: 80807 - DNA, 1980 bp, Streptococcus suis
atggctcgacaagaaagtaatttctacagagtgaatgctccagcgggtagtgggaaaacttattttataagtaagacgattaatgatattttaggtaaaaaaacatttgccaatattttatgtattacctatacgaatagggcttcagaggtaatgcgagagcggattatttcaccaaatgttgaaatatcgactattcatagttttttaaataattttttaaagccattctttagaaatgaaaaagttttaaattactattttgagttttataaaaaagaaattaaaaccattcttgactcaaagccagaattacttgaaaggtataaagaaggatttgacataaatggtgatgtttctgaagaaagaattaaagaaaatttaaaggaaatctattacaatgaacgtcaaaactcgttcgttttaactggagggctgtcacacgatgatttattgaatttttcgttcaagctagtagaaagatttcctaagattggttttaagttacgtgagatgtatagctatatttttattgatgaggttcaagataccggtgcggatattctgagattcttttataattctactaagaacagttcgacaaaagtatattttctcggggataagatgcaagagatttacaataagtacgacggttcattcgagagggaatatgcggaatttgacgattctatttctaaaacatttactaaaaattatcgttcttccaaagagatagttgacttgttaaataatctgtacatatcttctaataaagcggaacagacttctgctagaggtaacaaagggaggctacctcgtgtagtctttacagacgatattgaacaatacttatctgattatgttggagattacaaggagttttacaaattaagaacagtcaataagaaaagatttgaaaatatcaataatagtggaaaatcagctattgaaatctacgaaaagtatcaggaattatatcctaattatggccgtataagtgtaatggatgttttgactaacagtaactatgatgaaaaccctgatgaattaatgtcttttttaaacttgttatttcaagtattgaatgaatataataataaaaattatggtgaagtaattcgaatcttaaagagtgttagaaaaagcttaccttatggtaaattgatatcagtatttgatggaaatttattgaaaatagaatttcataaggataaggtaagtctgagagaaaaaatgaattccttcgttacattgttagaatctactcaaccattgggagttataattcaagaattggcggataaaaaaattatcagcagtgatttttataatttcatattcttatatgaaagaaatggtgaatttttatatacagatttattctgttactcaatcgaattatttaaattgattaatgaatataatagaaatcctatggtttcaactcagcatggggttaaaggagagggacatagaaagatactatttgtggcagaaaattcaagtaagccaggtatcgaaatatacgaatttctaaacctattcacaagtttttataggcgaaatattgaatttaattttgatgcttttcaagagttttattataatttcaatcatgatattgtactactggaagaaaaaatagggaaaaaaatgagtaaaattaaagcaagtgatagaaaggaatactttggtgattttcaaactatctataataggtatttagataatgaatattttaaatttatctgtttaaaggaaagtacatttacttttcaagagaaaactgcaattaaggatatgaaagttatttttaataataatttagttagatcaactttaacagcctataaacttttttatgttgggtgttctcgagcagaagaagaattggttgtattgattgatagtaataatattgaaaatatggaggagtttaaaaactgttttaaacatctaggatttacttatgattga

SEQ ID NO: 80808 - DNA, 2244 bp, Streptococcus suis
atgtatttaaaaagtttgtcaataaaaaattatagaaaatatggcgaagaagttcagacgattaactttgctcatagtaaatggccagaaatgttaggtgttgatgatgaatcgaaaaagataaatataacagaagagtatatatcaaaaagttcatcattaattgtaggaaaaaataattctggtaaaagtacaatagtaaaattattaaatactctccaaaataccaagtcaggtagtcgaaatatttttaagtatacagattttaatttaaaaatgttgtcagattggtatcaagagaatattgagagtaaatctgaagaagagataaaaaaacttgataagtttccgtttctggagtttcaactagtattaggaattgatgatgaaaatgatttgatttcaagttttgaagatatattaattttaggtggtatagaaacagttgaaactggcggaaatgaagaggttgcagaagtaaccatcaatattaaatatgaaattgctgatgctcagtcttttttagaagagctagtgaaacttaagaccagttattcagaggaagttcagcaggatgctaaattattgaactataaaaaggaagttcaatatcgacaatttttaggcttacttagtagtaattactttatattaaattgttatccgctaggaagagaggagcctgctaaagaattttctctatcttcattactaaaggtagagacaatagaagcaaatacggttaaaaatgacaagacactttcacaagcatacaataaaatagtttcaacttatataaaaaataatgatattgcagtaattgatagtttagttggtgatattaattatcgagtaaaggatatggttgatgccaatataaaggatattcttcaaagtgcagtatctagtattgagtcaactaagaatttacagatgaatttacatccagatgtaactttagaaaagatttttgcaaacagcattatatatgaataccaagagggaaataataatatacctgaaagccagtttggtatgggatatactaatttgatggtaattatcgcaaagattgttgactatattgagttatatagcgagaaggatattaatggttcagtaaacattctctgtattgaagaaccagagtcatttatgcatcctcagatgcaagaattatttataaagaatatttcaaaaacaattgctaccttactaggtaaaaaacaacaactagatacatttcaaattctcatcacaactcactcaacacatattttaaacagtaagattcaatcaggaaatacgcttaataatattagttatctaggtcaaacaggtgtaaataattttataaaaaacataagtgatgacgcaatagtatccggtatagatattgataagaaagcttatgaatatatcaaaaaatatttaaggctagaggtttcagatattttctttgctgatgcagttattttggttgagggagtttctgaagaaacttatcttagatatgaaattgatagacatccaatattgaaaaatcatcacattaaggtttatagaattgatggtgcatatgcccaccagtttattagtttgctagaattgttgaatattaaaacaattatttttacggatttggatttaaaaagaactgaggatgaaatgaaggtcgatataaaggataatgatgttcctgatattattccatctaatatttctgatttagcaggaaaatatgctattggagaaagttctttgactacaaatggtactcttcaatattttataaaaaaagaactatccgatgagaaagctaaatacagtaggataaacagcaagttaattgaaatgcttactgataaagaagaattgattgttgagtataaaaatgtttccgcacattctcaaggtaaaatcaatggatactatgctaccagctttgaagaagcaattattttaactaatgctgtaaacaacaatgatgagaatctaaataaaaaatctttaattaaacttttacagtatgtacatcctagaatgaaatattttggagatattgacgaaacatcggaaatcgctgacaaatcttatatgtatcaagttaaattgtctgatggaaaatccaaattttctacaggggtagtattcttatctataactgatgatacctttaatctcaaacttcctaaatatattgaatcaggtttagagtcgctttgtgattatttcaaggagtaa

SEQ ID NO: 80809 - DNA, 2019 bp, Streptococcus suis
atgacacatacgattagtccagaaaatagagaactagagttaggcattcagcaaaaaattaatgaatgtttagataattttgagagcttttgtttcaatgctggtgctggagctggaaaaacctatgcacttcaaaaatcaattgagcatattttgaagacgaagggagaaaatttaaagttaagtaatcaaaaaatcttatgtatcacttatactaatgctgcaaaagatgagattcttaatcgacttggcaaaaattcctcggcagtagtttctacaattcatgaatttctttggggatttattgcgattcagcaagaactactgactgaagaacataaaaataaaataaaaggtgaactcgaaaaaattgaacaaaaaataaatggaaattctctttctagcaatgtggaacagaatgaatttcgagagcgtatctgtgatgaagattttctaaaagtattttatagtgtacctagtagtcctgctaaaactttcaaagaagtgattaaaggttttgatgaatactttagtccatatctaagtagtgttaagagctttagagattttattaaggatattaataaaaagtataagcttggaattacactgaaggagattgaagataaaaaatctaaaaaagttatttataatcctgttcagaacagagataaacttgaaaattatgttattagccacgatacattattgctttactgtgagaatatcattacgagtcagaatttattaaagagattattttcagatagatatccatatgtattagttgatgagtatcaggatacggatgaaaaagttgtcaatattattgatagtataagagagtactcaaattctaagcagaactttgtggtaggtttttttggagactccttacaaaatatttacggttcaggagtgggtgttctgccaaataaagaagaatataagagtatagaaaaaatattcaatcgccgctcttctagtcaaatagtagagttgattgagaaaattaggaatgacaattttggtcaacaatctatatatactgattttaataatggttcttataatttttatgtcgcagatgataattttgacttagatatttttttacaggaaaatagcttgattaataatacagcctgtcttttaatgaaaaatgatgatatttcgaaggctcgaggatttgatgaactattatctgcattgaaaaagtttcctcgatttagtggaggtaactatgaaaatgtaaccaatgaatttttgcagaagaatttacagcagatgggatggtttttaagagatgttttaactttcatagactttattcaaaaatcatcagatcctaattcaactgttaaggaaattgttcagtttatagcatcgtctaaatcaacactaacatttggtaagatgaaacagtttattggtcgtttgagagaaatcagtttgtcaactttgacaattggtgaatgtattaatggaatagttaatattcaagaaccaatctcaggtgaagagattttaagaaaaatattctcgatagatgaaacctctgaaaacgttttattgactattaaaaataaagcgtatagttatttttactatgcccgagatttggaggaggactccgaaagtgaactgtcagttattgaagaattttttaggctagatgtttctcaatttatcaagtggtataaatatatttttgatgaccttaaagatgaggggattagctactatacattacatggttcaaaaggcttagaatttgataatgtagttgttgtgttacaggataattttgctaagaaaaaggattattgtaaatatttttttgaaaattatgataatcgaactgatgatgttaatcggtttaatgaaattcgtaatcttctttatgtagcatgttcaagagcaaaaataaatcttcatgtggtttatattgctgaaatacaagaaaacatattagcaaatattgagagtatttttggtaagatccaaaatttaatataa

SEQ ID NO: 80810 - DNA, 2070 bp, Streptococcus suis
atgaagttaacaaaagtaattattaataattttagatcattcggtgaaagtcaaattattgaattaaacaatcaaacagtactgattgggaataatagttcgggaaaaacaactgtattacaagcattgagtaagctgttttcggacaaacaaaatgatagaataattaaaaaaagtgattttcatcttccaaaaggttcaaggcccggagaaaatactagaaacctctttatagaaacaatttttgagtttgatgaacttgatggaactctctatagtctagcaattccatcgtttttcgaacactttacagtttctcaagatggtgccaaaccatttctacgaatcaggttagaatcttcttgggaagatgatggaacagttgaaggaagtgttgatactcaattctattatatttcatctgatgaagatactattagagatgaagacaaacatcgtgctcctagaaaggatttggataaaattagggtactttatgtacctgcttcaagaacgcctgagaaggagttaggtaatgcttcaggtagtatgttaagtaggctggtaaatagtataaattggaccgaaaatgagataaatgaaattacagataaaattgatgagttgaataacacctttttatctgaaaatggagcattaactcagatcaacaatgagattcagaaagcatgggaattatatcatgaagataaccgtttttctcaagcagagttgattattaattcttctgagatggcggcagcacttagacagattgccttaaaattttcaccaacaaccactgaagaagcatttacagtttcagatctaggagatggactgagatctattttttatttttcacttgttgattcgatacttgatattgagttagaaattaccaaagaccgtgaagaaaatcctgataatccaagatttaagttgattccaccagtactaactatcttagcaatagaagaaccagaaaatcatattgctccacatcacattggaaaactgataaaaaggtttaagcaattaggcaataatgacaactctcaagtaattttaacgtcacattctccagctattgtaaaaagaattgacccagaagatttgaggtatttaagaatagaaaataatgacagagttcttcaaaccattgtttctgatatacagctacctcaagctatagatgaatcttataaatatattaagggagcaattcaagcttatcctgaactatattttgcgaagttagtagttctaggtgaaggtgacagtgaggaactgctattaccaaagttttttgatttacttgggaaagaggtagatagctctcagatttcaattgtccctttagggggcagacatgtcaactatttttggaaattattgaatgctctcagaattcctcatattaccttgttggattttgataatgagagatacggaggcggttggggaagaataaaatatatttctgaatatttgtatgagttgaacacagagttccgagaatggttccatactcagggacttgatttcagtgagattggagaacgagagtttgaatcaatagatgcaccacgcctgaataattggtttaatagacttgaagaatttagtgtctacttctcttcaccgattgatattgacttcttgatgttacaacattataaggaacattacctggatatgttatcttcgaaagaaggaccagtcgtttcatatgctgattcaggtgggaatagtaaaaaagtaaaattaactgatttggattgtattgataaattgcagttagaaggtctcgaaaaacgtatagaagaagcaaagatagctactttaaaggataagagtggaccgggtgatagttttactagagaagagaaagaattaatgatttggtatcaatatttctttttaggtagaggaaagccaacaactcatatgcaatttttatcatcaattagtgatgatgaattaaatagaaacctacctcctgtgtttgaaaaaatggttagacgtgcggaagaattacttggagatattgactatggtgaagagtga

SEQ ID NO: 80811 - DNA, 1818 bp, Streptococcus suis
atggtgaagagtgacgattggtttcctaaaggagtcattaaattagaggatgctgctttagaagtagttaaagatgttactaactgtctagtcattgctggaccaggtgctggaaaaactgaattactggctcaaaagttagactatcttttttctacaaataaatgtatttctccaaaaaagattttagctttaagttttaaaacagatgctgctgcaaatttgaaagatagagtaaaaaaacgttatggtgatgaatatgcttctcgatttacctcattaacctattcggcttttgaaaagagaattttagaccaatttagagatgttctacctgaggatatacgaccatcaagagattatttgattgaagattgggatactataaaagaactactctctataaatggaattaatgttaatggacggagaatgtcagatataagaaattttgtcgaaaatattatacttaatgacgggaatactcacaaattaaaaaaggatttactaaaaggaacacaagataataagccggtcctcttgtataggcaaataacaaagttgagtactcaaataatagctactaacgaatacatccgtaaagcacttcaaatgacatacgattttgtatttctagatgaatttcaggatactacacatgcccagtataatttattaaaaacttgttttttaggttcgtcttgtaaattaacagcagttggagataataagcaagccattatgagatgggcaggtgcaaagcctgatatttttccagactatattcgagactttaattcaaatgaatatcaattgttgatgaatcaccgctctgtacctaaacttgtagaatttcaaaaagaggtttatcagatattaaatagtaatcacagatctattcagacaaataattatccagaatttcaagagggtgaaataacattatttgaatttgaaaatgaaagtttagaagctgagttaattgcaaatgatatagaatcaaaaatccaaggaggtatacgaccatcagaaatttgtatcctagcaaaacagaaggttgatgattatagttcaaaattgataactacattaagcagtaaagggattaaagcaagaattgaaaatgaatatcaagagcttttaaaagaccctacttgtaacctattattagatttaatatcatgcagtcaaggaaaacgagatcctttaatttgggaaaatattagtaatttttatggaaatatcaatggaatagctgagtttactgatgaattaattttagcaaaatcctataaggagattgacaatatagttagtgatattacttacctaatttcaaatgttattcccaatgaagaaagtatgctaaatttaattgattgtattattgaaaaaatagatgagaaaagaattatttccaacttttcaatatacaatggaaaaagtgacctagatatcattgtcaagaacttttcaaagttattatacaaagaatattctcaaacacaaggtgaatggctagatatagtatctagtttcaagggtgaaaactcaattccaattatgactatccataagagtaaaggattagaatatgaggcggtctattttctaggcttggaggattctgcattctggaattttaataatcaacctgaagaagataagagtgccttctttgtcgcactttcaagagcaaaaagttacctaatctttacatactgtaaattgagaaataataggtcgcaaaacaatagaaatattaatgaaatctattcattactgattcaatctagtttagttgatgttgttaattaa

SEQ ID NO: 80812 - DNA, 1830 bp, Streptococcus suis; identical to SEQ ID NO: 80664

SEQ ID NO: 80813 - DNA, 1794 bp, Streptococcus suis; identical to SEQ ID NO: 72161

SEQ ID NO: 80814 - DNA, 1758 bp, Streptococcus pneumoniae; identical to SEQ ID NO: 72172

SEQ ID NO: 80815 - DNA, 1539 bp, Streptococcus pneumoniae; identical to SEQ ID NO: 72173

SEQ ID NO: 80816 - DNA, 2088 bp, Streptococcus suis; identical to SEQ ID NO: 71734

SEQ ID NO: 80817 - DNA, 1407 bp, Streptococcus suis; identical to SEQ ID NO: 80681

SEQ ID NO: 80818 - DNA, 2088 bp, Streptococcus suis; identical to SEQ ID NO: 71734

SEQ ID NO: 80819 - DNA, 1818 bp, Streptococcus suis; identical to SEQ ID NO: 71901

SEQ ID NO: 80820 - DNA, 261 bp, Streptococcus suis
atggaatattctttagtatctcaattgaattcaaagagactatatatatcagagattgatttagaaaacgatttagctaaggtactgtccgaaagtgagagaaatggaatgaatgtatcagattttgtgaattggttacaaagtagtaagcagtataatatgttggaatatattgagggggaccttactccagaaattgcacacaaaattgtgaaatcagagtattttaaagttttagcggagtttttagactatgagtga

SEQ ID NO: 80821 - DNA, 1542 bp, Streptococcus suis
atgagtgatattactacacgagatgaaactatcaaaaaagagttattagagtatcaaggaaacattctaattttagctaacgcaggttcgggaaaaacaacttttttagctgaaaagctaaaaagcgattctaaaaaactagataattatcaaaaactagcagcgataactttcactcggaacgcaactgaagaaataaaacagaaattagttgaaattccagaaaatgttgttgtatctactattgattcatttttagataatgagattattctccctttccttgatcaaaggtataaagttgcaacgtcgttacagtttagttttcagcaagaatacaagtttaataatttcgacattggactaagtcaaataatgcaaaatggtatttttgctacttatgataatccgaccgctcggcaaggtaagaattttaaatgtgaagttgctttagatatactaaaaaatattgtgtctgcatcagagtatctaaagtataaattcaattcactttatatcgatgagtttcaggattgtgatcaatctatgaatgatttattcatgtatttaaaagatgaactgggaattcgattatttattgtaggagatgataaacaatcaatttatcaatggagaggggcttcgcctagatatattaaaaatttatgggaaaacgaaaatgatttaaaaaaagagaggtttattggtaattttaggagtttacctaaaattgtagatttttcattagctctaactccagaagtaaaaattgattctattaatgaaacaggttctattttatatatagagactaagcaatttgctttaaaagaagatgttatcagatctctggtagataatggtgatataaatttagatgaaaaaaattattttttaattggaaacaatcaacatattgaagaaactgtaacacaattaggtggaatattcccaaatgaatttgattatgtcagaaaaaatccttttatagagtgtaccaatggtcgttttttacaatctttagctcaatattattttcttgaaagtttttctgagtatgatgtgttgaacaatctttttcctgattataatgacgattttaggaaaggattattaaaaaaattgaaaatcttgcgtcaaaatcctgagcgattacttatcgaagatatagcgtcatatctaggtgtacccattacacaatttggtgataaattagaaagtcaaatattacttgaagttttaattgatgtagagaatagaatcttatttgatactagttcattgaaaaataacttattaatgacaacacataattcaaagggactagctgcagatacggtgataatttttgttgaatatttgattgacagatataaaaatacattaaagttcgaggaccattatgttgcaatcactagagcaaaatcaaaaataattcttattgataacaagacaaactatgttagcgaaataaatagattattatgcaacaataatggtaatttttcatttgataatttcatagaaagaaggaatttatga

SEQ ID NO: 80822 - DNA, 1758 bp, Streptococcus pneumoniae; identical to SEQ ID NO: 72172

SEQ ID NO: 80823 - DNA, 1539 bp, Streptococcus pneumoniae; identical to SEQ ID NO: 72173

SEQ ID NO: 80824 - DNA, 2088 bp, Streptococcus suis; identical to SEQ ID NO: 71734

SEQ ID NO: 80825 - DNA, 1407 bp, Streptococcus suis; identical to SEQ ID NO: 80681

SEQ ID NO: 80826 - DNA, 2070 bp, Streptococcus pneumoniae; identical to SEQ ID NO: 71808

SEQ ID NO: 80827 - DNA, 1818 bp, Streptococcus pneumoniae; identical to SEQ ID NO: 71809

SEQ ID NO: 80828 - DNA, 1830 bp, Streptococcus suis; identical to SEQ ID NO: 80664

SEQ ID NO: 80829 - DNA, 1794 bp, Streptococcus suis; identical to SEQ ID NO: 72161

SEQ ID NO: 80830 - DNA, 2106 bp, Streptococcus suis
atgagaattgatgaaatttatattgatgggtaccgaaaatttaataaggggactattaatttagaacatggaaattttgctatcttagcaggtgcgaataatagtggaaaaacatctttgatacagttattagattttgtgtttaataattcatctagacgctcactaacttttaatgatttctctatagaattaaaggcttttctggataaaaaaattaaagaattgaatctttcctcagagtttgatgaagataaatttatgaattttatagagtgtattgataaaaaaataaaaataaaacttcaactgaaattatcttatgatctaggagaacctattggtttatttgcaaactatttaatggatttagaagatgatatgcataatttttattttgaatacaactatgggattaatactccaaaaatacggaaagagtttattgaacaaggtatcaaatcatctgaaacacttcaagagattattgaacggaataccgaaagtatttatttttatactgacaaagattttaataataagaagaatattgagtataaagaatttaaaaagttatttcattttgaatacatatctgcggatagagaactagatgatgaaaatcttaaaaataaaaagataactacgttaattctctcatcagctgattctacatgggataataaatttaatgacttaaaaaataaaatttctgataacttggatgactctaaaattgatttgagtgttcaagaagaaacacaaaaagttttagcaactttaaaagatagtctagataatgtatcaaaaaatgaaattgaagctttggaagcaaaattcaattttaatgaaaagaatttattgaaccttattaaagatagtttgttaattagctattcacataattcagctgattttgtattcagtctgactgaagaatctcaaggacttggagttagtaatttaatttatatcagtctccaaattgataaatttagcagggctatccaagaaaatccacataatagtgttaatctttttgtcatagaagaacctgaagcacatatgcatattcagatgcaaaaagtgctagttagctatattgaaactatttttagtaaaacggataatgttcagggaattattacaactcattctacggaaattgtaaaaaatgtagatgttaatgatataaaagtgattcgtccagaaaaaaattttatgaatcgtatagttgatttgcatctgtttcttgtcaaaaatggagataaagaattttatgaaacattttttaaattgaattttgcagatttaattttttcagatgctgttatcttctacgaaggagatgcagaacgaatgtactttgagaatttaattaataggaaacagttgaagtatgataatttggctcgtcagtatatcagttattgtcaatgtggaggagcatatgcccataaatattttccgctcttgaatgaattaggaatgaaggcatgtatttttaccgatattgattacggtaaagaacgggaagatataactgaaatagaacaagataaatctactaatgcaacactaaattcattattatctgatgctacaggggacataggtagcatatatcgacagcagaaacaaattagaagaaatagtatcgaaatttttacacagacctctaaagatgggtttgcgaggacgttagaagaagctattttttataaattaatcattccaaaatcaaattactctgaagtaaatatgaggaaatacagaggaaagttgatttcaggatggagtaatgttaaaagagttagaagaattatagaatcaaaaaaatataacatttcaatgaagaataaatatagaggtgtatttgttagacatagtaggaatttttgggaagaattaaaggacgaaacaaacttaaaattctcaatttcaaacaagaaagtattcatcagtatccgagatattgtgaagagtttaaacaaaacaaatttcatgtattctattattatgaacaacaaagtaatcgaagtattacctaactatattgaggagggattgtcatggctcgacaagaaagtaatttctacagagtga

SEQ ID NO: 80831 - DNA, 1980 bp, Streptococcus suis; identical to SEQ ID NO: 80807

SEQ ID NO: 80832 - DNA, 1986 bp, Legionella pneumophila; identical to SEQ ID NO: 80738

SEQ ID NO: 80833 - DNA, 1857 bp, Legionella pneumophila; identical to SEQ ID NO: 80739

SEQ ID NO: 80834 - DNA, 1758 bp, Streptococcus pneumoniae; identical to SEQ ID NO: 76066

SEQ ID NO: 80835 - DNA, 1539 bp, Streptococcus pneumoniae; identical to SEQ ID NO: 72173

SEQ ID NO: 80836 - DNA, 1830 bp, Streptococcus suis; identical to SEQ ID NO: 80664

SEQ ID NO: 80837 - DNA, 1794 bp, Streptococcus suis; identical to SEQ ID NO: 72161

SEQ ID NO: 80838 - DNA, 1752 bp, Legionella pneumophila; identical to SEQ ID NO: 80706

SEQ ID NO: 80839 - DNA, 1749 bp, Legionella pneumophila; identical to SEQ ID NO: 80707

SEQ ID NO: 80840 - DNA, 2034 bp, Streptococcus suis; identical to SEQ ID NO: 80676

SEQ ID NO: 80841 - DNA, 1926 bp, Streptococcus suis; identical to SEQ ID NO: 80751

SEQ ID NO: 80842 - DNA, 1842 bp, Legionella pneumophila; identical to SEQ ID NO: 80178

SEQ ID NO: 80843 - DNA, 1812 bp, Legionella pneumophila; identical to SEQ ID NO: 80179

SEQ ID NO: 80844 - DNA, 2088 bp, Streptococcus suis
atgaaattaacaaaagtaattattaataattttagatcattcggtgatagtcaagttattggatttaacgatcaaactgtactgattggaaataatagttcgggaaaaacaactgtattacaagcattgagtaagctgttttcggataaacaaaatgatagaataattcggaaaagtgattttcatttaccaaagggattaagacctggcgaaaatagtaggaccctttttatagaaactatttttgagtttgatgaactggatggaactgcttacagtccagccattccatcatttttcgaacactttacagtttctcaaggtgatgcaaaaacttttctacgaatcagattagaatcttcctgggaagatgatggaacagttgaaggaagtattgatactcaaatttattatatttcatctgccgaagatattattaaagatgaagataagcaccgtgctcctagaaaggatttggataaaattagggtactctatgtacccgcttcaagaacgcctgagaaggagttgggaaatgcttcaggtagtatgttaagtaggctagtaaatagtataaattggaccgacgatgagataaaagaaattacaaacaaaattgatgagttgaataatacctttttatctgaaagcggagcattaacccaaatcaaccaagaaatccagaaatcgtggaaactatatcatgaagacaaccgtttttctcaggcagagttgactattaattcttctgagatggcgggagcccttagacaaattgctttaaaattttcaccgacaaccacagaagaagcgtttacagtttcagatttaggagatgggctgagatctattttttatttttcacttgttgattcgatacttgatattgagttagaaattactaaagaccgtgaagaaaatcctgataatccaagatttaagctgataccaccaatactgactatcttagctatagaggagccggaaaatcatattgctccacatcatattggaaaactgataaaaaggtttaaacaattaggcaataatgacaactctcaagtaattttaacttcacattctccagctattgtaaaaagaattgacccagaagatttgaggtatttaagaattgaaaataatgatagtgttcttcaaactattgtttctgatattcagttacctcaatcgattgatgagtcttataaatacattaagggagcaattcaagcctatcctgaactatattttgcgaagttagtagtactgggtgaaggtgatagtgaggaactgctattaccaaagttttttgatttacttggaaaagagattgatagctctcagatttcaattgtccctctagggggcagacatgttaactatttttggaaattattgaattcactcaaaattccttatattaccttattggattttgataatgaaagatacgggggtggttggggaagaataaaatatgctatccaacagttactagaaataggtattgagcgtagtgatttagtgacaatggaagatggtagaatattgaatgatgaagacattgctagaattagttctaatcagatatctgatatcttctcaaaaccattgtcatcctggataaaccatttagaaaaattcaatgttttcttttctgcaccacttgatattgatttcctaatgttacagcattataaggactattacctggggactttatctaccaatgaaggacctgtggtttcttatactgatgaaaataatgacaagaaaaaaataagattaactaaaatggacagaacaaatgattatcaattaattggttttaaaaatcgcataagtgaagctatacaagcaactctaaaagataagagtggacccggtgatagttttactgatgaagaaaaagaactaatgatttggtatcaatatttctttttaggtagaggcaaaccgacaactcatatgcaatttttatcatcaattagtgatgatgaattaaagagaaacctacctcctgtgtttgaaaaaatggttagacgtgcggaagaattacttggagatattgactatggtgaagagtga

SEQ ID NO: 80845 - DNA, 1818 bp, Streptococcus suis
atggtgaagagtgacgattggtttcctaaaggagtcattaaattagaggatgctgctttagaagtagttaaagatgttactaactgtctagttattgctggaccaggtgctggaaaaactgaattactggctcaaaagttagactatctattctctacaaataaatgcgtttctccgaaaaaaattctagcattaagtttcaaaacggatgctgcatcaaatttgaaagaaagagtaaagaaacgttatggtgatgaatatgcttctcgttttacctcattaacctattcggcttttgaaaagagaatcttagaccaatttagagatgttctacctgaggatatacgaccatcaagagattatttgattgaagattgggatactataaaagaactactctctataaatggaattaatgttaatggatggagaatgtcagatataagaaattttgtcgaaaatattatacttaatgacgggaatactcacaaattaaaaaaagatttactaaaaggaacacaagataataagccggtcctcttgtataggcaaataacaaagttgagtactcaaataatagctactaacgagtacatccgtaaagcacttcaaatgacatacgattttgtatttctagatgaatttcaggatacgacatctgcccagtatagtttattaaaaacttgttttttaggttcgtcttgtaaattaacagcagttggagataataagcaagccattatgagatgggcaggtgcaaaacctgatatttttccagactatattcgagactttaattcaaatgaatatcaattgttgttgaatcaccgctctgtacctaaacttgtagaatttcaaaaagaggttcatcagatattaaatagtaatcacagttctattcagacaaataattatccagaatttcaagagggtgaaataacattatttgaatttgaaaatgaaagtttagaagctgagttaattgcaaatgatatagaatcaaaaattcaagaaggtatacgaccatcagaaatttgtatcctagcaaaacagaaggttgatgattatagttcaaaattgataactacattaagcagtaaagggattaaagcaagaattgaaaatgaatatcaagagcttttaaaagaccctacttgtaacctattattagatttaatatcatgcagtcaaggaaaacgagatcctttaatttgggaaaatattagtaatttttatggaaatatcaatggaatagatgagtttactgatgaattaattttagcaaaatcctataaggagattgacaatatagttagtgatattacttacctaatttcaaattttattcccaatgaagaaagtatgctaaatttaattgattgtattattgaaaaaatagatgaaaaaagaattatttccaacttttcaacatacaatgggaaaagtgacctagatatcattgtcaagaacttttcaaagttattatacaaagaatattctcaaacacaaggtgaatggctagatatagtatctaatttcaagggtgaaaactcaattccaattatgactatccataagagtaaaggattagaatatgaagcagtctattttctaggcttggaggattctgcgttctggaattttaataatcaacctgaagaagataaaagtgcgttcttcgttgcactttcacgagcaaaaagtcacctaatcttcacatactgtaaattgagaaataatagggcacaaaacaatagaaatattaatgagatatattcattgctaacccagtctaacctagtaaaggttggtaattaa

SEQ ID NO: 80846 - DNA, 1830 bp, Streptococcus suis; identical to SEQ ID NO: 80664

SEQ ID NO: 80847 - DNA, 1794 bp, Streptococcus suis; identical to SEQ ID NO: 72161

SEQ ID NO: 80848 - DNA, 2034 bp, Streptococcus suis; identical to SEQ ID NO: 80676

SEQ ID NO: 80849 - DNA, 1926 bp, Streptococcus suis; identical to SEQ ID NO: 80751

SEQ ID NO: 80850 - DNA, 2034 bp, Streptococcus suis; identical to SEQ ID NO: 80676

SEQ ID NO: 80851 - DNA, 1926 bp, Streptococcus suis; identical to SEQ ID NO: 80751

SEQ ID NO: 80852 - DNA, 2088 bp, Streptococcus suis; identical to SEQ ID NO: 71734

SEQ ID NO: 80853 - DNA, 1818 bp, Streptococcus suis; identical to SEQ ID NO: 71901

SEQ ID NO: 80854 - DNA, 1512 bp, Streptococcus suis
atgaaattaacaaaagtaattattaataattttagatcattcggtgatagtcaagttattggatttaacgatcaaactgtactgattggaaataatagttcgggaaaaacaactgtattacaagcattgagtaagctgttttcggataaacaaaatgatagaataattcggaaaagtgattttcatttaccaaagggattaagacctggcgaaaatagtaggaccctttttatagaaactatttttgagtttgatgaactggatggaactgcttacagtccagccattccatcatttttcgaacactttacagtttctcaaggtgatgcaaaaacttttctacgaatcagattagaatcttcctgggaagatgatggaacagttgaaggaagtattgatactcaaatttattatatttcatctgccgaagatattattaaagatgaagataagcaccgtgctcctagaaaggatttggataaaattagggtactctatgtacccgcttcaagaacgcctgagaaggagttgggaaatgcttcaggtagtatgttaagtaggctagtaaatagtataaattggaccgacgatgagataaaagaaattacaaacaaaattgatgagttgaataatacctttttatctgaaagcggagcattaacccaaatcaaccaagaaatccagaaatcgtggaaactatatcatgaagacaaccgtttttctcaggcagagttgactattaattcttctgagatggcgggagcccttagacaaattgctttaaaattttcaccgacaaccacagaagaagcgtttacagtttcagatttaggagatgggctgagatctattttttatttttcacttgttgattcgatacttgatattgagttagaaattactaaagaccgtgaagaaaatcctgataatccaagatttaagctgataccaccaatactgactatcttagctatagaggagccggaaaatcatattgctccacatcatattggaaaactgataaaaaggtttaaacaattaggcaataatgacaactctcaagtaattttaacttcacattctccagctattgtaaaaagaattgacccagaagatttgaggtatttaagaattgaaaataatgacagtgttcttcaaactattgtttctgatatacagttacctcaatcgattgatgagtcttataaatacattaagggagcaattcaagcctatcctgaactatattttgcgaagttagtagtactgggtgaaggtgatagtgaggaactgctattaccaaagttttttgatttacttggaaaagagattgatagctctcagatttcaattgtccctctagggggcagacatgttaactatttttggaaattattgaattcactcaaaattccttatattaccttattggattttgataatgaaagatacggggggtggttggggaagaataaaatatgctatccaacagttactagaaataggtattga

SEQ ID NO: 80855 - DNA, 1818 bp, Streptococcus suis; identical to SEQ ID NO: 71901

SEQ ID NO: 80856 - DNA, 2088 bp, Streptococcus suis; identical to SEQ ID NO: 71734

SEQ ID NO: 80857 - DNA, 1407 bp, Streptococcus suis; identical to SEQ ID NO: 80681

SEQ ID NO: 80858 - DNA, 2088 bp, Streptococcus suis; identical to SEQ ID NO: 71734

SEQ ID NO: 80859 - DNA, 1527 bp, Streptococcus suis; identical to SEQ ID NO: 80685

SEQ ID NO: 80860 - DNA, 1758 bp, Streptococcus pneumoniae
atggaatttaaaaaactagtaattgaaaattttcgtaattttagttctattgaggttgctttatcaaataaaaatgttatatttggaatgaatgattcagggaaaacaaaccttctatttgcaataagatacctcttggacagaactatacgaaataaaggttttattaaatcggattatcatagacatgatactagtagacctataaaaatacaacttgagcttgatttgtctgatagaaaaatggagggggatgaagaatcactaaaatcttcacattctcgtcttctaatttcaacggtagctggagcaagaaataactctagcttagatacattctttatctcattagaagcagtttataatgagaaagagttatttggaaatccggtattaagctggggctcaacactagataatttagtggaagttcctcaatatggtacaagaagtgacattgataaaatattccaaatagtttatgtaaatcccgctatagagttagattccttttttaagcgaaatagaaggatattgttctctgatgattctaaaactgatgaggatgtaaagcttgaggaagagattgagaataacattgaaaaattaaatgaaaatatttctaacttacatttgattactagtgttcaatcacagttgactgaagcctataaaagttatcgtaaagaaaatttagaaattaaaattcgatcagagatatctatttcaggatatttagacaatctcacaccatacattaactggaatgatgatactcacaattatccgacgtcaggagacggtcgtaaaaagcttttatcatatgctattaaccatttaatttcagagaaacaatacaacaagaaggtaattatttatttaattgaggagccagagaatagcttacatcgttccgttcaaatctctctttcaaagcaactttttgttcagaatatttatgaatacttttttctaacgactcattcagcagaagttctttatgaaatggataatactcagctcattaagataaccaatcaacaagatgcaacagggcaatcagtctattacacagttcctaatgaattttcaaacttaaagaaaaaattaaataaatcgttggctcagtcaatcttttatgataggattcttttggtcgaaggtccatcagaatattatctattttctgctatttttgaatatgtaagtcccaatttcgaggctgatggaaaatacttattacaagttgatggaataaattttaaaccttattcagagctatataaggcattagggattgatttttggattaaaactgataatgatttaaaagctagtcgtggagataaacatgtattttctcctattggcttaaataggtgtattgacttgcttgatcatagcgcgactcctatattagataattatcgtatagatttctcttcaaaagatgagagaaaacagaatataaagtctaaaaaagaagaattatatttgactaatcataatctagtattacaattaaatgcagatggaatctttatatcggaaattgatttagaaaatgatttagctcaggttttatccgatagcgagagaaatgaaatgagtaaattagattttgtgaattggttacaaagcagtaaacaatacaatatgctagaatatataagtaatcatcttactaaagagattgcgcttaagattgtggaatcaggatattttaaagttttggcggagtttttagactatgagtga

SEQ ID NO: 80861 - DNA, 1539 bp, Streptococcus pneumoniae; identical to SEQ ID NO: 72173

SEQ ID NO: 80862 - DNA, 1830 bp, Streptococcus suis; identical to SEQ ID NO: 80664

SEQ ID NO: 80863 - DNA, 1794 bp, Streptococcus suis; identical to SEQ ID NO: 72161

SEQ ID NO: 80864 - DNA, 2088 bp, Streptococcus suis; identical to SEQ ID NO: 71734

SEQ ID NO: 80865 - DNA, 1818 bp, Streptococcus suis; identical to SEQ ID NO: 71901

SEQ ID NO: 80866 - DNA, 1794 bp, Acinetobacter baumannii; identical to SEQ ID NO: 71916

SEQ ID NO: 80867 - DNA, 1782 bp, Acinetobacter baumannii; identical to SEQ ID NO: 71827

SEQ ID NO: 80868 - DNA, 1968 bp, Rhizobium sp.
atgtttattgagcggctcagtctgacgaatttccgttgcttcggaccagtcgcgacaagcgtcgatctaacctccggcctcaccacctttgtcggcgtcaacggcgcgggcaagaccgccctgatgcaagccctgcagcgcctcttcggcgtgacgggcgatcagcgacgactgcggcgtcaggattttcacgtcccttccaccgagcttgtcgcgctactccagcgaaacttcgtcctagaggcaatcattgcctttccagaactagacgccgacggcgccggtggcgcggcaattccagaattctttcatcagatggcagctgaggaggcgggcaagctgaaatgccgcctgcgtctcgaagcgacctggaccgatgacggttcgctcgatggtgcgattgaacagaaatactgggcggtccggactttcggggcgttcaccgacgctgattgcaccgagttgaaagccgccgaccgggcgcggatccaaatgatctacgtgccggcgacgcgggacggcgcctcccaggtgacggcctttctgcgcggcaggctgtggcgcgccatcaactggtcgcagggagtccgcgacacgttcacaaacgccggcgccgccttgaacggcgctttcgccggggagccggccgtcgatgtgattgccgcagcggtaacgcggcggtggcaggaagtgtacacagccggaaccgacacgacgccggtcttccgcccgctcgatctgcgttttgagcatttcatccggaaggtagaggtggtcttccgccccgacgaggtcggccgggagcgagccctcgatgacctgagcgacggccagaggtcgctcttccatttggcgatgaccgcggcgacactggacgttgaagccgggatcgtcgccgatcctgctggggccggtttccaggctggcggcgtaccgttacccgcgctcacgctcatcgcgatcgaagagcccgagaacaatctcgctcccttctatctctcccgcatcgtccggcagatacaggacctgacgaagtcgccgcaggcgcaggccgttgtctccagccattccccaagcatcctcgcccgggtggatccgacgcaggtccggcacttccggctcgatccgcacgatcgaacggcccgcatccgcccgatcaacctccccgtcggcgaggaagaggcatcgaaattcattcgcgaggccgtgcggacctatcccgaactctatttcgcgcgcttcgtcgtgctgggagaaggtgcgtccgaggaggtcgttcttccccgtctcgccgaggcgatggggctcgacatcgatcgatcctttgtcgcggtcgttccgctgggcggtcggcatgtgaaccacctctggcgactgctgaccgatctcgacatcccctacgccaccttgctggatctcgaccggggccgttctgggggtgggtggggacgtataaaaacggcctgcacgcaactgctcgcaaacaacgtcacgccacaggccatcttcggacagcatcttaacccccaagggccagccgccaatctggcggctttcgatgctctgccgatcgaggacactgcgaatatcacaaattggatgaattggctgcgccagttcaatgtcttcttctgcacgcccctcgacctcgactactcgatgctgaaggctctcccgctcgcctatcagatcatcgaacccggccgccaggggccctcgcctgcaggggagccgcgcacggcggttctcggcgacgacggtctgcctcacctgtacgctgccgaccaggacgttttgatgcgctggtatcgttatctgttcctggggcgcggcaagcccagcacccacgttcgggtgttgagtgcacaagacccggctgccctcgcggccaccgctcccgaagaactgcgcgcactcctgacctcaattgtcgctcgtcttacccctcctcctcccgcaggtgcctga

SEQ ID NO: 80869 - DNA, 1884 bp, Rhizobium sp.
atgcgccttattcggccagaggactggcgccccagcggcattaacgatctcgaaccggcagcgtggaatgccctgcgccacgtcggctcggcgtgcgtggtcgcaggccccggcgccggcaagaccgagtttctggcccaacgcgccgactatctgcttgaaacgggcctctgccgagcgccgcaccgcgtgctagcgatttcgttcaaaacggatgcagccaacaatctcgcgtcgcgcgtccgccagcggtgcccgccagagttcgccaaccggttcgtgtcggtaaccttcgacgccttcaccaaaagtctggtcgatcgctttctcaacgccatcctcgccgaatggcgcccgacccggccttacgaaatcgccttcccaaagcgcaagacgatagaaggcttcctcacgcttgcccggctcggtgcgccgccggaatggcaggcggaaatcgccggctacagtgcgggcgattttgaagccaagattgtcggcggctaccgcctgccgatggggcctatcgcgccccaaaacgccgccgagttcaccatcgcccgctggtggtcgacgcaactacctccaggacagccttcttcactcaccttcgtcggcatcaaccgactcgcggagcagctactccgggccaatccccacatccgccgggcgctcgtcgccacctatcccttcgtgttcgtggacgaattccaggacacgacctacgcgcaatacgacttcctgcattcggcgttctctggcgggcaaaccatcatcaccggcgtcggtgacgacaagcagcggatcatggtcttcgccggcgcgcgtcaggacgcctttcagcggctgcaggccgatttcggcggagcaaggttccccctccttttcaacttccgttcctcgccggacctggtcgcgatccagcatatcgtcgcgcgcgcgctcgatccgaacaccgtccccacggtcgctcagaccgcccgtcaggtcgatggcgacgtggctcaggtttggtccagccagaccattgcggcggaagccgcccacctggcgcaatggatcgccaatgacattgccacccgcggccgggcgccgcgcgactacgcgctcctcgtgaaacagaagtccgatgattatgagcgcgaactcgctggagccttcgccgttcatggcctgcggattcgcaatgagagccattctctcggcaaaacctctcttcaggatttgttatctgatgacctgagccggctcgcgattgcaatcttccgccttggcgcgacccgccgcgcaccggcagcctggcagttggtctcctcttccgtccaggtgctgcgcgctatcgggcaggaggatgacgcgcgcgcggccactgtcgaggcggagctcaccgcattcctcgcggccctccgcaccgacatggcggccaccgccccgtcgcagcagagcgccctcgacttcgccacacgggttttcgactatctggatctcgatgcaatcgcccgcacctatgctgaatacggcgttggcgagcagcttgagatcatccttgaagctttttgcatccacttcttcgcttgcgtcaacggtgcggtgacctggacggcgtgcctcgacgcgttcgagggcgtcggtcaggttccgatgatgactgtccataagagcaaggggctcgaatacgacaccatcatcttcgtcggcctcgatgaccgggcttggtgggcccacacccccggcgaccccgaaggcgtcgctgcgtttttcgtcgccctctcgcgggcgaaacagcgcgccatcttcgccttctgctatcaacgcggaaaccgaaacaatgtggctgagctctatcagcttctgactgatgcgggcgtgccggaaatcgcaatatga

SEQ ID NO: 80870 - DNA, 2190 bp, Staphylococcus aureus; identical to SEQ ID NO: 71904

SEQ ID NO: 80871 - DNA, 1794 bp, Staphylococcus aureus; identical to SEQ ID NO: 71697

SEQ ID NO: 80872 - protein, 419 aa, Bacillus cereus m1293
MFKVRTLDIQRINGIKDLFIEFNPGLNFICGPNGIGKTTILNCISSAFHRSGLSSGIFPHNNAKYGEFNIGVEDHLFSKSACFYVGEHRENIFSLEYQKTKNMHRHINDYRGNCINFNIRSRAFEYSLQMVGERFNHIKSWLYTNYYKDEMDLHKFYNLQLVQECFNLLDPNISFGRITETVVTDRHPLSRHAMYKGKIGVNVNSILKHGRGYTVRPKNLDMFVNTSHGEVLVECLSSGYKSSLTVLLGVIRGIESSSTTGLVDEFNGIIIIDEIDLHLHPQWQAKLVDAIRKLVPKAQVICTTHSPHIIQVAKPEEVIALGEDVNGNIFVKEIPAPSEYGFQGWTIEEILTDVMGLAQTMSSLFVDSLEKFNVALRRGDREKLMHEYKKLRKMLHPKNPLATLLSVQAGELMIWEDFK

SEQ ID NO: 80873 - protein, 192 aa, Bacillus cereus m1293
MEVEHFHPKSLYPDEVVLWGNLFPICSRCNKAKNDYDTLINPIINPCLHNPKAHLYFEHFNIFGKDSSPLGVLTEKVLNLNDMVQVVTPRFRVGMLVIQKLKEIAQMVERYDKQSALVGDDYDIINRTKALLQHATPKMEYSATVATVIISSSFYGKMKEQMITKDLWNADLEQLDEIAKGISLEVRIPAIT

SEQ ID NO: 80874 - protein, 540 aa, Vibrio cholerae O1 biovar El Tor str. N16961
MNEPTRIPKYVKDKIRQAKQGDLYSSFTVSEYYYDGEVLERDIEQSELYLRNVSRIINNAKIRLRNISLYDYKKFSKLKFTSSEKNTTIIIGNNGSGKSTILESISKCLQFLSDNIRIQNNNNYKFQDSEINIHSISGQTIVRCILEIENDFSFSCSLTKNRENISRKVSSELEEFKALARMYQRSNELDNNTLSYPLLAYYPVERSVTLKRDDAVKYYERKKAKYSDKSEGLKNAFDGTSNFNDFFSWYKEIDDIINEFKANDSITKEEIEYLLSKTDNKEKIGSLISQLLEKKNNYNNNEDREFLIRQQKVIQESIKTFVSDIDQVKISRTPHLDMTVIKNGSEISIFNLSQGEKTLIALVSDIARRLVILNPSLENPLNGYGIVLIDEIDLHLHPKWQQTIVQKLENTFPNIQFILSTHSPLVLTTVTSEQIKIINELDYRFKLLSPTSNPFGKNASDALAIMETSESPLVHSEEILALIKKYESLVKRGQEDCRKTKEIKKRIESTGYTFDIADIEMWRFIAENREFFIDKSESDD

SEQ ID NO: 80875 - protein, 205 aa, Vibrio cholerae O1 biovar El Tor str. N16961
MIPLSHNNTPTELENYVKLKGQSLTIQDFSAHDFQGVKKIVRDRLHTLQGELCVYCEKKYSVDEMQVEHIKPKSGRNAQPNLCFTYSNYAVSCIQENRKTQTCGQKKKDNILFIEPTSPSCNSHFSLDTDGFINPRGFKNRKEKHSIQTTIDMLGLNKPHLQLERKKQIERLIYILKATKHNRHELTNKFIKSGNFKYILRELTM

SEQ ID NO: 80876 - protein, 443 aa, Sinorhizobium meliloti 1021
MTALRLDKLSLTNFRCFAHCEIAFHPGLTVLVAENGSGKTAVLDAARAALSVFVNAIYPPEKSLRIERSDVRLIPGQERRMSPCLPTEYEAQATVQGEAVTWKSSIRTYGDKVRPDFRHLGLMKAAAQPFLSDMTVLPLIAYYGTDRLWSERRQTEYRRSSLTNVGERVAGYADCLTSSSSFKGVSAWFEHRFRQTASPSFRESLQTNLAMIEGLKRATDTVLHPTGWSSLRWDDELHTLTAKHEERGELPLSLLSDGVRTMLALVADVARRCASLNPQLSDRAAIGTPGVLIVDEVDMHLHPRWQQQVLGLLQSAFPALQIIVSTHSPHVLSTVDKSSIRVLHVGNGDVVIETPLIQTKGVESADVLATVMDVDPVPQLAESSALSAYRKLIEAGKAEGQEASDLRQRLIAHYGESHPVMLEADRLIRFQRFRLAKSRPEGA

SEQ ID NO: 80877 - protein, 215 aa, Sinorhizobium meliloti 1021
MRKLDRVVCPTPPCLDGYQQGAHSWDDVTPDHRAEIRTHLEEMQGRRCAYCEGDIDTLGQHIEHFRRKGDPAYRHLTFDWSNLFWSCHQEDTCGRFKDNRAGAFNASDLIDPCADDPDSFFIFQVDGTISIRHGLSPTDQHRAKETLRVFSLDAEWGRLRAMRKIAVSGYVDDADSAFNEGWPPEDIRAYFAEELEYARLLPFCTAIRHVLTERQ

SEQ ID NO: 80878 - protein, 445 aa, Xanthomonas axonopodis pv. citri str. 306
MERVIEIYHDGVLLRLVDEAEVGVRDNTYTVVVGENGVGKSRLLSDIARVRISDYNLMAAWRIDAPVFPVVIAASTSPFDKFPAPPRRLAKAQKNYRYVGMRGEGMYGASSAVSLLSSAARGLLSKLSETPPSLNLLEVLDSLKFSPVFNFVLKPQFERSRENETSSRYRGDRSSFTSGAYRYSFDTRVASILEATDSLQAVLRDLDIASSLMDAPGALRLTVDFRSSVATLGGTVIESSHLGAILRLFEENLLRLMDVEVEKYGRQPFSLKRASSGEQCLLVLMLGVAGHIQDHSLILIDEPEISLHPEWQERFMALLQSAFSHYSGCQFVIATHSPQIISRLSGPGSFICHLRKRKLYPASQFQRRSADFQLAELFDAPGMMNEYISRVCFNLIAQVRVGRPFTPQMKSEIDWLFDVRSKLDPSDKLIALIDSLSALLKEGRS

SEQ ID NO: 80879 - protein, 193 aa, Xanthomonas axonopodis pv. citri str. 306
MIDEPVVFSADALNRIATARAHPAYDHTMWSDATLEPVRVEVRDHYRRVQRLACAYCLNLLSIRSAMGSPVEHIAPKAMYLGYMFEPLNLCVCCPDCNEYKSNREVHVDPPIKGYLPVAYPNDPEKFRIVHPHFDEYSQHIRRAGILYIPLSEKGSYTFYVCHLGRYLSELGMTEELFNDLNAVMQRHRFHEG

SEQ ID NO: 80880 - protein, 445 aa, Porphyromonas gingivalis W83
MISRIHIEEFRDIGDLELFFLPGVNLLIGDNGSGKTSVLKACQYVLGTFFCGFKMDHTPTWTQLTPEAKDFRRRVSSDGDELMKHPIKFNFDLRYEENGQNPIELTDQILTKRNTLGRALTTTFQDHQDYTKGLLEGYATDEGRYRPLPVFVFYSVEDIHTKRKVSHSLFQKYRHMASFGYYHALTENAFLDFWIKRMLILREEEQAGNHELAVVRGALLSALGTDGAGVLQDLSIRINKKAVYWKLLDGREISSEHLPDGLRRVISIVVDLAFRCALLNQTLYQSDSALKSEGTVLIDEIDLHLHPRLQASILKGLRKAFPRLQFIITSHAPMVMSSVDADDKYNIVYKMSYNQEMSQYEALKQSTYGLDVSTIMRMILGLAPRDKQVDERLTHLFDLIDLEKYSEATIALQSLQDQFDDSLPELSKASVMLHFLSSEQNEENH

SEQ ID NO: 80881 - protein, 199 aa, Porphyromonas gingivalis W83
MRKIIKGREPDAWLKYRCTPGAVYQRKPALADSLLLEQGYVCAYCEKRIDVQDLRVEHIKPRSQYPAQQLSYSNMVACCSGQSQGSAHCDCSKKDEEITLNLFTDALFLSISYKHDGTISSANKSWNDDINITLNLNCLSLKENRKLALEGLLEIIKKEDYSQGVLKRLKARYEAKDKGHKFAEYRGIILYYIDKKLSP

SEQ ID NO: 80882 - protein, 422 aa, Pseudomonas syringae pv. tomato str. DC3000
MRLDHLRLQNFRCYEDAHFDFQPGFNLVVGVNGSGKTSLLLGVAECLIPYGNAMGQGQEILSKEDVRFVIDRHEGRSRFERKFPVFIRADGDIFDLPNWRAVRLLEPWEGGVDPSSLSHLSAVLARNNAGEQIDFPVLAFYRANRRWSSARISAEFAAQQRTSRFDGYANWFDAVADLRDFESWLIARTLERLQDRLDSTPTVEREDELEWVNRAIRLAIPDAHDLRYDLRLQSLLVDMGEGNAVPFHELSDGQRSLIALIADIARRMCVLNPHIGKDVLANTGGIVIIDELDIHLHPAWQRNIAPTLKKAFPKVQFIATSHSPQVIGSLQPGEVILLKNGDSSHPRATYGLDSSTILEEVMGVPQREPEIEVLLDELFSTLENNELEKARLQLDALKKKAPDLPEFAGAEALLKRKELIGR

SEQ ID NO: 80883 - protein, 214 aa, Pseudomonas syringae pv. tomato str. DC3000
MRRIIKGTEPASFTEWKASANEDWMPTYPTLQNPQKRELHNSLLQEQHSSCCHCGREIELESSHIEHFKPQEHYLPLALEYSNLHASCLRETKPGNPLHCGHHKSNWFDETLHISPLADDCEQRFRYLLTGKIQNTESADLPAATMIEKLALDIAYLTRRRQEAITGIFDDQFILSASEAELTHLVQSLRSGDAGKQVAFGHVVARYAEQLLAS

SEQ ID NO: 80884 - protein, 390 aa, Nostoc sp. PCC 7120
MLDYLQPNAVMRLLLDIAWWVMTTNWVEQPAYPQQVRGENPQITGIVSNKKDIREYQSYFDFSEQKWRSLQMPPLLKEVVIYVRVDGSFSVFDPARQRDIAYNFNPNTLWNGLKSKNKVLCNGLIQDWVTWQNQPNKYPFQLFSNVIKKLAPHPSEWIEVGEPTRVSIEDVRDIPTVNLPYGNVPVTQTSAGMKRILGLAYLLVWTWYEHKKAAELRQQKPVNQIVLLIDEIESHLHPRWQRVILPAILAVVKELQPRMKIQALVTTHSPLVLASLEPNFNEQEDQLFLFKLQDREVSLDEVPWSKQGDTVGWLTSEIFGLKQARSKEAEIAIEAAEAWMRNDDMNAFPEHLRRPTQIHQELQRVLPGHDPFWPRWIVTTEKRNFGLSEV

SEQ ID NO: 80885 - protein, 112 aa, Nostoc sp. PCC 7120
MMPFNPPPEPRNFDEKVRQPGNAWLEKNPDPKKGTRDYWSPFKSSLADGFNNLCGYSVMYEPVGTVDHYRSRENYRNLAYEWSNLRFASAWINSSKGTLDDQVLDPFDLGED

SEQ ID NO: 80886 - protein, 709 aa, Bacteroides fragilis YCH46
MIKIEKGKAPEFLSSEKVEIARERMRTFYASNREQKRYLFPFNKEIDIKLKEDLHKIFYGKCGYCETIIESPEKGVIDRYRPHNGVRDKDGYNQDLYWWLTFEWDNLIYSCKECNQYKANYFPIQGVRALKVKDNLDQEKRLLLNPCVDDPQEHFYYNHDGHIQIKTREGEQTVNLLRLNDRTDLIEGRKKARKEIITILEKINKNGVRSIDKNEISYLQRILEYDNDSTAFFGYKKWVLLNELGDNLLLDLEFNIKNHDREWLNDRDQNNKKVIKNEDKRYLANDYFPIEYIHIKNFKSIENLKIEFKEDELNNKSWLILLGENGVGKSSILQAIAVGLNANAKIITSTLIKSLIKKRKQKAEIEIKERNSSNIIRTILTRKDNTIKQEGSFNSYLMGYGSLRLSVEEVDSESIKIQDTNNVSYENLFQPIKPLNDITKWLKSIYRKDPVFFERVAYSIKQLLPHDFSCNELTIKDNDIMFKKSEELFSELSDGFKSTIILAVDIMMKLSDAQSDMDKMTGIILIDELGNQLHPRWQMSIVKQLRTVFPNINFIISTHHPLCLRGAKRDEILLLKNIEGEVIGIRQLPDPSTLRVDQILASEFFGLSSLVDPETEAYFNRYYELLAKDEKASVEDQEEITRLRDKLRDKQQLGISLREELMYSVIDKLLAKEIAYNKNPLDRENLKREVINRVKDIWTNLNLDYYDND

SEQ ID NO: 80887 - protein, 315 aa, Bacteroides fragilis YCH46
MITINRIDCPDILKQGKNPKSKGELETIDALKFFSDQNNHTSTYRKTGTTTVGYKIYSDDSVRKVLLNMFNGKCAYCESKITSIYNGDIEHFRPKGEIKEATPTKPGYYWLAAEWENLLFACPFCNQTNTHTIVANGILKETVLGKLHQFPLVSEQYRLKYTHGQIYFSDRNAYQQAFELEETERLLLNPCKDLNIENYFKYKDSGVIIVNSDLTEQRNILRAEKSIQVYALNRLALVQARREKIIQIKAQIKRTEESIINYNRYAKQSDEEKIWFEGIMRKEIKILKRYKNTNQEYSGLAKYIIRKYFEEIYFI

SEQ ID NO: 80888 - protein, 457 aa, Microcystis aeruginosa NIES-843
MEIQRVILNNIGLFEKLEISLAPTEQNPSNITVFVGNNGAGKTAILKALATSLSWFTARLLTEKGSGNPISEDAIFNTANAGSIEIEVWDSSKSLNNPDQSDIDHYFRWILAKNRKGRKAQYNSNLNDCTRLANRYRDALTHDDKTSLPLIAFYPVERVVLDIPLKIRTKHTFLQLDGYDNSLSQGVDFRRFFEWFREREDTENESGVPEDVLNQLRPIMAETNQDVWQWLNERNASAKDRQLTAVRTAIGRFMPHLDNLRVRRKPRLYMAVDKNGETLNVAQLSQGEKSLMALVGDIARRLAMLNPALENPLAGDGIVLIDEVDLHLHPSWQRRLCERLTETFPNCQFVLTTHSPLVISDCKNVLIYTLANGELRQLPSQYGQDANTVLLDVMNTSIRNEKIDTELNDLLDAIQDSKLTEAQQLLAELSEELPANHLELVKAKLLLRKQELRHGNH

SEQ ID NO: 80889 - protein, 214 aa, Microcystis aeruginosa NIES-843
MRTISKGAEPCCLKAWKRKNPHGAYDDLDKTEEGKVVRAKIRDYALNEQFYLCAYCCQRIEKINACHNEHIEAQKLNPKRTLDFSNIVASCNTPNQCGDAHKSQHLPLTPLMTECETELRFKISGRVEGLSDRAAVTIRVLNLGDHEKNNRALIETRKQLSNVLLWENGINPDDGLEDDEILNILIDDLSQPQQDQMEPFTPVVINILRSWLQA

SEQ ID NO: 80890 - protein, 426 aa, Microcystis aeruginosa NIES-843
MRIKSIKLDNYRGVVSLNIDFHRQLNVFIGVNGAGKSTILDSLAIMLSWLVNRLKNTNASGRKISETEINNGQGTAIIEITGLTEDSQEITWKIVKTRTGYIHAGERSNFSQLNEYTQQIQRQITEHQGQINLPLFVYYSVNRAVVDIPLKIKTKHQFDSLSAYENALTSGSDFRTFFEWFREREDLENENRKYQDYLIKPEGFCFPDPQLEAVRETIERFLPDFTNLSVRRNPLRMEVTKKNEIVTVNQLSDGEKCLIAMLGDLARRMAIANPQNPDPLTGNGVIIIDEIDLHLHPQWQRFVVPKLLEVFPNCHFFISTHSPNIITHVQPESLHFMEQTEMGIKVHTVQESYGKNVDRILEDLMGLETTRPKEIAEALKDIYEQISQNQLEAAKNKINDLRAKIQDDPELIKAEVIIRRKEIIGK

SEQ ID NO: 80891 - protein, 167 aa, Microcystis aeruginosa NIES-843
MTEQGEICCYCESRLVYGECHIEHFKPQSDPTVDPLDYANLLCSCQANLTPSEPRHCGNLKNNWFDENLLISPLNPDCESHFAFNYDGTIKPAQEDDQKAINTIEKLGLNLNKLKALRKAAIDPFLDEEIDNAQLKVFVNGYLCLDDQQRYTPFWTTIKYLFSDLIE

SEQ ID NO: 80892 - protein, 474 aa, Microcystis aeruginosa NIES-843
MWPNKLEFYRSLLFSGGMSMWVESITLENIKCFQNQEIKFIRNPNNQRHWRAKPYHWITLLGENGVGKSTILQALALLLAGPEAAKELLPRPTGWICNPKTPGKLTAVLHQEDGDAGKFGTDKTRKTFAYSYFVTGKERLELGGSKDKQTYTEPALIEENSKILGWLRANAFASDSHGWFAVGYGAFRRLTRVSQVIIPSLEPPQRSSNFFSQFNEDTSLSSFERWMVYLDYRIAKNPQDIQAKQMKKIGEEAITKLLPGNVEIAEVTADGLIQFLVNGQKVPTISLSDGFRSMIALAGDLIWRLLQSFPNLDNPTEASGVVLIDELDIHLHPSWQREIAGWLQEVFPNLQFFVATHSPLIAAGAGPNSLTLRIDLVAGELEIVEIPYLELAANVDRTLTSSAFGLKSTYPTDTENKIKRYHQLNRKNKNLAAEEKQEYEQLSLFVREVKPFGEISQPNSLESRIDALLEERLS

SEQ ID NO: 80893 - protein, 173 aa, Microcystis aeruginosa NIES-843
MFNGKCAYCESKIIVVTYGAIEHFYPKSQYPDLTFTWENLLLSCDKCNDANHKGTNFPLDDITGNPLLIDPTDGVTDPNTHIEFVWDEMAKLASVYGRDRRGQIVEDLFDLNGMRGRKELINYRSQYIKRLLALLRLAKQGDSEALSLLQEACQSGAEYYAFASIYILPHLPP

SEQ ID NO: 80894 - protein, 446 aa, Azospirillum sp. B510
MLRSLKTTNIGPAPLFEMELGERMTVLTGDNGLGKTLLLDVAWWVCARDWPDGPAIPNRFILPIADRDAKRKRVGESTITAVTCGRSGKDIPQEFSFDPTIADWRRKARTRPPIPGLVIYARLDGGFSVWDPARHYYRVAPSQGIDDPDRAPAFHFTKDEVWNGKRVPDAFKGEVTVCEGLERDWLEWEKREPALFDTFIAVLAHLSPPGETMRPASSPVRMPGPDVSSIPALQTPYGIVPLRHASAAIRRILALAYFLVWTWHQHDLQSEVIGSHRERRIILILDEIEAHLHPKWQRRILPSLLTVAELLDKKVTVQILVSTHSTLVLASLEPEFDEKRDRLSHLQLVKGEAQLNPEIWQRRGEVGRWLTSDIFALDEARSLDAEQAINEATALMRSRTRTKGVRPPDADIKRIDGLLARLLPSMDPVWAEWVLFKRSLSGEKAD

SEQ ID NO: 80895 - protein, 203 aa, Azospirillum sp. B510
MRRFTPKEEPDGFRKEVRDRGNAWLARNPDKKASQYPDYWNEYRLAVQDAFDGCCAYMGFSIALGQVDHFIAKDVNSAYTYEWLNYRYAEPRVNLLKKKKAFLDPFKAEPGWLDIDPITLEYIIGPTLPPPMRAVAEDMLSVLNDKELVVGRRYMLRWYRSEDGSWDLNKLQGLFPLLADAVKRLQVANPAPTAASRSQAPAD

SEQ ID NO: 80896 - protein, 413 aa, Pectobacterium atrosepticum SCRI1043
MNFEKEINAKYFLGRVKQAHYNTSVVILGQNGEGKSRLLVDIIGYAKDNNYTNVIAVSTSPFDKFPIRKKFNGIDYSYVGVKGGTTGNSILSLIGSASLGLLNKNKFNDIYVERILSFLGASSEVEYVFKVNQKIFQKQNYSDDKNGPDIHHYHHNGFFGKDLHFSDDELYNINKAIDLLIYLVDSNKNFKVRLKIGSEGYIKTKDLYIDNLNSKLLTLLDNDIIRLIDFRIEKKEFGWMSLRLASSGEQCILLSMLGIATNITDNSLILIDEPEISLHPEWQERYISLLIRIFERYNSCLFIIATHSPQIVSKLDAYRSYIYTIKNDELVSASEYVKRSSDFQLANLFLAPGYKNEYLTRELITFLTSPQEYYADKGDAEIMKIISLRDNLDKDDPVFKLIELARKVITEIQ

SEQ ID NO: 80897 - protein, 232 aa, Pectobacterium atrosepticum SCRI1043
MPLNCIVYEGDDLETYQDYNALPDDNKDGRIWDSEERSICRIKKSIKDYYIIAQDYTCPYCKQRIEVDHNGAWDAEHIIPKSSHPGFVFEPLNLCVSCKDCNNEKRNKPVLENNNRRRLPIRSGDYIIVHPHFDDYEEHIKVIEVAGYYIPRTDKGRKTIEKCGLLRFAYKYANYGGTSQENKETILTLANGLLDANTPADEHAFLGVISDAVETGKKISKTAFLEQFCARE

SEQ ID NO: 80898 - protein, 470 aa, Vibrio fischeri ES114
MGFRVKKVRDHVLWNKEDDERNAFTVIIGNNGCGKTELLIDTCNKYHSYYTSALLEKDTHVASAVHYLREDFSPHNWKTVEREYGHRLPRKLIAASTSQFEKFKANWIVRNDAVPSGFYAYIGSKPYMPSLSPSTRIASKAIQQLLGAEYFEKRKHKALVGFLSKFDFGQKLLLKFELTFPNEDLKNIQNQSSTEPETQLILKNAYIEHDEMELVELLSYCERIVEAPAFALTVGNQNLNLIHLKDSEQKPFSKLIISRMLRAGLITLSSIQTMKDKSLINDQSIVDIESSAISSLSKRSSGEQCLFLLFMGIISSIEDNALICIDEPEISLHPQWQERFVDILSESFSSYRGCHFLIATHSPLIVSDISAKNCCVYDMATNTLVDATPYGERSSDYQLATLFHNPGNNNEYLLSQVIEVLDDICQSKEIASETKTKAHWLLSYEPRLPDGDKVKRLLSILDQTLEVFSK

SEQ ID NO: 80899 - protein, 211 aa, Vibrio fischeri ES114
MMKPYELSEEESQIVKNVQGDTLSPQQKWDDCRVTTMKSNIKKHYIAEQDRTCAYCQVSMHTTHGMVWDTEHIIDKDSSPQWMFEPLNLCVSCKDCNGAKGTRTSTKGKTYKNFPRKSTNYRIIHPHFDDYDEHIKVAVPGAVYLFQTEKGRNTIEVCGLLRYHKAGGRNKVDLGLKAALLAAANDQSPEMLDYAVELIKKSKADAAEVSK

SEQ ID NO: 80900 - protein, 986 aa, Ruegeria pomeroyi DSS-3
MRFRVFAVLSFAVLVALAGTGVPQAQSVSEAPYSISRFRLDDFSTPILHRNETASGSLEIFFVVPQFQVPEGKERQFLTEMVDNYWRGLAVVPGSGTAPVGIVSSANSVVLSANNTTMESIKTHSELVWNVESFGDVQVLGEEVAAQDGVSLSLFYQAVPVRVVHRSDTNADPSSITRASNAISLQYRVFDNTKLGALIGGFAGLLAAWVYFYLRTIRRIRDRGRASLRLQELQTRLEKAELRAERLTDQPERQSTSIPPLDVPRPPVPPALLDALADKTAMVAFGSGASAQAGLPTSHELILRLVDRFDTQISDRLRQNIQYATSANEEGVVEPDRFSAIVEALSDQVSRPALIEAVQDIFADMRRNTGFYETLSRIGWSGALSLVWDDMADENFLAANPPFLRLNPEDTDEMRQAIKAGEKLLLRGWGGLTEASGENIVLTFEEFRKLLEERPEFGRQLTLLLQTRTFLFLGLSPISLREYLTALNPYLEVTQGRHFALVPASYENELFVRPLEQYGIELLEYDPAGDHAQVKNFIDDLLQQARNLGQYRQPEEDRANPLAWQPLTRLELENIGPFNTLEIDLPTGRIPNDTAEVHGEPWTIITGENGMGKTVILRAIALVLSASDPLVAARAGSLLKLGKQSGRVTLSVGTRKIEVRLVRDRKVIVTSRQISPLAAGQFLVLGFPALRGAPSGEPAGPRELDEQPPGPQDVYPLVLGSVDDRMLNLKQWIVNVLSAARGGDAKNRRLAETLDSIVSQIMPGGVVGFAPLSEANVLKLSIRTPGDGGVEREVPFEQLSQGMSAIFNWVGVLLQRLHDISGEDEDPSKVAATVIVDEIDVHLHPEWQRRVVTLVKDIFPNVQVIASTHSALIVSSVTADEVRIFRRIDDGEFQLVRPTRETYGRSATDLMQGEALGVQNARTVDFDEKVVEYLDLRKLASRNPDQEDRYQDLRSELQDANWAGISEEPAPVVTAEDIQRLSQKYF

SEQ ID NO: 80901 - protein, 297 aa, Ruegeria pomeroyi DSS-3
MHRLDPNYTSEALKKLIEIGQEKAKELIDAFEEDPASVEVGTFYTKFKDDLIACQNGNCAYCEQLVSGHPGDVEHYRPKNRVTLDSGKVLTIKHPKHGEMNHPGYFWRAYSWDNLFLSCGDCNKARYHSDQDGRTKFGKQDRFDILGKRAVDPCDDLNDELPLLVHPVDGDPQKDLTLDGENLYQAHNDRGQYTIDLLGLNRRADLIERRSVALERGQLVVWEFLDAVKNEKAKKQMEKAELLQKIIDGSIEFLSAYRLGLFGELKKLDDLGVDLKIGELVQKVLKTGGDPSADAPR

SEQ ID NO: 80902 - protein, 504 aa, Pseudomonas savastanoi pv. phaseolicola 1448A
MEAGLPPGTKLMATLFVSPFYGLHLVCSPNCNGRCFPYAWPDDETGENIVRLDTLRMQNYRCFGEFEIDFDPHLTILIASNGGGKTTILDAARVALWPFVKGFDLGGQTGKSATIQIEDVRLAQFGSGNMESQVPSVIEAKGVWWESAVESSWLQQRVSLKKSTNTIGDAGSKALTSYGKSLQECVRSDAHVTLPMVTYLGTSRLWFEGRFSSAAAQTTLDKSEYSRTSAYLNCLSYSSSFKTFTAWYIWMYRSYREAQLIALERDEEMSDAGQRFEKIISAVKEAIDRLIKAPTGWHRLEYSASHQQQLVMHHPDQGVLPVEMLSDGLRNTIAMVADLAFRACKLNPHLGERAPLQTPGIALIDEVDMFLHPFWQQTIVGSLRAAFPAMQFIVTTHSPQVLSTVRRENIRVIGKDAQGRLIASRPLAMTYGEPSNSVLRSVMQVDPQPPVDEKPGLLQLTEWVDKGRYDEPQAILLMQQITEALTEQHPQLQRSIKRQKALRG

SEQ ID NO: 80903 - protein, 240 aa, Pseudomonas savastanoi pv. phaseolicola 1448A
MRSVHKRGGGPYQLARSHRSPPATSDTSTSRWSSFGYKAQVLGCLLEEQYGLCCYSEIRPDRVGLSFHIEHVENKSQNPQRTFDYNNLAACALDSQSDLEVLKIQGAEVFGGHASGKSKGVDMARFVSCHMPDCSRFFAYLSDGRVVPADGLSPEEVDRAEYTIGLLNLNSPYLQGLRQSWWDELEALFEEHVNQNMSLHCLAGIDLIPVGANLSQFFSITRNFFGGIAEEVLEQEAGRW

SEQ ID NO: 80904 - protein, 421 aa, Pseudomonas savastanoi pv. phaseolicola 1448A
MRLDHLHLQNFRCYEDAHFDFQPGFNLVVGVNGSGKTSLLLGVAGCVGNLLGSIGVHQPSIAESDVRFALVKFEDRIRFERSYPLVLTAQGGAFERQEWHVSLERSSLQTNFSALNSLVFSENLISIDVSTHGDLPVFAVYQANRRWLTMSVTAELAAQSKPSRLDAYTSWFDAASNLKNFETWFIGKTLERFQRLSRVGSSSVFNDELTWINSAIQCALPDAKGIEYDMELRALVVDMDDRKIPFNDLSDGQRGMVALFADIARRICLLNPHMGKDVLSKTNGIIVIDELDIHLHPGWQRTIAPALKKAFPNIQFIAASHSPQVIGSLQPGEVILLNNHDGSHPRATYGLDSSSILEEVMGVPQREPEIEALLDELFSTLENNELEKARLQLDALKQKAPDLPEFAGAEALLKRKELIGR

SEQ ID NO: 80905 - protein, 214 aa, Pseudomonas savastanoi pv. phaseolicola 1448A
MKRVITGAEPASFIGWKARANEDWTPTYPTLQNPQKRDLHNCLLQEQNFSCCYCGREIELDSSHIEHFRPQDHYLPLALEYSNLHASCLRETTPGNPLHCGHYKSNWFDEDLHISPTEDDCEQRFRYLLTGKIQSTSHTDLPATTMIEKLALDIAYLTKRRQEAIMRVFDEQILAGISDTELNILVQGLRSGDANKQLAFGHVVARYAEQLLAS

SEQ ID NO: 80906 - protein, 452 aa, Pseudomonas savastanoi pv. phaseolicola 1448A
MEIKSFRLVNVGRFSDLEVALAPTERHASKVTVLVGNNGAGKTTLLKSVATSLSWLVARVRTPKGAGSRIDEGMVQNGTATSSITIRIEDVLISDDEINPLETEWGITATRKGRNATSSTVLSELNRLADGYRSKLTEKSDTSLPLLAFYPVERSVIEIPLKVHARHTFDQLDGYDNALGRGVDFRRFFEWFREREDSENETGISIELLNELSQKILIDTELWKVLTREHASSRDRQLTAVRTAVEAFMPGFTKLRVKRKPRLHMAIDKDGKTLNVSQLSQGEKSMMALVGDIARRLAMMNPALENPLHGNGIVLIDEVDLHLHPKWQRSLIAQLTITFPNCQFLLTTHSPLVISDSKDVLVYVMDDGELHEQDSLYGLDANQVLSSVMDTDIRNEEIQTVLDKLQHFLMRGELDEARTLYAGLTDELPANHIELAKASLLIRKLEVRREKD

SEQ ID NO: 80907 - protein, 206 aa, Pseudomonas savastanoi pv. phaseolicola 1448A
MLEKWKRANKGKKYADLVGREDIKDAIRYACVTEQHGLCAYCCCRITAEKGSACNEHIEAQHLAPHRTLDFGNIVASCTNAKRCDKAHGRQLLPLTPLMIECEKELQFELSGLVAGTTLRACASINVLNLGDTHESNRGLVGERKQMIDALLFSCSIDPAELFIEEDDVLDLLKNDLLEVDAQQFLQPFSPVLVNVIIGIQRARQR

SEQ ID NO: 80908 - protein, 421 aa, Pseudomonas syringae pv. syringae B728a
MRLDRLHLQNFRCYEDAHFDFQPGFNLVVGVNGSGKTSLLLGVAGCFGNLLGSIGVHRPSIAESDVRFELVKFEDRIRFERSYPLVLTAQGGAFEHQEWHVSLERSSLQTNFSALNSLVFSENLISIDGATHGDLPVFAVYQANRRWLTMSVTAEHAAQSKPSRLDAYTSWFDAASNLKNFETWFIGKTLERFQRLARTGFPGILTDELTWINSAIQCALPESKGIEYDMEMRGLMVDIDDRKTPFNDLSDGQRGMVALFADIARRICLLNPHMGKDVLSKTNGIIVIDELDIHLHPGWQRTIAPALKKAFPSIQFIAASHSPQVIGSLQPGEVILLNNHDGSHPRATYGLDSSSILEEVMGVPQREPEIEELLDQLFSTLENNELEKARSQLDALKKKAPDLPEFAGAEALLKRKEIIGR

SEQ ID NO: 80909 - protein, 215 aa, Pseudomonas syringae pv. syringae B728a
MRRIIKGTEPASFTEWKASANEDWTPTYPTLQNPQKRDLHDRLLQEQNFSCCYCGREIELDSSHIEHFRPQDHYLPLALEFSNLHASCLRETTPGSPLHCGHYKGNWFDEDLHISPTEDDCEQRFRYLLTGKIQSTSHTDLPATTMIEKLALDIAYLTKRRQEAITGVFDEQFISSASDAELANLVDSLRSGTANTSIAFGHVVARYAEQLLTQR

SEQ ID NO: 80910 - protein, 449 aa, Pseudomonas syringae pv. syringae B728a
MEIKSFKLVNVGRFSDLEVALAPTENHASKVTVLVGNNGAGKTTLLESLSTLLTWLIARIRSERGAGKKVALERIKNNADFSEVSILLSESFPFADRAQFGWQLSSVRPGRKVESRTNLIHLALLADGYRTLLTDSGATSLPLIAYYPAERSVVDIPLEAPFRPPYRQLDGYEDALSRGVDFRQFFEWFRDREDRENENGVSSDTLMRAQQKHGPDSIEYEVLLRLNESSRDRELTAVRSAIYAFMPAFANLRVRRQPQAHMTIDKHGETLNVLQLSQGEKSMMALVGDIARRLAMMNPALENPLQGNGIVLIDEVDLHLHPKWQRSLIAQLTTTFPNCQFLLTTHSPLVISDSKDVLVYVMDDGELREQDSLYGLDANQVLSSVMDTGIRNEAVQTCLDEMQHFLIRGELDEARTLYGVLADQLPADHIELARASLLIRKLEIRREKD

SEQ ID NO: 80911 - protein, 206 aa, Pseudomonas syringae pv. syringae B728a
MLEKWKRANKGKKYADLVGHDDLKDAIRHTCVIEQHGLCAYCCCRITVEKGSACNEHIEAQHLAPHRTLDFNNIVASCTKAGRCDDAHGRQPLPLTPLMSECESELQFELSGLVAGLTARARVSIKALNLGDTHDSNRGLVGERKRMIDALLFSCSMNPGELLVEEDDVLDLLKDELLESDAQRLLQAFSPVLVNVIRSIQAARYS

SEQ ID NO: 80912 - protein, 532 aa, Colwellia psychrerythraea 34H
MSFELNGTNHKFISNECNDLDNKYTFLVGENGSGKTECLVQIINSLNRYQLQHEQHEQHRDMLDKHLENRYKSSLVDFKIKSNLVFEKKDEKISISFEKTDAPREIIGFDGKKINLNQNSFRYIYNFKTSATVCNKADYDKESSIIAISESPYNKFPILQSDSYFNYYNIGVNTEEKNEYLNHQSDDYVHPKVKQLTMSICGSLSEHHKTNFSHLFRMLGFSEKIKFTLKIKDSFKYLNNNSKELAERVVSNRYRDTRFSSVGKNTEKEIESKKNQDKTEIIKAIDGLHKLEPNLFTIESNQYHDSMNRELDFDIDFNSYTLMTGYVKTLIEYDVLFVSNIYFYNLKFEKQSIDSSRLSSGQLCVLNLIFGISSKILNNSLILIDEPEISLHPHWQSNIISVIHNSFKNYTACHFIIATHSPHIISNVIKNNSSLVLMENSENNNLANDIINTEYGCQGWTVEEILHDIMGMSDTRTDEYHQRIKEFEVAIEQDNYLLAKASFTELDNLLHPNNHLRKLLKLDLVSVKSEVE

SEQ ID NO: 80913 - protein, 247 aa, Colwellia psychrerythraea 34H
MIKLERETKPDYLSDEKVFELTESFKATKKSVWNHDHIKIPLLRSSHSKCAYCECPLTSASNYMEVEHFEDKNHYPEKVVLWENLLPSCKKCNGAKGQHDVIGDPIINPYVEDPKNHLSMRLYRFRAKSDKGQSTIEVTQLNSSDRSVFCRYEIGEKISEMIDLGFERWNEYLVRNNTRSKNKLVNLVQGLLNECQPTSSYSASTATNLLTDPKFIELMSLMREADIVSEELDDLILKASTLVLDYV

SEQ ID NO: 80914 - protein, 455 aa, Pseudomonas fluorescens Pf0-1
MEIHDFVITNIGRFSQLQVVLAPTPQHPSNVTVLVGNNGAGKTTLLKSIATSLSWLIARIRAEKGNGSYLADEDVCNGTSTAAITLCVVDQSQLPSDGHRLVLDDVIFRWSVARTKQGRKATLHSSFFDATRLADHYRNQLSADEKASLPLIAYYPVERSVLEIPLKIKTKHTFDQLDGYDNSLNRGVDFRRFFEWFREREDSENETGISDTALAEISEKFGPDSDVWKTLSKLKASSRDRQLTAVRSAIAAFMPGFTNLRVQRKPRLHMAIDKDGVTLNVAQLSQGEKSMMALVGDIARRLAMMNQSLDNPLHGDGIVLIDEVDLHLHPKWQRSLIRQLSETFPNCQFVLTTHSPLVISDAKDVLVYVLNDGELHEHKGLYGLDANQVLLEVMDTDIRNSDVQKRLNALLERLQDGDLETAQKLFAELTEELPDGHIELAKAALLLRKLELRRA

SEQ ID NO: 80915 - protein, 208 aa, Pseudomonas fluorescens Pf0-1
MRKITKGVEPEQLTKWKRANSKLRYGSLPPEERQSIRAACIKEQRGLCAYCCQSITVEAAHNEHIEAQDKTPARTLDFSNIVASCENRSHCGHGRKTKRLTLTPLMDECENELKFYLNGLVKGTSDRARASIQALNLGHTEESNRGLVGRRRSMVETLIYGSRLTPEELLDIEDKELLNMLADEFASPVEGNLQPFSPVLVNVIRQLL

SEQ ID NO: 80916 - protein, 427 aa, Chlorobium chlorochromatii CaD3
MRIEHLIVKNFKGFVSKEFTFHPNFNLIVGMNGTGKTSMLDALAVAIGSWFLGFYVDSLKMRQIRHDDVLLKYIQHSWEHIYPCEVEAYGVVMDRHIKWSRELNTINGRTTYGNALAIKELALQATRSMLNGDDIILPLISYYGTGRLWQEPREAFKVSDPRKVANKETQSRRTGYFNSIEPRLSVNQLTQWIAQQSWIAYQEQGQVFPVFNTVQDAIIGCIEDAKKLYFDAKLGEVIVEFSSGTQPFSNLSDGQRCMLAMVGDIAHKAAKLNPHLGSDVLKETNGVVLIDELDLHLHPRWQRRVIEDLRNVFPKIQFICTTHSPFLIQSLRSGEELVMLDGQPFATLGNLSLEEIAHGIQQVKNPEVSLRYESMKATAKSFLTMLDEASLAPKEKLKQLADKLRPYADNPAFQAFLEMERIAKLGE

SEQ ID NO: 80917 - protein, 244 aa, Chlorobium chlorochromatii CaD3
MRPIRRGTSPIAGDYQDYDKAKPELISRLGSYCSYCERRIATQLSVEHIQPKALPKYAHFEGRWTNFLLSCVNCNSTKYTKDFLFTDVLLPDRDNTFAAFTYLSDGTVQPSILASEKGLQAVAQKTLELTGLHKEAINTPDINGKQVALDRVSQRQEVWAIAERQKSLIRTNPNNLGFRECVIDNALANGFFSVWMTVFEDDTDILSRLIAAFPSTKNSGCFTENGLPLSPALNPDNLEHGGKL

SEQ ID NO: 80918 - protein, 478 aa, Thiobacillus denitrificans ATCC 25259
MQINRLTLTNFRGLTNSVLDFAPGFNLVVGVNGVGKTAVLEALRILLAKALPSFAEVRGFPGIGLTKDDITIDRKQAAIEVSFTHQAHTFSLLLSDQLEVVRDAVDEQKGLKDIRDIDELASLRHGQRPERGDPRLEGTLRGQTSERPRASGQLSPTPDRALKKSKPQPIVLYFSVRRAVPSPGTPKTKAGTPYQGIFEIERGLELGKIIEWWNSKATVAREAPDSRSAKQLTTTCNALERLLPHLSDWKVEDGNFTVCKVADVGVLNDESGEFEVKQETRRLPVQFLSDGERSLIAIGIDIAYRLASLNEDSETPLDDGEGIVLIDELDLHLHPQWQRTVVELLRTAFPKLQFICTTHSLFLIQSQRMGNLIQLDRIGDEEESAEQYHNQSIEDIAEEVQGIDLPQRSKRHVELMLAASEYYRALKKAEDDPNIPIEELKEKYEALSLRYSADPLVAAALDFRWETFVFKRNHATRR

SEQ ID NO: 80919 - protein, 234 aa, Thiobacillus denitrificans ATCC 25259
MRPVDKGKDLGSFKPYNKACAPLQDRLGEYCSYCERWIAAAIEVEHILPKKANPSQKYRWSNFLLACKNCNTGKGSDQIIVTDYLWPDLDNTFLAFCYDDEGRAYPNPRLPPAILEKAKATWTLTNLNWHPDTTFTGMVAPSEKDHRHSHRKQAWIYASDKRNQLLQYDTPDRRVSVAKDALQRGMFSVWMTVFNTTSELDREIRRLLIENFVGTATNCFDRLGNAHRSSTGQI

SEQ ID NO: 80920 - protein, 408 aa, Burkholderia xenovorans LB400
MLVGANGSGKTSLLKGIAELFNGFVGGVSSKSIAPTLTADSVRVERIDIQGRLRFEEQYPVSVLAEGSIGDKRLSWGVTREAPTGNFTYLGGQPGDVWKTASDKGVNTALAKKLPILAFYQANRQWNLNRASELEAATSKDGRMNAYNNFFNASSDAASLQTWVISKCLERFQVSSETNRLFDEVTDDELALVNGALANAIGEIQGIKFDMREKSLLVEWKQSAGSSRSATVFGNLSDGQKAVVGLIVDIARRICLLNPQLGQSAIKETPGIVLIDELDMHLHPKWQRALTLGLQSAFPSVQFIVASHSPQILGEMKPEQIIVLTGGTTSNPQVSYGLDSSAVLEEIMDVPARPLEVANELSALFEALERNELNVARQHLAKLRAGAPGIVELNRAEALLKRKEVLGR

SEQ ID NO: 80921 - protein, 215 aa, Burkholderia xenovorans LB400
MRYVVKNQEPESFAAWKKLANRDWKPSYQDLMNPEKKELHGSLVAEQGGTCCYCGREIDLADSHVEHFVPQASAPDQALDYENLHASCIRERSPNLPLHCGHAKEEELDQALCISPLDPTCEQRFKYALDGAVLAADPADESAAYMIKLLQLGIPSLRNRRQAVLEGVFDNAFLESATSAELETIRTVYRTRDNAGHFADFAHVVARFAEQLAQP

SEQ ID NO: 80922 - protein, 461 aa, Pseudoalteromonas atlantica T6c
MFRILAYKSDSFSEINFTKSESSKNFKTLLIGENGTGKTRLLNELISAVRSHHPSESSSRTKKFNYELAYLNESNKKILLNSNKAQEKTAIISNKVIAISASNNDKLPFSDSDKFFDKNYQYCGIRETSNASWTSSLMRKTIENLLDCVSNNKIKPLSKIFSFLSFENIIRIRFSLKKTTKLDLFNCKAEDLLEFIEHYSLNSRRMQVDLIREFDLKAARNILSYFKDIILRVSDKEAYFEVNLLDDNYGFLKAYQNIDLLRRVGLISDVSLRLAKEGDKQDFTFMDASSGESQLLHSLSSFVRYVVDDSLVVIDEPEISLHPNWQLKYISLIDLLLTDLKGCHVVIATHSHFLVTDLKPEDSSLIVLEKDEKGIRATPIESSTLGWSPESVLYRVFNVRIINSVYLDSDLQKAHQLMSSDDIDFVELKKLMSKFESLVLDEKDPLKKFIGAMEDFIDERG

SEQ ID NO: 80923 - protein, 207 aa, Pseudoalteromonas atlantica T6c
MSVDDWYLNITVLPNLSKESVHYIGSLIPHDPSQWNLQTNAMKKYKKELLEKLVDIQENRCVYCGLGFDRKSVDREHFVHKEATRGFKEFMFTPENLFASCEFCNRRLKKRTTVIDSYDKNYSDCTFKIIHPYLDTPSEFISFFPSNDVPYVVKPTEKDCGKGERTIEMFELDTISMWKLRQAHLSCMAMDESEYAEILKYKGSFSE

SEQ ID NO: 80924 - protein, 556 aa, Aeromonas hydrophila subsp. hydrophila ATCC 7966
MVNKPGWLRAIENSAHRGDVSSMFQLYLNYFYGTSEIDKDLSVADDYFNQCFLFLESTKDTEYYVPENRFVLSEINLVNFRRFDSIKVRLESNVTVFIGGNGIGKTTIIDAISKVLSWIVSGIEKEGKNGSPIKYQEINNNEQCYFSDVNALFEFGIKTKVNGTISRSKLGTAEKRDSNVVELKSIANVWRVINSINPINLPIFLCYSIARSHPAKRSNRPIVKEPSLLRKSRFDAYSGALDGAGKIDDFIEWFIELHKKTSNNGFFDIDLLEAQVRKLKILSSMDADFIEMYDQKIIDLSLAKNNMQDGEFENNLKQMRTVVDAVVKVVPSIENIWVETSSGSDEVKVRNDGGIVNFSQLSDGQRVLLSLVADLARRLVMLNPNISNPLEGQGIVLIDEIELHLHPAWQQGIVLALKDAFPNIQFILTTHSPQILSTIDKKCIRQFYIDEHGALQTKSPDFQTKGVTSADILARIMNTNSVPDIPEARLVEDFSRFLSNKNKNDALLVFQKISAHFGDEHPVTYDCINQIKIFEMKEKIQSRIGVKGGGKDEETR

SEQ ID NO: 80925 - protein, 222 aa, Aeromonas hydrophila subsp. hydrophila ATCC 7966
MKKLDRALATIPACLSKFHYPKHGWDNVKSRDKKLIWNQIDLIQDRFCVYCELPAVQGDDTTGHIEHFYNKGNMNYKCLTFDWNNLFGCCPSTHHCGHFKDQLINGVPRAYDANLLVKPDVDDPNEYLQFLSTGNVEPKDGLDANKLNRSRVTIDILNLDCALLIASRSSVIKNFQDRVLALDELKSNSSLDEDEYIELYLEIQSDVSSSIHRTAVAQVIFN

SEQ ID NO: 80926 - protein, 454 aa, Magnetococcus marinus MC-1
MKLNTLTLSNFRCFESLEITFDDYLTVLVAQNGGGKTAILDAIGVALGPYLGAFDEAVGSHFSPEDVRTKPSHTQPSMESLYPLTLVAHGVAEGQEIHWERALKGKKSKTTVAGAKNLVLVAKNQQVRIRQGISVDLPLLAYYGTGRLWRNIRVTTSTKQGWGSRTLGYTNALSPASSFNSFERWFQDTDRAHYDYQLEHSDGPTNYGGANAFLASPERDNPFGQALDAVRGAVDLALESVQWGTLRYSGTHRRIVVSHPAHGILPVHLLSDGIRNMIGLVADMAYRAVRLNPHLGVEAAQRVEGVVLIDEVDMHLHPAWQQVVLTDLRKAFPKVQFVVTTHSPQVLTTVKRENIRVLEIENGRGTARPPLTQTLGRDNRETIEDVMQVDARPPIEPTTQLKHYLDMVGQGNGDTIEALNLRAILEQIYGKDYTKLRVADCAIHKYRAMRAQSK

SEQ ID NO: 80927 - protein, 229 aa, Magnetococcus marinus MC-1
MRHVKHTASLTKLDRAKTKDPCPTDPAKAWRGFKHKDDVAKQLKLLQDGLCAYCQVSLDTELGYHIDHIQPKGPNPKQTFVWHNLVLSCIASGSQGAVSGKLSCGHAKGNQALPKDMDPTHPDCESLFTYTLSGKVEPNPDRPPEQVEDIKKAIELLNLNNKRLVRERAEMLHEGYLCLKDLNGSAVAHFLDLELGKTNGKHRAFITARKLHFQDWPHVEPIDNTLEER

SEQ ID NO: 80928 - protein, 410 aa, Magnetococcus marinus MC-1
MRIHHLHLTHFRRFIDFKLTLDPQLTLLVSRNGGGKSALLDALALALSPYLKHLPTVRGNRLRHGDLRLTPKGRTAPFVRIFCQTSTGLQWDRTLYKDHGKASRKAERNAVGRKALRAYVARNFQPNTPQLPIFIYFGHGAQEKAKRMEPLQRAHAWLDTLQPHGQEASLLEALLQQPEWHALLPWVEQAMTAVIPELSHLRWQKSEGIRVDWQSEAGGSRYPIRLSQLSQGYRRMFILVTEIATRMALANPNLSNLLESTTGLVLIDEIEMQLHPSWQQRVLPDLMRTFPNLQFVVTTHSPQVVTTVPPHHLRILHWEHDQVQLHCATFSLGAKAHQVLKEVLGTDPRPEQLEIVRQLRRYQALVADGYWDHAEGQALRKILDAWGAEHEPELRRLDMDIRLKELDRLT

SEQ ID NO: 80929 - protein, 258 aa, Magnetococcus marinus MC-1
MKRIDKQREPKPLKRYRKQHPKASWDALRTAHPAVYPAIKKQLLTDQGGLCAYCEIDLKIRKKPREIDDFRVEHFHPKSDTSGNWSLDWSNMLGVCHGGSQRHVTASGERFSENKRDHSCDVPKGSQHWEQVILNPLQLPHAPSLFRFDRAMGSVRVDEHACAVAGIEVARVQATIDLLNLDCSRLQRMRQRVLDHLNEQLIVLVEQGHTLQQARDRLARAYLTKNHKDFWPVAFFSAIRHYLGQSAERALRNQPPPL

SEQ ID NO: 80930 - protein, 433 aa, Shewanella piezotolerans WP3
MIIDTLKLTNFRSFEDFELQFDPRLTVLIARNGAGKSSVLDAVATNLGQFLTRLPGVSGHNPKDTDFLVFPDGQKPAYMRIYCRATNGVEWDRTERRDQTKKTLSSIPEGVGIKRLHEYVDQFVDAHNEGGKYDLPIFIYYGTGRGVFDIPQRKRGFSKKFPRFESLSGALESRTNFKRFVEYFYYLEDKESRLQKEQRSFDIEVPELKSIRNAVSKMMPEFRNPRTIAPAGLMVDWLHDDETRELKIEQLSDGYRTTLAMVMDIAARMAEANPFMEDPLQTRGMILIDEVDLHLHPEWQREFLPKLINTFPKAQFVVTTHSPFIIQSVKTGKLVDLDQEDPEDSPSLEKELSVEDIVEDFMGLEGIQRSAKFNERMELADEYYRLLDAGVDRESIKVQKIEKRLDEIEDLFGDSPVESALLKSERRTKESKV

SEQ ID NO: 80931 - protein, 205 aa, Shewanella piezotolerans WP3
MRPVSRPVYTGQLYVNYKSYLKPLIENFGGYCSYCERQDKLDVEHVAPKSKNLHLEVEWGNLLLGCPRCNRDFKKSKNDNREGYMWPDTHNTFGLLKYLEDGRVTPADGLADDIELIVQNTIELVCLDDKNQPQKTLNLARRRKFKSADIAKRKFVDGCQTLDEILLLAEEGFWSVWLTVFKDIDEVKEALLNHVSYPNTSGDLA

SEQ ID NO: 80932 - protein, 444 aa, Paenarthrobacter aurescens TC1
MATAMGSSFPPSNAETTSFRTLKVEPWRQFTAMDLDLSRPLTIITGANGTGKTTLLNVIGVHFNWNVQLIGTPFMDEAGSIRFKVGSDVPATPLPEQPAGFGPYGPAGYPTPPMSKVGSLIYENDVETELFVPDLNNAQFTVSYQRQQYVDGVFLNSHRSISGYQLVSSYAAKFPSPRELYETFLQELRSQYFGFQTNRSAMLVMKEALLAAAIFSEGNSSVIADSNARAVWEGFQKALGLLLPPELGFERLIAMPPEILVVTRTGSFAVDALSGGLRALFELTWQISLRAHTSSDFTVCIDEPENHLHPEMQRSLMPNLMKAYPNVKFIIATHSPFIVRSSDDARVYALGYDAENRVEARLFDPTTSGLSPEDTLRDVLGLDSTIPIWAERRFNDIVSKFTSGPPTAETLGQLKKSLIDAGLSSELPSAVDVVVSRTNEGGQH

SEQ ID NO: 80933 - protein, 212 aa, Paenarthrobacter aurescens TC1
MRALKKLPEPEVVTKNKVRWTQDYVKSLGSDSTRKLTPWTRPAIRESLTQETQGRCAYCDSHIAQVSAANIEHYRPRARYPDLVVEWENLTIACPRCNSSKSDKFSEDLPFINPFLDNPADHFYFFGDLLFEKGSERGKYTLLELGLNHEGLVRARKRRINHVHSLIVSWRASSPILKESALGLIHEELASGEYESMVKALLVNAGVPLPIT

SEQ ID NO: 80934 - protein, 437 aa, Acidovorax citrulli AAC00-1
MKLESLSLAHCGGFEQLDIAFEPDVTLIAGVNGVGKSTVLHALTVLLSRAMPEFTPSRSAPLYFTDDDIHGDKGSLEVSARIQIDGQIINAGVQRLRATDDKGDRFMLLRQAKAATDDTDFAHALSTRTLTGELEVGIKETRAALAILKNASHPPLAVYFSPKRQLPGQPRSLPEATPFYPSIAYGRALHDREVELREFMHWFRTQEKLGAANEPRRFKVLDALRAVVVELLPEFGNLRIQEQPRLGFVVDKRGQPFYLHQLSDGERGLLALVFDLTRRLAIANPESDNPIAEGVGLVLIDEIELHLHPKWQRDVLQRLRDIFKACQLVVTTHSPLVLGEVPARCVRFLEFVNGKVGVTVPAEAYGMDANRILQEFMGAPVRNRQVDGELKALFELIDQERFDAARAAIAALERKLGEDEPELTRASSLIRFLEGAE

SEQ ID NO: 80935 - protein, 209 aa, Acidovorax citrulli AAC00-1
MRTIQKGPEPATLTQHRQQPHADYDNYADKATLQQALVAEQRGLCCYCQSRIRATPEGMKIEHWQCQASHPGRQLDFGNLHGACLGGHGRPEREQHCDTRKGNDGLCFSVCDPAHPIEYKIRFLGDGTIKADDAAIEEALTAVLNPNLPRLVSNRKAVLAAFQQRLQDGRRVDPARELPKWDGSESGDLPEFAQVVVYWLRKKQARTAV

SEQ ID NO: 80936 - protein, 556 aa, Desulfovibrio vulgaris DP4
MRLDWFWVEDFKNLKDVTIDFDESHWVTVVIGWNGTGKSNVLEALATLFRDLIMIQEFNGSRKPTFKYKLVYKCQNNLIAIDADPDRAQNAYRISVRDLSEQLQPTLLTSNSEDYFEPIFKQGKILPLAQFIKRQEEYLPRNVFGYYSGYAGRMEEIFQPYLEKYDKELRGGKDPGFKRLFFALPIHSQFVLLAFVLKHEQMVKDFLEKLLFLDPVDGIESVLFVLRKPGWANSKKKGGDERFWRAEGVVKEFLVRLYDIALAPIRITREKQITLWNKSRIEFIYLFVKDMDALRTLVGEREPRSLFRDIESTFVSEMIEEIRIKIRLRDGKGKVTFRELSEGEQQLLTVLGLLCFTAEDQSLFLLDEPDTHLNPRWSADYLEYLKRFVGSDEEGDEHSHILFTTHNPLAIAELVKEQVQVLRRSEDELKTSVHTPADDPRGMGYSGIVTSDMFGLAAALDSHTLKLLERRRKLTLTDDPLTDEAREELAQINRELEPYGFRHEARDPIFREYLRARFEYDKNANKSELTPVDALTKDERQALAKELVQKALGQQG

SEQ ID NO: 80937 - protein, 270 aa, Desulfovibrio vulgaris DP4
MRFIDNRHIRVPDGWNEKSQQALDDVCNYRCSVNDRSAVWRDLKDALAELSHDKCWYCEAKQERSDDAVDHYRPKGRVQEANGHPGYWWLAFDKGNYRYSCTFCNSRRKNPATGETQGKGDHFPIADENTRALKSGQEEYEECLLIDPCKAFEPNLIDFRVDGTPCPKFPDNPLWKSKAENSIYYYALDHQEVREARRLLAVDLESWIEEADKAFKKISAGNNDFSDTFQGRVRDIKSAMKAEARYSSFARRVVADHKDLVWIETLLQSN

SEQ ID NO: 80938 - protein, 228 aa, Rhodobacter sphaeroides ATCC 17025
MLGFSQGREFASVLRLESALRKSRQLSDIQVYLERINGPIIELLGASSGELTLISSLLFLIANRDENPIILVDEPENSLHPNWQREYVDKLLNALEYRGATVVIATHAPLIVTGALANSRKLVSVFQIHEGDAKRIDLAGSARSSESIEAILWQAFNVITPASHFVSEELVGVVSQLERGEIGADAALVRVNEMDAHSFDPQQREFFDAVRKLIAKVVGERERRSDDG

SEQ ID NO: 80939 - protein, 184 aa, Rhodobacter sphaeroides ATCC 17025
MPGSDAEIAALKSAKEKILNLHLERHGWTCCYCRTSLKGAGPFMTDREHILPKGKAAYKTLSYTLWNLAAACKRCNLQFKRSGDGFVIDGEDASALQASENYHFIHPNLDRWEDHLTRLAVQINTKNLVKILCKGSAKATYTHEFFNLKALEIDTFDAAQGLDNAAEESAAVAELRKLANTFGQ

SEQ ID NO: 80940 - protein, 410 aa, Flavobacterium johnsoniae UW101
MRIRELSIKNFRALEDDRHFEFHSNITLIAGVNGKGKTAILDALVLALSRLVPQISPSKSRRIKIKESDIAIGKEAMQLTLKTNCAGHPVNFTIDYGSKEISTKLPKRVREIITNAYGDTQRGDDQAPLAVFYTTDRAGYKFPKRLPEIVPSGQAMAYNGALENRLVDYKDLMYRYNVSATNTEAPFNQNTIEAINSAISQFMEDFGDLHVETNPLRLVILKGEKVIDVKQLSDGERAFIALISDLGRRLALANPELENPLLGYGVVLIDEIELHLHPKWQLELLENLRNIFPNIQFILTTHSPFIIQTAREGELISLDNEIVVEPYGKSLEEVSKYVMDIQNTEYSPRIKEMKAVAEKYLTLSSEFKKAGDERKSEIQVELAQLLAPFSDNPAYIALLESKGIITDETN

SEQ ID NO: 80941 - protein, 235 aa, Flavobacterium johnsoniae UW101
MRPINKGISPQVFAEYEDAKRPLVDRIGTYCSYCERQIATNLAIEHIFPKDDTLGYSHLRENWDNFLLACVNCNSAKRVKIINEATYLLPDRDNTFIGFEYLETGEVIATSVAPIDTMAQNTIDLVNLNIDEEDLIDETKLFTALLRSGQRVQAWIQAKEALNDYNNGEVNIRRIVREAQSIGFFSIWMKAFEGVPAVRQELINTFIGTETSCFDVNTNSITPRLANHLNHSGKV

SEQ ID NO: 80942 - protein, 438 aa, Alkaliphilus metalliredigens QYMF
MKMEYIYVHGYKNLNDIEIYFEPQSSVNSFIGNNGSGKSNILEVIAIIFSSVLDDVNPDGFEFCLKYTIDDYIIEIRNTEKLLEILKNGEKVSKKDVNQIFPKAIFLYYAGETKRLKQLSDEIIDKRFEKTLKKDEEIAFKFLTYLSVDDFGPSLLSNHIFRNDTYYNICKLVDIKDICPPITINLKKPSWSKNGKADNFWNAVGAVAKELNTFAQKGTYSIIDNNRSKIVIEDIEKLKDDSIGALGLFTIFKMLAQADVLDGLEFEVVKGNDKFSYTGLSEGEKQLSQLLSILEITKEYKALFLLDEFDSYLHPNWQRKFVDIVNEINIRGQILFTTHSPLTLGKMRKDNIILLKDGVAYNPSSETFNRDITEVLEELMDVKKRPPEIEKMIFDFRESAMQKNKEMAHNLYAQLKEVLSEDDPFFINAKISLARLER

SEQ ID NO: 80943 - protein, 221 aa, Alkaliphilus metalliredigens QYMF
MKYIHKQSQPEAFLRYKRQRGASFKELSNNKNREIKNCLRESLLVEQGYICCYCGQEISSDNSVIEHLKNKDYHPNLQLEYNNLVCSCKGGQDRRARNPRYPLYCDANKGNLDISIYPIDCICESKFEFDEDGNIYGLDEAARETIKVLNLNNDKLKNQRKHAIDPYRYNDDGNTDWIDELNMIAERGFDKKFLPFCFVIHSYIKNYRLKSELESDLIFII

SEQ ID NO: 80944 - protein, 176 aa, Marinomonas sp. MWYL1
MSSASSGQINILNIFFGISSCISDDSLILIDEPEISLHAEWQMKFLPLLRDVFKSFKGCHYIISTHSPMIISNVGTDDSTIINMEDGVTYLSSDFMFKSADYINSHLFETPGPKNETMNREVVGLLSAISKGNKLSKDKIIKAELLIKLSKYLSDADPIKELVDILGEALEVNSND

SEQ ID NO: 80945 - protein, 214 aa, Marinomonas sp. MWYL1
MIENPIVFTEEQLELIEEIKNNADFSSNTWSCDQVTNILKPVIREHYTAVQNATCPYCQMRLNSTNGRVWDVEHIIPKATVESFMFEPLNLCVSCVDCNNAKSNKKITDSTARKRYPRTGYFFVHPHFDNYHDNIHVVREGLFYFPKTDKGEKTIYICKLCRFYSFAGYDDNLDDLDDRIVLLANSLTKTKNERTKDYIRRELRELVIRQGLVS

SEQ ID NO: 80946 - protein, 452 aa, Ochrobactrum anthropi ATCC 49188
MRPEAGKMPKIQSLKYYDRTGDQRIIGFNAGQLSSSFELTLLTGQNGSQKSSVLRDLVSALILPDHRTRVQFCGQYQAATPTPVICFSGSVADRFPVKMQGGRRTEYDVANYHYIGQRAGTNLLSKKLPLETAVIFALNPAMKERFRFPFFERAFSFSGLLPRLSLDIRYDPKFRKRFPSKTPHEILAIALDENAETKNRGGISKATAQSVVAQFSGDDFNFLNALITERKGKFLQTTLDQFSVTDTPENRAVRLGLLLDILIIDRAFVQRPGEEPFSAYELSSGEYHMLTSLLALGFSVTTESIVLIDEPENSLHPQWQQDFMSTVLELCELMQDGHLVISTHSPLIVASAKPDSMIVDLSIPMDVMPAAPIQFGASSDSILFDQFGIASSRNLNVVDLVQKAVNLVEHDLINSTDFIVLLPKLRLLREALSDTDPLIPVIDVLLEGALRD

SEQ ID NO: 80947 - protein, 243 aa, Ochrobactrum anthropi ATCC 49188
MNIGFESIVPTPTYAKGVSLASFAGLNWDSRAGIVTAFKLSLKSELRRSQHALCCYCRRPLGDPRDTDLEHIIEKAAHPAFTFEIRNLALSCSTCNSQKARTYKLLCEKIKKRSKKISGDGVKVNRSPVLSSNLPPVAISSAADFRWVHPHLDIFSNHIVLKKGYIFQRRTLKGYRTIQGLQLNALTRVEHRAAVEKLLTRKGPLSMAFGAFAQMHYHNPNQVFSILADVLRTKISTAYEAIP

SEQ ID NO: 80948 - protein, 456 aa, Cronobacter sakazakii ATCC BAA-894
MIESIVLHDKTLNFIVPSELVPDTNIFTVITGKNGVGKSRLLSMIASHFSFYHNEDKFVRDRRENLEKDHYELKYISSPKKTIAVATSAFDKFPVPKRREVINEYSYLGLRGLPSFDLSSEYISKITFKLISAVLNLELDMSRIGNVLNYLGYYDEIEIQCNSRYSEARLKEIFSSENIYEAFERYFLRGVMPYGSINKNLFINEDGNISKEMVDCAFNAMLKHERKRIGSSGTIIINKNGVKLINEENILDSEFMFLLESGIISTRNVNLRKNNSRKTFSMRNASSGEQCILMSLLGIASQITDNCLICIDEPEVCLHPEWQEKYISILMDTFKDYKNCHFIIATHSPQITSKLNPKNCFILSLHDENTHIATSIINRSIDFQLATLFRAPGYKNEYLTRELVNFLADLTTTSHIDSSKLIEIEKIITLKNLISDTDPVKKLITLAEKAIKEARA

SEQ ID NO: 80949 - protein, 231 aa, Cronobacter sakazakii ATCC BAA-894
MINNAVSYNAPYDAFISTFKSLTAEEKENYWDMKGNKDLDAIKKHIKDYYLIVQDYKCPYCQQKIIVTHNGAWDTEHIIPKDTHPDFMFEPQNLCVSCKDCNGEKSNKNILKSRKAIRLPKQSKNYIIIHPHFDNYNDHIKIIDSSLYFLPKTDKGRKTVEVCGLLRFVYKYSNYENVDLAIKQGISKFTQALLDTSDPAEEQLYLSFIEDLTKRGKELSKSAFLRKFGEK

SEQ ID NO: 80950 - protein, 590 aa, Lysinibacillus sphaericus C3-41
MTIVVGEVQMELFRQFIELREEQERLTNLINDIQENGFEINFIKKKIYLYKNGIAYIGLDCQNIEREKLISVFLIKESKSRRIQEIDSYFIDYFNANLKDIVINLEIENLFLESKAYLLEELFMLEQLISEDLTVDFRINSIKFEEYKCFKDEEITFEERITVLVGKNASGKTSILDAISVAIGAYLSGIDESTDTKSILKSDVRFTSKDVHGTKVVKHHAPTRINFNSDFINKRFDWSRTRSKLKSTKLTTKDSKQVVNLSRFLYREINNNDLRNITLPVFSYHGTGRVANFTKNMNQLEKTENISRFFGYKDCLKPASNYKTFISWYSKMQYRAFMLNKRIEVLDQVTKCLKETFVFLTEEDKNKVSDVIYLEGSLHLKYSNGDMIPIEFLSDGYKDIIGIISDIAYRMAILNPHLEKDVIKATPGIVLIDEIDLHLHPRWQQKIIKLLKNLFPKVQFVVTTHSALVVSSTEYREAKELKVVEENLNENFTIVAEIIGDSKEWYIHDILRNVFHVDPLLHTRLTSEYIDQDEVDDLINDLNEYVKKYLVSREEHILKKINTLNGKLNTCLTPNTPKKRVVDALMEMVR

SEQ ID NO: 80951 - protein, 243 aa, Lysinibacillus sphaericus C3-41
MKAYYRNPKEIPKKLIDDINKKKWYENLRDGKNNIRDRWNTTQEDKRPIIREKLYQITNGCCAYCGKKIKISEMDVDHFLPSHKFNYLSYCWLNYIPSCKTCNQSFKHQYYPKSIAEKQIIEHCCQGIVVPFDATYNQNILFTVTQDRIIDPFYDDISIHLTFQPLTYSYKAHTDIGKEMNKIFFRRQEFIEYIEGISFAVKRLVKNNNPRNILDPFINLYGSEFYYNAYWDFWSERKSDGLL

SEQ ID NO: 80952 - protein, 415 aa, Shewanella pealeana ATCC 700345
MTGYIQGINTKLPFTDKVINIDLQGKSLILTGGNGCGKTNFLNHLFEYLTKRVVERENYDPLDIHRDISYYSEVVAQYGESDGNFENNKYNLELAQQRLIDLEAPVLSLNGLKNYIINYHSKKALLTIFKAVREANITESTSAVSVSSLVEQVNSSYEEVSVGSLFEQYLVSYKTVQAYAESPSIDNDPALASKVKSWFEFLQDNLRYLFEDETLELKFDSKLQAFHIKQDHKEAFRFQQLSSGYSSILAVYAHLVTTIQLSEITPDEIEGVVFIDEIDAHLHVSLQRKIFAFLTKSFPKIQFIVTTHSPFVVSSVSDAVIYDLSKLEQIDDLSMYSYESILDGLFGVSSSSDLLNAKVKELNEEATKLQLDIGKVESLISELRQNESKLDSESLYFLESAQLSVLKAKAKSTDV

SEQ ID NO: 80953 - protein, 219 aa, Shewanella pealeana ATCC 700345
MFNVERGDEIPASLAARRSYKDEDVVKALERAFHKKCYLCETKEPQDINVEHFVAHQNNDDLKYDWNNLYFSCGRCNNIKLHYFNNLLDCCAPDQDVFREIKLLPPRTPGARKLVVKRQSEDARSIQTEQLLEKIYNSEHTVNKAVTGSYLRKKINTQFALFHKWLNVYYAEDALEAEREDALERIQVLMSDKSQYSAFIKWCILDDEDLNELLGPLIN

SEQ ID NO: 80954 - protein, 453 aa, Shewanella baltica OS195
MNIQNLKIHNFRSISKLDLNLGTENRVVCFVGENGSAKTSILSLIAEAIVSKTKLKFPDFSPTQHNGKRYRMMCKSEINRDSNFYSVELNYSNIENQSYQFKKLVGRQKNLPVTEYQDVIQGISLTHEYYSEYSSLSNLEYSKDYLASNIFLIRPSTRYEKDRFEVSEADTKTPSYSVGEQYKSEMPYPFTVSHAGENIQSIVLDMIFDATIGYNDAGLAFSKITHILKQITGKEFGNLQVSQSPYRQVVSSSIGPISSFSQGELDLLVTVASILSRQLFHFRYYTEDQKKDSGLNTLFDIPGIVLVDEIDLHLHPRAQESYIKTLTDIFPNIQFIITTHSPFVVRGLPNHSKVVNLPSGRVFDENFKAMDIDSITNIIFGYDGGFSEAVKDKLSQFKNALVLEDPDVQLLQELYSELSSSGSAKEELLLYLASYADEKLINTVKGKADAESR

SEQ ID NO: 80955 - protein, 276 aa, Shewanella baltica OS195
MRKVDRASVPFPNRLLQQNMTAENLSHLANYKQINNSIYGHQDVKNNLQMLYFDKCYICEGDISSGDYDVEHYLPKKHFPQLGYTWENLHKACSGCNLAKEHKSFFVTDDKGNVTDIKLLDPSSVVYNIAEYICFNIDSKAERVIIGENPIAITKAINTIHYLNGNYQSDYGKELCYLRSNKSSGFLRFCNESLVEHRNRLREIKVTIDTYQPPEDPVLLEIDQNICQRLINADNEYLSDKAPFSTSTRVQLFPTLKITYDQLVRIKNHMKQILGM

SEQ ID NO: 80956 - protein, 709 aa, Bacillus weihenstephanensis KBAB4
MIRIHKDKYFDSIYDELLEQATQEKYMDEYLLEKFMKRYFNGKCSYCEIRMKELRLTIDFYRPINGSLNTMDGEFHPDHYKWLKNEDDNILSICVECKRAKSNRFPVDGDVASINADKNKLVKERRLLIHPCRDYPERHFDYDESGMVYYKSKKGEVTVDVLNLNRGMLVEMRAQVYSEFNNLCYLFSMEQSPYYLKQILQEVQLDSIFIGLKKFILSEWVILNEKIPFLQEFEPLLGKRLQEEEVRVLSVRNNKISQIDIDNNILYVDNDKRRKRVPARKINDYYDVSDENALEKYYGKQRFIEKIEIYNFKSIRNMKIDFTLSKSSNAPWLMLLGENGVGKSSILQAIALTLMGNEQRQKIIKKKPYEYLTKGFDEGSIKIKLSGMQEPISIYLNSNSFEFTGENHQRPRVLILGYGSTRLLPREEMLSNYKVTWARIENLFNPFIPLVNVREYLLSLNNEDFNNVKKAIESLFLDEVIIDRDQIYEEVYFGFANSYSKLEDLSDGYQTIIALATDIMMVMKNRWRNFDAEGIVLIDEIDAHLHPRWNIEIVSRLKNAFPKIQFIATTHNPLSLRGLIDGEVAVLLENEEREAYITQKLPSQKGFNVEGLLTSKFFGLYDTMPDLNELFDRYYLLLSNPSPNERQKEEIKNLQDKLSKYEKVGTTLREQKFYEAVDYYFAQYRKNNVELSDEEFNNIIEDAIKYFER

SEQ ID NO: 80957 - protein, 295 aa, Bacillus weihenstephanensis KBAB4
MIKVQREAEPAVLNLTDSDSIGFKELEAAKKTTFTKDTKFPFEAYKDESVKNLLKKMFNGKCGYCESIINVTSYEEIEHFRPKKAINIEGIQGLTYPGYYWLAMSWNNLLISCQRCNRSHKKNYFPIENESNRAKAPGEESGEEVLLLNPCEDDPSEHLEFKDTGIIEFKEGSKKGEKSIKVYALHRRELTEERAKVAKDIELKKVQILDGLSTLKVLLRYQEDSDLQKEIEKTVSNIISLYDFIFEYENDPNRPYQAMVTQITSDFLSERKELINKLKTTSNRKNSCEQSHISS

SEQ ID NO: 80958 - protein, 457 aa, Caulobacter sp. K31
MVTFSNLIDSAGSDSFYSVIIGNNGTGKSRLLGAIASEFAGIHQSDASGRGRRPSRLGVLDSIIDGDLSSGLSPSGRLPSRVIAVALTPVDKFPLEPSGDGGDFPLGEIADSRDDVSFYHYVGMRDRTNRASISALIYRAVEGLGRRQSLENAARLRSVFEMLGYQPRITTRLKLSLGQDVQDFLQGRRGIEGDDADARLMQRIRALAASGGYRERELRAKLGQFIETWGTKTKLELELDFSGEAPPPSFDVETLRLLRRLGALSLSSVDVWRADGVRHDLRDASSGQIGILTVFLSIAAHLRDGSLVLIDEPETSLHPEWQSKYIHLMREAFADYSGCHFIFSTHSPHIVADIPQGSWIYSMDRATSVSSEALLGRSPDFVMANAFDVVGPTNYYLRDVLADALRLVGERQINSDEFKAQLAELVRLAANMEGGEQVKQIVQDLQVAQAELAPDGG

SEQ ID NO: 80959 - protein, 207 aa, Caulobacter sp. K31
MAVEPIAFTDEELELIRVLTERGEGWDCAEYNPLRSRIKQFYLKGQAFRCCYCQKPNPVQHGRAWDIEHVISRALNATFMFEPENLAVSCIDCNLAKRDADILAKPRRTFPRNSDAYTIVHPHFDDWGDHFVLGQIVYAPKTAKGAETLRVCKLWRFYEMIGQESLLATDQRYVELAERVLFAKTPVEAEPSVLAMRALIQDAKDGA

SEQ ID NO: 80960 - protein, 415 aa, Shewanella halifaxensis HAW-EB4
MTGYIQNINTKIPFTDKVVNIELQGKSLILTGGNGCGKTNFLNHLLEYLTERVINRKNADPLDLHRRINSLSQSMAQYGASHESYEGWKRALEIANDKLFELENPILSLSNLDNYVVNYQSDKALLTMFKAVREAKIAESTSALSTSNLADQVTNKRRGSSAGSLFEQYLVSYKTVQAYAESPSIDNDPALASKVKSWFEFLQDNLRYLFEDETLKLRFDSKLQTFFIQQEHKEEFRFQKLSSGFSSILAVYADLVTTIQLTEITPDEIEGVVFIDEIDAHLHVSLQRKIFAFLTKSFPKIQFIVTTHSPFVVSSVSDAVIYDLSKLEQIDDLSMYSYESILDGLFGVSSSSDLLNAKVKELNEEATKLQLDIGKVESLISELRQSESKLDSESLYFLESAQLSVLKAKAKSTDV

SEQ ID NO: 80961 - protein, 219 aa, Shewanella halifaxensis HAW-EB4
MFNVKRGDEVPASLAARRSYKDEDVVKALERAFHKKCYLCETKEPQDINVEHFVAHQNNDDLKYDWSNLYFSCGRCNNIKLQYFNNLLDCCAPNQDVFREIKLLPPRTPGARKLVVERQSEDARSVETEQLLEKIYNSDHTVNKAVTGSYLRKKINTQFALFHKWLNVYYAEDALEAEREDALERIQVLMSDQSQYSAFIKWCILDDEDLNELLGPLIN

SEQ ID NO: 80962 - protein, 415 aa, Shewanella halifaxensis HAW-EB4
MHFKKLEINHWQQFETVDLAIHDRLTIITGSNGCGKTTILNLFSKHSGWQNISLSTPKKDSSTGVVKYFSRLFKGNTSESNNTVGKIHYSNNVEALLLVKDSDVAQYHVQIQNQQPLKSFFIPSHRTIFRYQALNHIPTAKKNKQNAFDEVSNANKQRYNGSSSNQSASFLMKTTLIGWAINGYGVTNNNKTIMPQDNEQIKFYEGFQEVLRKILPKTLGFKEFEIRNMEIVFICNDGSDEFLLETASGGISALIDIAWQIYMYATKDNPDYTVIIDEVENHLHPIMQRRILPDLLQAFPTAKFIVSTHSPLVVGSVKNSNIYALTYNEENKVESKKLDFLNEAKSASEILDEVLGVSFTMPIWVEERLNQIIDEYSNKKLTERDFSLLRSQLAELGLEKMVPMAIQGIMEGQDD

SEQ ID NO: 80963 - protein, 193 aa, Shewanella halifaxensis HAW-EB4
MIKLNRPVCPHPDALARGNYKHPANKEALKAANSDKCMYCESKISQISFAEIEHFKPKDNDKFPHLEFVWENLGYSCQKCNNQKSNKFHNDTPYIDPYHDEPANYFYAAGTWLFVKNGCERADLSIRDIGLNRPELLEKRLEKITEIQKAITACYRTGNVSLRDFALAELRREAETKKEYSFFVKALISAHAV

SEQ ID NO: 80964 - protein, 445 aa, Methylobacterium sp. 4-46
MYVTELRIERARSINSFSIRLPPDQYAGWHVILGDNGAGKSTFVRALALALAGPNEAKALRYPFNSWLREGQEGPRIDLAVFAEPETDGLDGGGRRPQGNRLRGGVELVIEQAGFTSSVQVNSIAGSGPGGPLSRGPWGKGAGWFSASFGPYRRFTGGNRDYDRLFLTAPRLAPHLSAFGEDVALTECLEWLKELHVLDLEPIPDRSGDLTRGLLPHLTAFINGSGFLPHNTRLNKVTSQDISFIDGNNSIITVEQLSDGYRSVLSMTFELIRQLVRFYGADRVTRRIREGSMEIDLPGVVAIDEIDAHLHPAWQRKIGPWLLRVFPNMQFFVTTHSPIICQASTKGSVWRLPTPGTNEQGLKVEGDALRRLIFGNILEAYDTTFFGEGIGRSEASRELLERLARLNRKALKGTLTAEERTERDDLRAALPTTSTVAQRTGLPVE

SEQ ID NO: 80965 - protein, 268 aa, Methylobacterium sp. 4-46
MIRLPDRHLTQRVLEGLARLQSEVDKLTAYEDRVQHARALFKASNTRTNPTFREIRGALDEICSGNRRCCYCEDSYADEVEHILPKDLYPELTFSWLNYLYACGPCNSPKGSRFAIIDQNGALIEITRKPNDPIVPPPHGYPALINPRTEDPFFYIELDLIDTFMFLPNEDLDEVNYLRAGFTIQLLSLNIREVLVQSRRTAYGSYRARLYEYRDKKALGSSQQELNALAQGIKSMGQPTVWFEMKRQAVLIDELEDLFGEIPEALSW

SEQ ID NO: 80966 - protein, 736 aa, Burkholderia cenocepacia MC0-3
MRRISRPIEPPPLLMSEQVLEEKKKIWDYLRRDRKDRLQRRDGLNDDIFFNHEFRRDLWHIFSGKCAFCESKADDDGQVLHLRPLRFASGDTNSDRDYYLWLAFEWRNIFYACSFCLKAKGNRFPVSGNRAIYLASFDDAVRQEQSLLLDPTTEDPAKHLRFLYDGSVLPATERGEDTAEVFQLNRENLVRDRQGLVRKVFDFLKSDDPNYASISLESLLFNDAAHAGFLQGILKRIDSAWRVAEPPIKGNGEAFVRRFLDVWSEADQGRRSQIHAVEVQIQDADHRSQFAAQEQFAGSILERTPSLLISGFQVVDREISRIEVSNFKAIDSLELNLRSIRSERSGTPALMILGENSTGKSSLLSAIGLALIGRREASKLRRFLPSLVRSSATDRFDQLDAPRVAVDVNFHFSSHTASFKYDPIRRLVDGTEDQSTIVLGYGPRRYFSPKKRHHATGAAARIRTLFDPLATIPYPADWLRAQTGARFDTIASALRIVLALDDDDELIVEPDYLAVRANGRTTPIDSLSEGYRSVFVMTVDIIRELLNHWQNLEQAQAVVLIDEIETHLHPRWKMQVMTSLRRVLPRVQFITTTHDPLCLRGMDDGEVVVLQRDSESAIRQLQDLPSVSGMSAEQLLTSDYFGLASTADPSTEIQFARLAGDVARRNRDGVLELAPAMETMELVNRLTVGDSPTEQIIQEALVRYLAERESRKGDARPALRAEAVEAVIKALRSSEG

SEQ ID NO: 80967 - protein, 299 aa, Burkholderia cenocepacia MC0-3
MRFVDRASVDEPRSLADPSAAVAAEINEAQLHYRTYDPLDNDAKAFDFKEYKSYDVQNQLRTLFHNKCAYCESDLGDTLEVEHFRPKGGVTEDRAHFGYWWLAHTWTNLLPSCIPCNQKRYQHLVTEEMTVDELTKLLASKAKVAYGKANHFPIAGIRARCSTDILHDERAELINPTFDDPTIYLKWSTSGHYSVVIPRSSDADGIARALSTISIFALNRARLVESRTRILNMLRFQAQKMFESLERDMVAGGAENYLDLALERVEIMRQFHDSNQPYSAMVKEFVDGVVEQLQRRVAR

SEQ ID NO: 80968 - protein, 503 aa, Clostridium botulinum A3 str. Loch Maree
MEISIKKNDKFRITKFIIDEIKIISTGKFEDTSKIYTSVVIGENGVGKSILLSKVENIFNHIYKIINMERLPYMRNTISYELEYKLDGNIYKALYSNNEIEFYIDDIKIKDKSLFKIPNKVLCCSFQMNDKFTFRKENNKEIIKYLGIKTTPTMTNTSSISKKICNNILDCINNFEKTESLIKCFDFLNLEKEILITYKLKQIQRFFEHEITIDTIVDKIENGMWKNRKSAAFGKGILEEIRNDKEMLSRLVRQIYIFMKERRKGNEMRLRFKLGERYSYFKEYIDLEALEILIKLDIISNPNIKVQKQGYYDLERGSSGELHILFLLTNILSNLEENSLILIDEPEISLHPSWQIKIIGLIRNILEEVNKSCHIMIATHSHFTVSDLQPSNSSLHILKTDKYTGNLICEEVTSNTYGWSAENILLNVFGVPSNRNYYLIQKIDKLLSDVSNGNIKSVINEKNELQSIASNLLDSDPLKVIIYKMIKRAEKDYKQDNEYTNPI

SEQ ID NO: 80969 - protein, 400 aa, Clostridium botulinum A3 str. Loch Maree
MSIQIPYKNSAVDSDLKNGTDWTSKDAKYLKIRKKLKDYLCDINSQCCFFCKSKINTGNSNGTIEHILSKSEYSMFTYKPENLTYSCIRCNLLKSASKVLTDEEIKKKMNYTYNTYPFESKSFKIIHPYLDDYDKCITLDDIFYKGIDSEGKGSNTIKLYNLNRLELAENKIKTEPSAFINQFLHLISNGYNLSEEEIESHIDFIFDNIKDNAINISHRPITFIEKFLNTNKKNNAKLISAINILDLNKVDIFKHYRIMIDELESSKQYDYIKIINSTFYNLEEETKLINITEEVLKTISALTRSSERCEELELINISHMFMMITKFDKYSNNEELKIKVSILNKLAYLCMCIGFYNKNENQNVIKSEPNTKRLKEKIKKDKEYLKILKQELKNARRVAQ

SEQ ID NO: 80970 - protein, 452 aa, Escherichia coli SMS-3-5
MMNIRTLKLTNLGRFEELEVHLAPVEEFKSNVTVFIGNNGAGKTSILKSLATSLSWFVARVRTEKGNGSPIPEDAILNGRSSATIELQVLNTHPATEAATPYRWLLARTASGKKSTTASSLQEASQLAAFYRDQYTQNSGASFPLIAFYPVERVVLDVPLKIKERHNFLQLDGYDNALNQGIDFRRFFEWFRNREDAENESGLPQDVLDKLSTRIDLDNTVLNALTAIMASSRDRQLTAVRTAISRFMPGFSNLRVRRKPRLHMSIDKNGQTLNVLQLSQGEKSLMALVGDIARRLAMMNPMLENPLNGEGIVLIDEVDMHLHPTWQRTIIQRLTTTFPHCQFVLTTHSPLVISDYKDVLVYSLDNGELTQLPSLYGQDANTVLLNVMDTDIRNATVAEKLNDLLDLIQKNDFINANALLNTLSLELPENHLELVKARMLLRKQEIKHARNN

SEQ ID NO: 80971 - protein, 219 aa, Escherichia coli SMS-3-5
MREITKGQPPASLQQWVRAKPRDKNANQWFQELYAQKKWDIVGDLSQQCAQEQFYLCAYCCDRVTGTNRDTVNEHVEARDLAPARSLEFTNIVASCKTKGQCDDSHKNQPLLLTPLMPECETEFIFKISGRIEGTTPRAIDAIKVLNLGDSERNNRALIEKRKQLSDSLLWANGIDPSEGLEDDDLLQAVIDELLTPVDGYLAPFAPVVANILKNWMTA

SEQ ID NO: 80972 - protein, 437 aa, Exiguobacterium sibiricum 255-15
MIIKEITMKNFHGFKERHITFSDQFTVLVGNNGTGKTAVLDGLAVALGSYLSGLNGVHSRHIKRDEIYREIYIHGGLSDIQMQFPVTVSCRGYVEGEYLEWSRSVNSEKGSNTSKEAKPIMEYASKIQSMVSKGQSAILPVISYYGTGRLWVQKKDQNEKQKKSNRLEGYSYCLDPASHEKHFLKWIEKMTYIELQRKEAPTVLSAVKKAISTCMKDWETLEFDVDSEELRVIGKDNNAIPFRLLSDGIRNTIGLVADLAHRMAQLNPALKESVVELTPGVVLIDELDLHLHPSWQRRIISDLKRTFPKVQFITTTHSPFIIQSLEEGELRRLHEEDDDEVVSREEFVNRSIEDITENVMEIPYVQRSQKQIEMYNVAQQYYKLLKEGKNISSDEVENIKNKLDDLESLYSEDIAYYAFLQMERKAAGLEREEDETN

SEQ ID NO: 80973 - protein, 235 aa, Exiguobacterium sibiricum 255-15
MRPIERGSIPLDRDQNEIEFNFYQQSRGHLLTRLGSYCSYCERYLGGNIAVEHVRPKSKESNLELEWDNFLIACNNCNSIKGDRSIELDKYLWPDKDNTTLAFIYITGGLINVSPNLNPEVIEIAENTIKLTGLDRVPSDDPFLNPEMKDRRWSERRTAFEKAERAKRNLFVNNTESMREQIVDTALSTGFFSTWMTVFLHDIDMLKRFIDAFPGTSKACYNSSYTPITRVGGTL

SEQ ID NO: 80974 - protein, 414 aa, Nostoc punctiforme PCC 73102
MLKELHLQQVGPAAHFDVAFADRLNIFTGDNGLGKSFLLDIAWWVMTTNWAEQPAYPQRVKGENPQITAVVSNKKNIREYQSQFDFSEQQWRNLQMPPLLKEVVIYVRVDGSFSIFDPARQRDIAYNFNPNTLWNGLKSKDKVICNGLIQDWVTWQNQPNKYPFELFSNVIKKLAPHPSEWIEVGETTRVSIEDVRDIPTVNLPYGNVPVTQTSAGMKRILGLAYLLVWTWYEHKKASELRQQKPVNQIVLLIDEIESHLHPRWQRVILPAILSVVTELQPRMKIQALVTTHSPLILASLEPNFHEQEDKLFLFKLQDSEVSLDEVPWSKQGDIVGWLTSDIFGLKQARSKEAEIAIEAAEAWMRDDDMNTFPENLRISTQIHQELQRVLPGHDPFWPRWIVTTEKRNSGLSGV

SEQ ID NO: 80975 - protein, 193 aa, Nostoc punctiforme PCC 73102
MMPFNPPPEPPDFDKKVRQPGNAWLAKNRDPKKGTRDYWSPFKSYLADGFNNLCGYSVMYEPVGTVDHYRSRENYRDLAYEWSNLRFASAWINSSKGTLDDQVLDPFDLGEDWFEILLPSLQLVLTDKVPPQQRQKAEFTLERLRLRDDERVLRQRQQWYQLYLDGDLTLQGLEKKAPLIASAVKKQQQAISQ

SEQ ID NO: 80976 - protein, 423 aa, Chlorobium limicola DSM 245
MMKIRTLRLINFRGIEELSLPFESGLTVIAAVNGGGKTTVIDALAMLLSWLTARTRRDSGKGRYIKDVEIKNGAKFSLISAQTSSGEWLIAKSRVGTGGISMSNFTALQDIVRHFRHQLESENSLPVFTCYPVDRAVKDTDLPQRIRTRHEFDPISVYDNLLSSGANFRLFFEWFREREDIENENLRANGILNNVDPLEFLDPQLQAVRSALEQFLPEYHDFRIKRQPLRMVVTKGDQELRIDSLSVGETCFIALIGDIARRLAIANPRKQNPLEGEGVVLIDEIDLHLHPAWQRRAVTNLTKVFPNVQFVVTTHSPQILSEVAPESIRLLYQEDNLIKFTIPRQSIGLNSAEILRELMDDPGINSTVPKRIEEIAAKIDHDEFEAAKELIEKLKVDLKGSIPDIVEAEATIAMLEPERGAGE

SEQ ID NO: 80977 - protein, 216 aa, Chlorobium limicola DSM 245
MIPIAKSTEPQSLQHYRLQKGTVFDGENFTPVKQDIRVQLVAEQGLLCAYCMGRIEPDDRNMKVEHWHSRKRYPAQQLTYANLLGCCCGNEGFPDALAHCDTKKRDDDLLFNPAEPGHHSQLKIRYEFNGTIKSDDALFDRQLNEILNLNYSRLTDNRKSVWSSVTKTLSGITGKATRAQIEGLLLIWQQKNREGKLPEYCGVAQYYFEKKLKRTL

SEQ ID NO: 80978 - protein, 447 aa, Pelodictyon phaeoclathratiforme BU-1
MIKHLKMTNVGPAPKMELEFGKRLNVITGDNGLGKSFLLDIAWWAMTRKWPAELNPKLTSGKVALPTDKKHEAEIDFSFSAVSKTKGFISTFEPRGQSWTVQKGRPANPGLVFYAMADGSFAVWDPARNYWKSKNPDENKERPAAYVFSPKDVWDGLQNQDGTWLCNGLIRDWAGWQKEKGRAFESLISVLDVLSPSSTEKIVTGSLTRISLDDVRDMPTLKMPYDQEVAVVHASSGMRRIISLAYFLVWCWEEHVKAKELLGEEPETNTVFLIDEVESHLHPKWQRTVIPSLMKVIKQLTKSPDILLIDDTDPVHPHHTLMISDVQLIAVTHSPLIMASVEPLFDENQDAWFDLDLVGNNVELTHRQFVRQGDVRSWLTSEAFNLKSGYSIEAETVLEEAALALSNEQFSKDDALSLEQRLRAVLSDTDPFWMRWRFVAEKKGWSL

SEQ ID NO: 80979 - protein, 199 aa, Pelodictyon phaeoclathratiforme BU-1
MIHVDAQTEPDSFNSNVRQKGLARLIEKNIPLDKPLPPKTDVEPYWRFCLDDLHTTYNGCCAYLAVFFERVTGGGSVDHFIAKSKRADLAYEWSNYRLTCSRMNSRKREYDDVLDPFEIENGWFRLEPITGRIYPNPILTPDQQRTVQASIERLNLDDAGCREIRARHYQDYCEGEYTAEFLRKRSPFVWLEAQRQGLL

SEQ ID NO: 80980 - protein, 422 aa, Pelodictyon phaeoclathratiforme BU-1
MKIRTVTLKNFRGIEELCLPFDAGLTVIAAVNGGGKTTVVDALAMLLSWLTARTKRDSGKGRYIKDVEIKNGAKFSLLSVQTSSGEWLIAKNRIGTHALSMSNFTVLQDIVRHFRHQLERDHSLPVFTCYPVDRAVKDTDLPQRIRTRHEFDPISVYDNLLSSGANFRLFFEWFREREDIENENLRAKGILNNVDPMEFLDPQLQAVRSALEKFLPEYHDFRIKRQPLRMVVTKGDQELRIDSLSVGETCFIALIGDIARRLAIANPRKQNPLDGEGVILIDEIDLHLHPAWQRRAVTNLTKVFPNVQFVVTTHSPQILSEVAPESIRLLYQEDNHIKFTIPRQSIGLNSAEILRELMDDPGINSAVPKRIEEIAAKIDHDQFDVARELIQKLKVDLKGSIPDIVEAEATIAMLEPEREVGE

SEQ ID NO: 80981 - protein, 150 aa, Pelodictyon phaeoclathratiforme BU-1
MIPITKTTEPQSLQHYRLQQGAVFDGQNFTPVKQDIRVQLVAEQGYLCAYCMGRIEPDDRNMKVEHWHSRKKYPEQQLNYANLLGCCCGNEGFPDALAHCDTKKRDDDLLFNPAEPGHHSRLKIRYEFNGTIKSDDALFDCQLNEILNLQ

SEQ ID NO: 80982 - protein, 471 aa, Vibrio fischeri MJ11
MIIKSVLLDKKRYKLVESDYCNKNNAFTVVVGSNGMGKSRLLKRIVNNVKNINIQGDRIPQNYSRQIDFDLDGYNASFYSPVSESKSFVSIDKNEVGSLKGGVKVIAVTTTPFDKFPIEYKGNEIYRYHDDHKYTYIGLKVSKNSLNQSNYLNLLCRSMLSSDRIFKNKKLFSLLNLSSGINIQLKAKLPTKNSDFMVYNNKERRFEVLKLNEDYFKSFLSRHHITIYEKIRNVDGLLLKAYEAYSNCFPFFINNINPESNVIPKKDLIFLLDIGLVNVSDIIFTDIKHEEIKISELSSGQKCMILTLLNISGSITDNSIVCIDEPEISLHPRWQKEFMKVLIEFFSDFKRCHFIVATHSPLIISELLNDNCFILNMDVGYAKKANEYKAMSSDHQLVEVFGIAGNNNEYLNRIVVSLLSKLSKNGDLNKTEKLQLEVLVRFSAEMDKDDTVKELIDILNLAWTKVSKNAK

SEQ ID NO: 80983 - protein, 211 aa, Vibrio fischeri MJ11
MLNSVVFSDAESEQIQNKLLCNGFSSENWSDKDLDNIKKTIKNHYLKEQKNTCPYCKQKIKSNNGRHWDIEHIIPRSMTLSFMFEPLNLCMSCVDCNLAKSDKKVTNSKAKRNYPIKSNSFSIVHPHLDNYHENIIVIKEGFYYVALKKKGEKTIEFCKLNRFYEFSEFGSSVQDDDRIFLLSEQLKVEKNEKIKKQIRRNIAELAIKGSA

SEQ ID NO: 80984 - protein, 530 aa, Thauera sp. MZ1T
MRLDKVSIDGFKNLRGLELDFDERQLTTVLIGQNGAGKSNLIEAITQVFRWVDLRRNEPRFHYRVTYRIQPQGPAVPNPPSVCLSNFPDEPAIRVNGQEVKRTEFEKRKTEWFPDLVFGYYSGGSRRLEALFDSHQRRYYDDIKLEDNEAKVAKAQEARRLFYCRPIHGVLAMLALFAFPDPKVTAELAGRLGITGFHSLLALFREPWFAKGRKTSADDLWGAGGPAGRAARRFKELAFHPFALEGNAVDDYRDKKQVEPQFAAFLPSLARLQQLAEQFKNEREMFYALEAMDISDLVREIQVWVTRSNDTSGDVGFADLSDGERQLLMVLGLIRVSRGKRALFLLDEPDTHLNPHWQHSYLKLIEDWTGIAAEKDHCHIVLTSHNPLTISALSRDEVRVIAQTDDGRVTAAAPYADPRGMGFTATLTEIFGLATSLDVETQRLVDERNELVQAPKRDDGQQRRLIELNDQLARLGFLNEDREPLYQDFLRAWHDVRYADRPPLTAADIEARQRAMKTLIQQLMVSEAKS

SEQ ID NO: 80985 - protein, 287 aa, Thauera sp. MZ1T
MIFVRRDPKLIPEKVLRVAERAQAELEALPAEQRAAFIEKKKRIWRAFARYLSKMSYGKCWYSESDCVHSFMDVDHYRPKKQAKRSDTDSDDGYPWLAFSWDNFRLSAQRANQINHDDATDETVGKGAWFPLMQGSRRATWDDRCIEDERPVLLDPAKLADVRLIEVTATGRMGPTRFCLGEYERTRVHDTVRLLGLDLPGLVSARQGAMRLVQEIVELVVQNKTAAELSAAASAFVSLHLRADSQLDMLQRLTKPDRPFASAARAQLKLMGYEDLCLRLEQGQEAA

SEQ ID NO: 80986 - protein, 439 aa, Cyanothece sp. PCC 8801
MKIDQLEVENFRGFKKEVFKLSEQFTVFIGDNCTGKTAVLDALAIGIGSLFLGFTNVDSRHIKDDEVHRISYIKGETYTLEAQYPVRISCRWFLDNNYTDLLSNILFISWSRELTKKGGRTTRTDATDLINFSKKLQQKVDQGEDIILPVIAYYGTARLWVQKKQKAVETLKPGSRMRGYIDCLDSASNEKLMLRWFKTMEIAEIQRKEPIKVLRAVKEAVANCVDYWNTVSYDILQDDLIITSKNGESLPFRMLSDGVRNMLAMVADIAYRSAVLNPHLEERAAIETPGIVLIDEIDLHLHPKWQRKVVNDLRNTFPKIQFIATTHSPFIIQSLKDGELINLDKPEEIEEYENKSIEDIGENVMGIENIQRSEKYQEMMRVAEEYYKVLQEAKSADSQQIKQLKQKLDELIEPYSDQVAYHAFLKMERQAAGLGDSQQ

SEQ ID NO: 80987 - protein, 227 aa, Cyanothece sp. PCC 8801
MRPVIRGEVKDKNTDFTKYEDAKPYLIKNIGEYCSYCERRVTNLLAVEHIQPKEHYPELELVWGNFLLACTNCNSIKGQKNINLSDYFWCNRDNTFRVFTYFDGVVNINNQLTLIEQNIGKKTIDLIGLDRVPGHRKYSNKDTRWQKRRDIWGKAQRSYDNLQNNNTEELRQTIVDLALESGFWSIWMTVFNDDKDMLKRFIEAFPGTCQNCFDQDFNAVPRPGGIV

SEQ ID NO: 80988 - protein, 550 aa, Rhodobacter capsulatus SB 1003
MRIDRVYIDGFRNLQDVEADFDEGCLTTVIIGQNGAGKSNLIEAIVEIFRHLDPPTSKHGGKLRFTFEIDYIIKGRKVRASNRDGSTKVLVDGELMPMTRFQDSKADLFPDLIFGYYSGTGRRLEKLFDDHQARYYNVINKDRPEAEYAAARTARRLFYCRPVHGVFALLCHFAKPSEKPDSANVLSKQLGITGFHSALAHFKEPSWFNQSNWKKARASASPGRGRRSYSDLGEQAEDVWGARGPAGECARALKDMAFHPLSVTGKVVDDYRDKPKVEAQLACFLRDKAALQKFAARYETDQDMFAALEAADISDLFREMLVWVTRDGNDSGDVSFSDLSDGERQLLMVLGLIRVSRGREALFLLDEPDTHLNPAWQLTYLELIKEWTDVAADKDRCQIIMTSHNPLTIASLTRQEVRVMQQSEAARLVVSEPFADPRGMGFTATLTQIFGLSTTLDLATQQQIDDRNALARIEQRSEEQQKELISINEKLNRLGFMNESREPLYQEFLSAWQDVRYADRPPLSPEAITKRHEAMKDLIRRLTTKAGQAH

SEQ ID NO: 80989 - protein, 284 aa, Rhodobacter capsulatus SB 1003
MIYVRRDPALIPERVLKVAERAQAELEALPPDQRVAFIKKKSHVWTGFKKYLSKMSYGKCWYSESSDPQSFFDVDHFRPKAEAQRGDGGEKDEGYPWLAFDWDNFRYSAGRSNRHSTDEDTEEVVGKGSWFPLCPGSPCATWDNRALAAEKPVLLDPTNVGDMRLVKIGSSGSVEPSGICVGTNRERVAKSVKYYGLDLPALKEARLQVMREVQEMFEVLVQTVAAANEVPAAADLLPVPKEAELITAKTMPNSPYALAARSRLIELGMPELIARPEDYPAPVI

SEQ ID NO: 80990 - protein, 430 aa, Cyanothece sp. PCC 7425
MRVKSLKMQNFRGFENLTLDFSETEPTVFFGINGVGKSSILDCLAILLSRILTEVQTFRSLKSSRPLILKESDISSEKDECANEALIFLKTSSEFIVKSSIFKAKHTYAHAEQQIDEAIIFQKYIYDELKSSPDANIPFAVYYSINRHLSEVILEDGGEQYSNQFAAYDQAILDGGIYFEDFFYWFKSTEDYENEVRLNTDIRYQNHQLQSVRNAIYQLIPTFSNLRVRRSPPLRMTVNKKLGDQEQELTINQLSDGEKCLLAMVGDIARRLAIANPGLENPLEGEGVVLIDEIELHLHPAWQRQIIPALTRTFPNCQFICTTHSPQVLSELKPESIYCLERTEEGQVIAYHPHNPYGKDSNYILEVLMGVTERPKRIKEQLLELFRLIETGQLEEAKRLQRRLEAEIGEDEPEFAKADVLIRRREAIGR

SEQ ID NO: 80991 - protein, 221 aa, Cyanothece sp. PCC 7425
MKYIEKGEEPSSFTGWKAQKNENWEPTWDNLQAPQKPELHEALLFEQGYICCYCGMRISKTNSHIEHLKPRSHFPELALDYNNLLSSCPGEGDEKIQSEATKLKHLHCGVGKDDWYDPTLMVSPLAPNCTDYFSYTAFGEILAATDLTLNAAALETIKRLRLDHSKLTLIRRRAIEAIIPLDDDYTQEEIETLIESYSQRNEKGEFVRFYAAVIYILKQLI

SEQ ID NO: 80992 - protein, 464 aa, Cyanothece sp. PCC 7425
MTEQPKQAKSKRQAESPSDKPCAVYFLSLEVERVLCFKDKQILNLSDGNGNPAQWTVILGNNGVGKTTLLRCLASVEVETAKDFTSDNSHIILSTDNISLWNDESILGKQSAELNIYFAYGASLSSPNSIEQTTENKTEAFQTLEISLIFNSLFRALFPSPYGNREELLNLIHYGYGATRRTGETSLSEGINHGNSASLFLEGISLINAEEWLLQTDYSMRSASGKTRDRLQKQLNQIIDVLKRILPDVEDIQIAPADEERSRPTAEFLTPYGWVQLSSLGLGYRTMIAWMVDLAARLFQRYPDSPDPLAEPAIVLVDEIDLHLHPKWQRTIMNFLTERFPNTQFIVTAHSPLVVQAAKNANIVLLRREGDRVVIDNNPEIVDNWRVDQVLTSVFELPTARPADVEPLLLQRQELLSQAHLSEADEAKLRELEARIGTLPTGESPEDIKAMDIIRRAAKLLENS

SEQ ID NO: 80993 - protein, 262 aa, Cyanothece sp. PCC 7425
MIHINKPATPPQKLVVDGKRKRRSHSQSYTRNSDAYKLGEKSFNFDSNIYAHPTVKQALILAQHGKCCFCERLIGTDGDVEHFRPKQAYRQEVGQQLQRPGYYWLAYEWDNLYLSCTACNQRHKQNLFPLKDPALRATDHRQSINQEEPLFVNPGRENPEDFIGFRGEFAFPINSSQKGPTSINTFKLNDNSRGLPEVRLQQLKRLKQLQCIVALAASQPNNLELQNEAKDAQLLLQDAVLPQSEFAAAARWAISSNFQFVI

SEQ ID NO: 80994 - protein, 577 aa, Dyadobacter fermentans DSM 18053
MIDIIELNERIFHRLEQSDLLYTFRKSNYGSRLEQGYWFYGNENQMAISFWSGMDWKNRTPNIVFVITQNGNVYLEINVSDSDRKREFITNYLADPLELGSDSRKFRKYYADNLDLDEAIFEFEKFLNSDKIIIDEIINRESKSFFLPNEESISNIDRKEFRQRLQNVHKYRRTIVDIERTESKQALEKPTKLQSFRVWDSGPISYTELTDIPADNKWIFITGENGSGKTSFLRAISTALGYRSLDRNEQMRNPNFRFEARLFNESSNITESFTREHNEGTKNRRPKVSGLCMYGPFRLLNSRKLSEAKFKLLYTKSGSFESLFSDNSPLLDIDKQLDIWKKDRKSLHLLEKRQYHIKNILTAVVPNLYNIDLSLSELGKPVEYQTRRDDISNQYSTPWENLSSGTRSVFSLILDILLRLYDQQPKVVDPAELKGVVLIDEIDLHLHPLAQKELVVNLSNVFSDVQFIVTTHSPIPLLGAPRNSMIYVMRNYDGNVSIERMDDKVMFRKILPNAIFTSPIFGFSDLVPDAKGKDEIPYLDDDFNQVKRRENLNRDIREYLNNDKQKELLALFNKEKQ

SEQ ID NO: 80995 - protein, 313 aa, Dyadobacter fermentans DSM 18053
MRNVTRSYLITDAPDILQAEDTIAASTIIAKAGDASGIKRSLYSDPYTAGPDEGNQSRVIDKLNNWYFGKCAYCERFYKLDVEHFRPKGEIRDENNALTSNIGYYWLGYEWSNLLPSCISCNRDGGKNSKFPYIAGGKTVTAPTFNESGNLDREHCIVDHELLVGELPALLNPEVDLNVERFFAFEIDDDTEGIRIKGVDADRRGEITAIVCKLNRSEIRRERLQHVVMEFVNSVHNSVAVLKSSGDNTNFKDQLNLHIQKIYRDCDEIKLSHTLLRKYIVATPLNFQKIVIPFIIPEFKAILSEAFTNYVHI

SEQ ID NO: 80996 - protein, 442 aa, Rhizobium leguminosarum bv. trifolii WSM1325
MALRLDKLSLTNFRCFANCEIEFHSGLTVLVAQNGSGKTAVLDAAGAALSVFVNTLYPLEKIWRIERSDVRLIPGQEHKMSPCLPVEYEAQATVQATSVTWRSAVRTYGDKVRPSTRNLGPISMAAQPFLSDTAVLPLIAYYGTGRLWNEQRQTEYRRSSVTNVDERVAGYADCLTSSSSFKGISAWFEHRFRQTASPLYRESLQTNLAMIEGVKTATDTVLQPTGWSNLRWDDELHTLTAKHDGRGELPLSMLSDGVRTMLALVADVARRCASLNPQLSDQAALKTPGVLIVDEVDMHLHPSWQQQVLGLLQSAFPALQIIVSTHSPHVLSTVEKSSIRVLHVKNGDVVVETPLVQTRGVESADVLATVMDVDPVPALEESTALSAYRKLIEAGEAEGQEASALRYRLNAHYGESHPVMLEADRLIRFQRFRLAKSRPESA

SEQ ID NO: 80997 - protein, 213 aa, Rhizobium leguminosarum bv. trifolii WSM1325
MWRLDRIVYPAPPCLGGYHHSTHSWQDVISGHKAEIRMHLEAMQGRRCAYCEGDIDSLGQHIEHFRRKSLHSALTFDWDNLFWSCDQTDSCGHFKDNGAGQYDVADLINPCFDDPDVFFVFQADGTISIRHGLSAVDEHRARETLRILSLDAEWGRLRVMRKIAVSGYVDDADTAFNEGWPPDDICSYFAEELECARNLPFYTAIRHVLTERQ

SEQ ID NO: 80998 - protein, 769 aa, Rhizobium leguminosarum bv. trifolii WSM1325
MIFIDRNSVTNPLSDGTALAMKVGLENRRAAEFFSSPSRQRRFDFTVYRQFKPALMALFSNKCAYCESPFMSSDGDIEQYRPKSSVVEAPDHPGYWWLANDWNNLLIACHFCNRTGSQVGADGIREMIGKGNRFPILGSRAMSPADDLDGELPLLLDPTRDRPETHLVYSESGYVSSETERGNITISLLGLNRPALVQQRAETLRRYRDLFQTAEKLLTTEGPFESDIAYRMRDDAQQMASYQAPYAAIVRQFMQADLRRLTSAHGQSSSEVVPVLSSLQTFQSVSSTATPARQKRAEKTSRDFRQRMADYSLSTEDGIRRYKSQRRVIEKISIRNIRALSEINVNLVAMESAPGGWLMLLGENGTGKSTALQAVSLVLAGSANVVGLIKSGTLELRDLVRSGARSGHVEIKLSGFDKPHRLTVFRNRLEFFAPSGEKTIITRSGTVEGTSWIPQTVFVAYGATRLLPRDNALTNDPDEYARIDNLFDPFVPLIDAQQWLSKLPANYFDRAVRVLRDLLAIKEEDTFFKRAGKIAVRTSGGSSIPVSRLSDGYQTVFAATLDILEMLYRIWPNLEDAEGIVLIDEIDAHLHPAWQMQIVGRLRRALPGVQFIATTHQPLCLRGIRAGEVAVMRRLGDGQIEVVSDLPSPEDFLVEQLLTSEFFGLNSTVDPKTEEDFDRYYMFLAMEERSEEQERELSALTISLHDRRQLGTTRRESLYLAAIDKIIAEQKTRPYQPHQMVQELAVREISEIFDNLVDELDNEAGGDRV

SEQ ID NO: 80999 - protein, 335 aa, Rhizobium leguminosarum bv. trifolii WSM1325
MIFIERSDAADSLPVYTKPTVKSDNGAAMISRSADELEKAIAFYTDKTRFKNDAKLTNETFNFTVYKDKGLADVLALDFFHKCVYCESSIGHVMPDDVEHFRPKSEVECDAGSLRPGYYWLAGDWRNLLISCRDCNAPRAHREPGQAKGVAVGKGTQFPLSDPSKRVRNHSGNVKLEEAYRLLIHPCIDDPEEHIIFDESGLAKPAALEGEPSIKGKTSIDVYALQRKVLVERRLAEITKLRGHLLDLISLVRKHERYVAMPINTSFDRLENAKDIRRSLKTIIDMLRPEEEYVGAKRSIIRAAYARGDFDILTAHGIRLDQFLKIKRRRKEPPR

SEQ ID NO: 81000 - protein, 452 aa, Dickeya paradisiaca Ech703
MIHELRLANVGPASTMHLTFGNRLNLLTGDNGLGKSFLLDIVWWALTRRWPAEVNPKLAAGKKALPAFDLTGEEASIAFSFAGKVKTERYESHYESTYARREQSWTGRAGRPANPGLVLYAMADGSFAVWDPHRNYWRMQDGIDVQERVPAYVLNPTEVWDGLSGDERSWLCNGLIRDIASWQKEKGAAFRHINAVLKVLSPSTTEVLSLGELTRISLDDVREIPTLRMPYQKDVPVLHASSGMRRILALAYFLVWAWEEHQRAARLLGEDVSPQITFLIDEVESHLHPSWQRSIVPALLRVMGKLNAKAQVQLITTTHSPLVMTSVEPLFDAKRDAWFDLDFLNGAVVLARREFEKHGDVTNWLTSEAFDLKSGRPLEYERLVEDAATLLNQSDVSEKDLDAMYQQFLAALDAKDEFLFRWRFIRGKKVTPEKNDNKIKKGRKNDSGGVTG

SEQ ID NO: 81001 - protein, 208 aa, Dickeya paradisiaca Ech703
MIPVVLQAEPDDFDVEVRQKGHNWLIKKSISLNAPPPKASDLPNYWTHSNYSLWESYGGVCAYLAIYFEWVTGASSTDHFIAKSRNAGDAYEWNNYRLSSLGPNRNKNDFDDVLDPISLQPDTFVINFLSGEISPNYARYSQGSPYATQAESTITRLQLDSQEHRRMRTRHFDQYITGKWSLDGLHDESPFVYAEIMRQGLSDRSLLD

SEQ ID NO: 81002 - protein, 482 aa, Dickeya chrysanthemi Ech1591
MKIKQFRLHHVGRFTSLDALIAPTADYPSNVTVLVGNNGAGKTSILQALATSLSWLVARVRSDKGSGSVISEDTITNGQTSAAIEVMVRDAPPPSGNDAEYHWTLAKARSGKKGQHASQLNAVSALADHYRTALTQNEKSSLPLIAFYPVERSVLDIPLKIRNKHHFQQIDGYDNALNQGVDFRRFFEWFREREDIENENDETVLTNIFENSPEGVLKVLDDIEKADDRINKLAEYDFAGLSEEVKKLVNTMKFMQDIRDKAKDPQLNAVRSAITAFMPGFSNLRVRRKPRLHMSVDKNGEAFNVLQLSQGEKSLMALVGDIARRLAIMNPALDNPLHGQGIVLIDEVDMHLHPSWQRSIIERLTTTFPNCQFILTTHSPLVISDYKDVLVYSLDNGELTVVPSQYGQDANSVLLEVMDTHIRNARIAEKLGDLLDMIQRQQLTQAKTLLDELTAELPATNLELTKARLLLRKQELRGERNH

SEQ ID NO: 81003 - protein, 207 aa, Dickeya chrysanthemi Ech1591
MREITKGTEPASLTGWKRANPTGRYDDLTETERQDIRDACVKEQFYLCAYCCKPISGDNSDTMNEHVQARKLAPRRSLDFTNIVASCTTPNQCDAAHGSQPFSLTPLMAECETELQFMISGRVEGKTARAQGAIKVLNLGDHETNNKKLIEVRKQLVSILLWLKYADELEKDELIQLQIADLSTPQNGRLEPYAPVLINILKGWLSA

SEQ ID NO: 81004 - protein, 420 aa, Leptotrichia buccalis C-1013-b
MKIKNLHIEEYNGLENLDINFESEGKVLDLIVLAGINGSGKTRVLESIRYWFEMFRSKAVNVELFYEENEREVLESLMNSEGLTEVEKEAQKDIEFTDCLKNIKFYNYDYRHNKTENQNYNSKIISRSFRKLKIFPKIIYVPTEINFEEIKKAQTNLKKEYSFINIVDSYEIKDIPSYIATRISKVANEEEDLTMGQVRKKVFEEINGIFEILELDVKLSEISKDENSMPIFTNSSGKKFGINELSSGEKQLFLRTLAIKMLEPENSIIMIDEPELSLHPKWQQKIIDVYKKIGKNNQIILATHSPHILGSVEKESIILLVKNKNGVVEVRTGENFGNSYGQTMERILEDIMGLETDRNPSVHELLNQVREMVKNDNYESSEFERKYSKIKDILGEDDRDLFLVDMDLQIKKGRKNAESR

SEQ ID NO: 81005 - protein, 137 aa, Leptotrichia buccalis C-1013-b
MLKVDKNDEPKFFAEFKKKSNPKSWKDFDFEIKDKLKEYMLENEQKIDGIYFCPYCERQISVEKSQIEHIKPKDKFPKLFHNYSNFLTGCLENQTCGSIKGNKWDDNFVNPVEYNPRDYFEYSISTGEIIPKYENGI

SEQ ID NO: 81006 - protein, 464 aa, Catenulispora acidiphila DSM 44928
MYLKRVTLKNIRGFHGDRRVDLDLTRPDRSYAGWTVLAGRNGSGKTTLLRAIALAIAGPTAASRLIPDFEDWVSHRTSGGTATVELVPDPAVDLFGTHSLPDLQTYYSEQTDPLLTGLAWMWTQPIADRSGKQVRRRQLALTAVDPESSERNQLGPWIDLPAGWFCAGYGPFRRLMGGAADVQRLMQSDDKVARLAGLFFEDASLAEGVSWLIDQHLRTLEKREGALELRTAALAILGDGLLPDDYQIMDVDSDGLWIEHGGSRFPLREMSDGYRSVAALVVDILKQLWAVYGEIIIDDSGGKPVIRQPGIILIDEVDAHLHVSWQKRIGGWLKTHFPAIQFIVTTHSPYICQAADPGGLIRLPGPDERRGAEIVAPELYDRIVFGSGEDVVLSDLFGLDTPYSEQADAVRAELVALEREVVTGRASAEQIERHRELTILLTSSPSARVEEVAARLYERSQADS

SEQ ID NO: 81007 - protein, 252 aa, Catenulispora acidiphila DSM 44928
MIRIVRPRLPDTAAAMLADQTSKIEQAVSQIHMAKRLWKDTNVRSTVLTPHVRPALERMAPGIARCMYCGENYGTDIDHYRPKSLWPLHTFDWLNHLLSCSACNSSHKGNRFPLAEDGSPLLIDPTTEDPADHLHLTLATGDYIGLTSRGEATIKTLGLNRGVLVQGRARAVRDTVRLMREWRIAIERQDILLEEIVLNDLRQQPFTAVADALFRQASGIAVMTIFSADLDTLAFLRDPEVLETASRALVGR

SEQ ID NO: 81008 - protein, 489 aa, Candidatus Accumulibacter phosphatis clade IIA str. UW-1
MILQEAAAKESCAMRLKKITLNNFRCFESFEVTLHPRLSVFVGENGAGKTAVLDGIATALTPVLNYLSSANQRLTGRGIADADFRVEPATVRSGKERWKLADFAQVVAETVDGLKWDYWRPSGTKGQEPKTKHGLTELKSRLQTISESYKSSAPALTPVFAYFGARRGYIEVPERLRESKENYAYPTSALIGALDSLSDFKELLKWFDREEASELRANKGVASDDYAPSQALDAVRETIKTLLDGSYQNPCFNRDHKFVVEPSDGGAPLLVTQLSQGYQSMLALGVDFARRLVLANGHMNYGDQNSIAIALEELHTLRRPDEVAEDLPLSAPLIAPAIMLVDEIDLHLHPSWQQRVLDDLMRAFPSTQFIVTTHSPQVISTVRRENIRVFSTDTDGRTVATEPLANPYGQPSGDVLQSVMLVNPQPPVDEKSDLDRLTNLVDQGRYESDEAKDLFRRLGQALGPGHPQMLRLQRSVSRQTFLVQRDGEG

SEQ ID NO: 81009 - protein, 257 aa, Candidatus Accumulibacter phosphatis clade IIA str. UW-1
MRHVAPTGAGPVALSQANQTPPESSDEVTRRWHEFAPSKQAVIDRLLQDQYMLCCYSELRADLYGLGYHIEHIENKSQNPQRTFDWSNLAASALSSDEGLPKLASYRAAIPGKVEVNFGGHAREKQNQVDTVQFVSIRDPQCASYFAYLSNGEMGPNLNRSLADQARAEYTIRLLNLNSPYLVTLRRNLWDELDALLAQHLDKGWSIEHLCQGEMTPHGRHTAPHYLPALNSFFSLTRQFFGPVAEQTLRQYAPGLV

SEQ ID NO: 81010 - protein, 418 aa, Spirosoma linguale DSM 74
MITPEEFPYIKSLYVNNCYAYRNFAIELHDYKPFSHLILTGKNGSGKSTILRAIHRQFFSEVNSANKAEFSGLFQTVDTAGESVHVKQARVPSTPIPQVVVSFSKQHKITNQGQEVRLMIPQEVFKLYQHKLYSYFSAKRTSEVAKVESPSKETEFTEKMNSSDSTDFFIRKFKQYLVNQKVEQAFSQIEHQVSQIEQVDTFFKKLESAFRKMFDDEFMQIEFTRSNYEFYLLLSDGRRLTFDTLSEGFSALLSILMDLFMRVDLIRKQVNDYSYNPCGIVLIDEPETHLHLELQEQVLPLLTSLFPNIQFIAATHSPAVIASIKQATIFDLTTKESRTSEETAGRSYSDLMRGHFGLNNEYSSIADELLRKVDQILKDYKHQPEQLKAKLQQFFLENEAYFSPSFRVELESMILENA

SEQ ID NO: 81011 - protein, 216 aa, Spirosoma linguale DSM 74
MPAIQQTLTKPKCHESYRNADLFEAFDECFFKKCYLTEGAFFTSWSMDVEHFVPQIERPDLKYNWTNLYPASHDANMMKPRNTPAGGYLDCCDPNDDVENEILCFIDYENDTVHFEARNSTNIKAVNTAKLLQKLHNGDTIETKRKTAELRNAIHGKYKKILELIDDWRVAREIRDVEAEFRTERILKGLLSRKTSFTMLMRSTKAVKRLPPSFFD

SEQ ID NO: 81012 - protein, 420 aa, Spirosoma linguale DSM 74
MATENPRVWFKSISLENVRSFGTKQTINFTDKDGNAARWNVILGDNGTGKTTVLKCIYISAQNSYSFYEYEWSYKGLARINSKGPNVMGLVTGVLGINDNEEKVGFSTKYVPLESGRFSVDILDEFNFTLPERNNFEVIYAYGAARRISAGILNNYAEDERRVVNLFSENSALLNAEKWLIQAEYISLKEPKFATQFLIVLNILKKLFRGEVSDIFIKTETGEPRVFFKTHYGDVRLHELSLGYKTLIAWMVDFAKGLLDRYPDSENPLAEPAVCLVDEIDLHLHPKFQRTIIQFLTETFPNTQFIVTAHSPLIVQSAEDANIILLKREGSETVVADSIDVHSWRVDQILSSDLFGGISPRPPQAEDRMQRRRALLLKDSRTEKEDKELEQLDEELGQLKASESEEALKALELIGKVLSK

SEQ ID NO: 81013 - protein, 245 aa, Spirosoma linguale DSM 74
MIKIDKSAVIVPSILASNGRGEQAADALKALFDKGDTTFVFNKAIYGHKTVKEALIEIQHNKCCFYEAKITHISHGDVEHFRPKAGYQIDEMQGLIKPGYYWLAYDFSNLFFCCQVCNQTYKKNYFPLADERKRANSHNDDYTLEESLILHPALDVIDDHLGFEAEIIKPKNGSQKGAETIKRTGLNRPVLLEERLSYLKTLRFLEEAAKGDTETAMECRAHFKEVGKRKHLYSAMVRANFPDLI

SEQ ID NO: 81014 - protein, 427 aa, Fibrobacter succinogenes subsp. succinogenes S85
MRVKKLRIENFRGIKNLDLDFSNSKMVVFAGINGAGKTTVLVAMQFLFSWYVARLKSPKGKGLSLSDCDITNGEPYAFIEIEVVEKIGEQDQVVRWSLFKKRTSYRKNIERQASRAELNNYADSKIERFIDGKNHNLPLVDFYSVNRVVDSVPLRVRKKHALSPLDAFDSGLNNSVNFHSFFLWFREREDLENELYREHGTKFKGDVQLTAVRSAIKNLLPGYQKFRVKRDPLSFVVEKRGESFNFSQLSDGEKSYIALVCDIARKMAMANPNAEDPLKKTAVVMIDEIELHLHPEWQMGVIDHLKKTFPKVQFFLTTHSPHIITNLKNSEKDMLIALSNGEAVPTKRNQYGQTVDLILNDVFQLRSLRNDDVQKKLDELWILLKKGDCKSDKYQEILSWLKNNINPADPEFFKISLQEKRIEKGLV

SEQ ID NO: 81015 - protein, 201 aa, Fibrobacter succinogenes subsp. succinogenes S85
MISVKKNASLNSFTDYVYREKPRTWEDLHKQTKFPDLYSQIKLALIKEQGGVSAYTEEPISPKSHIDHFYKRSLFPKRTFDWNNLFVDGLSEHYGAKYKDSIVTNKRDYDLLISPNENNVERYFTYMENGEIIVAPGLSKQEAQRADYTIKTFNLNNSELKSRRARILKNVHDFGMGLTPNDIRSALVDAGFKTVVEYALI

SEQ ID NO: 81016 - protein, 447 aa, Haliangium ochraceum DSM 14365
MQIEVENLRGFRRAALSFAAAPEPDAGARPLTVLLGGAGSGKSTLLQALALGLMPRREAAALLAHQPGPWVRLGARARGAQSHPEARIRVELADPAQPQRRFSVTTHIADSDGDAGSATTAGGPAAGPTLRQETEPRTGFPWHRVRVSGYGAVRVPPAPAQTTNARGRASAAKPPRARARDAVATLFDPRARLLPASALFADAAADAAAQRLRLCKSILGIRGSLNGNDLGLVQKRASGSIPLSALGGGVSDIAAWLVDLVARAHAGAPRGLLLVDAVDAQLQPAGQRDLLARVRARCPELQVVVSARSPGAIANRAAAELALCTRRGQQLAVSQDLPPPAGHDADALLRGPWFGLPATTDDATAVRLSDYREGVRAGAAADDRARLREAVRARVGYFVATPLDELAGEVLAAFEAEHTAAESEDERARIRERAAEALRRRLGDAET

SEQ ID NO: 81017 - protein, 253 aa, Haliangium ochraceum DSM 14365
MIDLRGRRPETPPGFDHSPDIARARARIQARAAAGKLLRASDFPALWLAHKDVFAAAQRDKCAYCETESAAAQFGTIDHYRPKTSIVDRASGNRGRRRRPGYYWLAYDWQNWLYVCQVCNHAKGEQFPLRRRRRVRPGAERDERPLLLNPYDTDPAPHLRFDARGGVRGLTPEGRRTIEVCRLERIHLVRKRERSARALRTMFDTYHLVARARPGSAAEFLELLTRSTRADAEYAGMARDLLGQWLSAGAQRR

SEQ ID NO: 81018 - protein, 440 aa, Sulfurospirillum deleyianum DSM 6946
MRIDKIEIENFKLFDKVEFSFNEHFNLIIGINGSGKSSLLRALAVALGGWANAYIKDDRNLRPIEKNEIREIQKDGRFDKTKDTLIKTYGEARVINRYSNDRKANVEWTRRRQENQETSLSGSIQYENPADGTFSTWYSLNFNTLGSDILNYVDKGRTFDLPLIAVYECDRLWLAKNQLNIEASAKAQYSRFDPYVDCFHTGANHEAIGEWLLKHELASLQLKEETPVLLSIKNAVRNALENCTDISFDFEEGRVIVDFEDKSIPFEHLSDGQRTILGLFCDIARRAAILNPHFGGEASENTSGVVLIDELDLHLHPKWQMKIIGDLQKVFPNIQFICTTHSPILLRSIEKEKIIVLEDGKQSQSEIFSKGRDINSILYDFMGVPKRTQEYEDKVDNLFGFLDDENIERAEELLTELKKDYGERDAIVIEAQTMLDVLKP

SEQ ID NO: 81019 - protein, 240 aa, Sulfurospirillum deleyianum DSM 6946
MKFIEKQRNSVGYRRLLELQKIPDSTYDDVSNNVSKNDFIRNEVLTSLLEEQGYLCAYCMQKISLSNASIEHIIGQNYVKDSVELGKQHQINYDNFLAVCEGKSCKGNLHCDKSRAAYQKERQLFANPLENRIMQNIRFNSKGLIYYKDFIKIETIETLNNHADLYEDSNIRYDIHKVLNLNCQNLKARREAIINALKRLTNNWTKKGRIETELSKYQRKQSDGYIEFCQVAIYFLNKNR

SEQ ID NO: 81020 - protein, 419 aa, Pantoea ananatis LMG 20103
MINDIKLSIREVIDKIKESLNTSIDNRRNGKYTYIIGNNGTGKSKILGELAETLKSVDSKRITACISSTIHDRFTYSEHEKVIYMGARNSSNAVFLSAIDRQLAKFILQAMEIDRRSLKKLVAVLNMSISFIFGEKTIETILTPPDKANRDTERVIKRASDLGLLSKQKINTLKRIIAGNGRFEELTKAQVSTLLSYLDLNIDFTIRIELSGGQSINFQDLSSGEQNRFLIFAKILSVMKNGTIYLIDEPEVSLHLHWQMEFHNNVDKLLSDIKNFHVIVATHSPTIISEAVKHDSKSLENTVAVLQRKNEISDIKKTILINDKSVACKIHSFAEVASHDQLVLRYFQTSPYKTREVSVEIADVVLGMAEGEKAKNDALNILNELRAAIGLSSEAKKQIDAALALVENDLINSLKINGE

SEQ ID NO: 81021 - protein, 242 aa, Pantoea ananatis LMG 20103
MKSLCNDVQKNHLEKLINLIRNDVINGGEAWSLFSSPELSKKITRNKKHYKTIKFTKEEVETYKALRIGVKENLFKQCLGCCAYCRRPVGHYGWAWHIEHVIPKSKYPLLTFEMSNLTVGCVHCNQWKGSRVDKKLQGKKLPIINPLGTDFVYPEHLTYVQISTESLCFAKYSIHSTEGRRTYELLSFEELERAYAINGMHAPTAALHERLTRLMYKNLADPEGQELVELLGDLKLSIYKIP

SEQ ID NO: 81022 - protein, 450 aa, Desulfotalea psychrophila LSv54
MGFFVYGNVSKGKPMKIKRLTLHNYRRFTNFEIDFDEQLTVLVAKNGEGKSTILDAVATSLGVFLTRLPRVTGLEPKASDFHIFSDGHRPPYMRITSETDTGFVWDRTERRDQTEKTAGEIPPGRGVKELYAYVDQFIEAENAGADYQLPIFIYFGTGRDVFEIPLPEPCLCKPRRRFDALHGALQSRTNFKGFMEYFYALGQLEARAQKRSGSPDLELPELRAIRRAVNSMLPDFSNPQVVEQSTIQVDWRQETGVKQLTIEQLSSGHRMILVLVMDIAARMVQANPQMADPLQTEGIVLIDEVDLHLHPSWQQVILLDLMKTFPCIQFIVTTHSPQVVSAVDPRSLRVIDWREDQPSLVPVGFSAGAEAQQVLLQVLGVESSRVQQLAVVQKLKRYQALVDADRWDCEEALELRRALDIWGGEHEPELACLDMDIRMKEMDRFDEEDN

SEQ ID NO: 81023 - protein, 255 aa, Desulfotalea psychrophila LSv54
MKKIIKGEEPTFLREYHQAHFTDSWEKYRKNGDRRNQVQEQIRRDQGGLCAYCEIDLRRADTLSSADFRVEHFHPKSDNGADHNWGLDWQNLLGCCHGGSQRDVIDGKRRFTSPDYSCDVPKDRENFDEVILNPLLLPASPNLFTYSRTTGRMEVHINNCIRAGVDVEKAQNTIDSLRLNAKRLTDLRRPVLLHLNRQYNRLVSQGFSAVDARRRLARAILRRNKVGNWPAFFSAIRAYLGKQAEEHLERIGYDG

SEQ ID NO: 81024 - protein, 430 aa, Aromatoleum aromaticum EbN1
MLNRLSLEGVGPAQQLTIDFKPRLNFLTGDNGLGKSFVLDIAWWALTRTWARGVMAAPRQDAGESSVGYSYTGSTGDYAGKRLFDHEAQQWSINQGRQPIPGVVIYAGVDGSFSVWDPARNYWKGDKGEAAASNRPRSFDFTPDEVWNGLLASDGKTQLCNGLLHDWVLWQEASKPAFDDLVKVLDALSPSGVEKIRPGTPMRVGDSVKDLPSLRMPYGQDVPLIHASAGMRRIAALAYLLVWTWREHQLACERFRVNPAREVIFLIDEIECHLHPQWQRRIVPALLSVMDALTGTRDVPVQLLAATHSPLVLASVEPDFDPENDCIWDFDLVDGEVRATLYPWSRKGDVNSWLASEVFNLKEPVSVQAEEALGLARGFLRTVAMTQQPLTDEQRQQLQDIDAKLRASLSDVDAFWIRWSGFRDQLAGQA

SEQ ID NO: 81025 - protein, 217 aa, Aromatoleum aromaticum EbN1
MIRVEQAAEPADFDSKVRQPGLRAIAEMTGAPGLPKRRGRPRAMIAASPDEIPADKFPSLWTEALPELLESYSRVCAYMSFYIERVTGAASVDHMLPKSADWQEIYEWRNYRLACSLMNSRKNVYRDVLDPFEIEDGWFRLELVGYQVIPAPDLPPDIREKVQATIDRLKLNDYECLKLREEYAEEFYCGDISQDRLRRHAPFLAREIEREPERRRG

SEQ ID NO: 81026 - protein, 432 aa, Aromatoleum aromaticum EbN1
MHIDTLRVENFRCFKQETFEFQSGFNLLVGVNGSGKTSLLKAIAAGLATPINGLGKSPRWPHAEEANARLALIELQGRVRYERCYPVRIELEGEVCGSARSWWVEQPGPASQSKFEHTVFSAIADESARIAQGGQGALPLAAFYGAERQWRLSGVGADTAVRHQDSRLDAYASWFDAALDMKGLETWVIGKSLERLEAESDSRDVDNGGALDELALVNRAVALAIPGAKGLRYDIKYRRLVLEWQDADPVPFETLSDGQRALAALVADIARRMCLLNPQLGARVLDETPGVVLIDELDMHLHPAWQRRVCGVLKTAFPCIQFIAASHSPQIIGELVADEILLMKGGQVVGHPERALGLPSSEVLAEIMGTEPQNTEVAAALRRIHQALDNEQLDVAEREIVALESKVGAIPDVIEVRSELDSLRWLGEEDQP

SEQ ID NO: 81027 - protein, 228 aa, Aromatoleum aromaticum EbN1
MRCIVKGPEPRELLDWKRQNRASPQNLTYTGGGFPREAVKHALMVEQHHLCAYTMRGLKSAADCHIEHVLPQARKNPEETIDYHNMLACYPGSNSKTVCEFGAHAKGDYDPERGPFCSPLHKATPSKFRFSETGEVTGRDDVAQATIEVLRLNHPILVHDREAAIRGGLKPGRRRQFSAAAARRLAAEVRKPDFEGRLRPYCEAIAQAALKYADKEERKARRLRQRRV

SEQ ID NO: 81028 - protein, 176 aa, Escherichia coli IAI39
MASSRDRQLTAVRTAISRFMPGFSNLRVRRKPRLHMSIDKNGQTLNVLQLSQGEKSLMALVGDIARRLAMMNPMLENPLNGEGIVLIDEVDMHLHPTWQRTIIQRLTTTFPHCQFVLTTHSPLVISDCKDVLVYSLDDGELTQLPSLYGQDANTVLLNVMDTDIRNATVGESKTTG

SEQ ID NO: 81029 - protein, 207 aa, Escherichia coli IAI39
MQQWVRAKPRDKNANQWFQELYAQKKWDIVGDLSQQCAQEQFYLCAYCCDRVTGTNRDTVNEHVEARDLAPARSLEFTNIVASCKTKGQCDDSHKNQPLLLTPLMPECETEFIFKISGRIEGTTPRAIDAIKVLNLGDSERNNRALIEKRKQLSDSLLWANGIDPSEGLEDDDLLQAVIDELLTPVDGYLAPFAPVVANILKNWMTA

SEQ ID NO: 81030 - protein, 457 aa, Escherichia coli O127:H6 str. E2348/69
MKRLYYTHHDSRTLKLAIEGDVSDNANIFTVIVGKNGVGKSRLLSQIAKDCIQDIHFLKTFNPLFDREITPKLIAVSTSPFDKFPPGRRSLNHQRKENNYRYVGMRGEGPFGVSNAVSLLSSAARGWLEKLAYSENPANLLDVFHSIDFEPHIEFVFKPTYNGPDTPDYNFIGVYSDEILTEVKELYLKYNIKIDRKNIESLLKLNSESRHDIYEALVEINRFEPERRAVTLSVDFTNGETLVGSTYANNYFSRSILKLMNAGFMRLMDMRLIKKSYGPMSLKRASSGEQCLLVMLLGIAGHITDGSIILIDEPEISLHPRWQEEFIIMLTKAFLTYSGCQFIIATHSPQIISNLPNKGCYITSLSKSYLYKAKYFSNRSADYQLAELFDAPGIMNEYIARLAFNLLSKVKTAKLVTDDNWRELKQLQLLLENVNSNDPINELVNSVSQVCEIYAKN

SEQ ID NO: 81031 - protein, 211 aa, Escherichia coli O127:H6 str. E2348/69
MPKIKNPIRFSAESLDIIEKKLSSPDFKHTNWGDDDLQVLRAEIRNHYREEQKLECVYCHEPIGVRAAQAAPIEHIVPKSQYLCFIFEPKNLCVVCPDCNEFKGKNEVLFEPVINGGRRKNYPTASASFRIVHPHIDDYEMHIIKANRVYVDKTPKGHYTIGICKLNRFFHYFGMCDEFVNDAKIAEANENFFKKGSITTNELLDDDIHLI

SEQ ID NO: 81032 - protein, 465 aa, Sorangium cellulosum So ce56
MTTRKAAAGGAKRRIARKLGPSKGARGVYFLSLTLENVRCFGPAQTLDLSNGEGKPRQWTVILGNNGVGKTTLLKALVASRPVLADEAPEYVICHIISPSKFLINNEELLRTSARTAILESRISFGGLISAPESKFRAETLHAKVERSRGRGNIAKRVELADLFCVAYGASRRMGASALTDPRDDDPIATLFHDHVPLRNAEEWLLQADYAANKPSPHQERARARRDAVRSMLIELLPEVEDIQILADLDDNPARPRPGILLETPYGRVPLQGLSLGYKTLLAWMVDFASRLYERYPDSENPLAEPAVVLVDEIDLHLHPAWQRKLLSYLSERFPNVQFIVTAHSPLVVQAAENANIVVLRREGDHVVIDNSGAAVRTWRVDQILTSDLFGLPSARPPALDALLAERREILTKPRLSTADRRALERVEREIGELPTGETPEQMEAMDIIQQAARSLKKAGGGASR

SEQ ID NO: 81033 - protein, 264 aa, Sorangium cellulosum So ce56
MIRVKKPEQAPRKLRDKAPAARAAVCASYRGARASIQRGAATLDFEVAVYAHPAVKTALETAHHGKCCYCESKVKHVAHGDVEHYRPKAAVQQARTAPIERPGYYWLAYAWENLLFSCVLCNEKHKRNLFPLRDPRKRARSARARLAAEAPLLVHPAQEDPEQIIGFRDEYAYPIEGNPRAEATIDEVLQLNQRQPLLERRREHLAIIRAMQVIAGQPDIDPAERARARAWLDRSVADDAEYAAMTRAALRSHSPRRDASRLAR

SEQ ID NO: 81034 - protein, 423 aa, Sorangium cellulosum So ce56
MKITRLSLRDFRGFRSLDLDFSPDVTALVGVNGAGKTSILDALALLLSCLVESIRSEEPETIAPSASDVRIGASTAQLSLTAEISVQPTQWSIAKTLPGHPPGAPSALDALHEPVAAAQTTIALGSPFLPLVVYFPTNRSALDIPERIRTPHAFDALSAYDGALEGGASNFRGFFEWFRQEEDILNEQQVLQILHEDQGLDGSSTPSPLPAVRKAIEALLPGARRVRIERRPQRMTVELNGTRLDVAQLSDGEKCLLAMAGDLARRMALAAPKIENPLDHPAVVLIDEIELHLHPGLQRVILPRLQKVFPRAQFIITTHSPQVLSSLHAANVRVLERFELRTLDRGTWRRDTNRILEAAFGDPGRPPEVAAKLNLLRDAVDADRYDEARQLIHELSTMIEGEDPDVFFYQQLLPPEDTTEAAS

SEQ ID NO: 81035 - protein, 224 aa, Sorangium cellulosum So ce56
MRHIVKGAEPATVTETRTASTTDLSTVARARTAFDQIDKGRVRANLAHEQGWLCAFCMRRIAPDAADARGERTMKIAHRTPIDVDPAQALSWRNLLGSCDGGQRSGWRTRSCDAAQGSTALTVDPTVQASCIQLRYERRDTHEGLFITSDHPALRADVEQTLGLNSGDLPLLREQAWKAFCALQQKHAPKQYGRPARTAFFQTWMKQQPARLPEMLGVIEERLR

SEQ ID NO: 81036 - protein, 428 aa, Sorangium cellulosum So ce56
MRISSIRLQNFRGFAACTLSLDRPLTVLVGVNGAGKTSTLDAIVRLLGVTNRVPGRAKRLLVDADIRRDAAGCEIDMVGTTNGATFHTGIQLARGGRQVVNTTLPRRAGAGEADAGSGEADAGSGERLPTALPAAYYPASRMVSDQRYLRAHGAPPSLFGRGLDAIESLDRLSLRANLSFDDFFQWFRLREDLENEQRTRGAPEYEDRPLKAVRDAIERVVPGISRLRVQRLPFRLVALKNGAEYELDQLSDGERGLLAMVGDLAFRLTITHRELPDPLQGEALVLIDEIEQHLHPSWQRLVVNSLLRAFPNCQFIVTTHSPQVLSEVPNDAVLLLDDFQFFRPAAPTQGRDTNSILWEVLGVAARPQAIVKELDEITGLLDDGRHDEARDRLDRLAQSLTERDPEVARLRGLLDLVERIDASDREEA

SEQ ID NO: 81037 - protein, 239 aa, Sorangium cellulosum So ce56
MRAIAKRHEPPELKAYRAVPGAAYDGKDFTPVKGKIRTALLRDQLALCCYCMRRISSDARPHPTNPDAPPVVQMKVEHWKSQTAFPSLQLAWTNMLGACLGNEGRRPADQTCDTRKGEDAILLNPLDPAHVSTLSCTSAGRLQSTDPRFQKDIDDHLGLNHAVLVATRKVRLDRDLKRILIKYRTSPIPESAIRALVAELETPTETPTETPTETSTGGKLPELCSVVRLWARKRFGAQW

SEQ ID NO: 81038 - protein, 443 aa, Sorangium cellulosum So ce56
MRIDEIRLINFRAFERFALHLEPRLTVLVGRNGTGKTTVLEGLAVALGAWLSFFNASRDDRPIPKSAARFVTTMHGGVPSMATCYPVRVEASGETPLGHVAWARELRGADSRTTTGVTKSGREGPLEATRFMPHGIDDAISGAEPIALPVLAYYGTGRLWHHKRDRNPERAGLKSRLQGYRAALEAASDQKGFEAWMAWREEDRVQRLARAAEEGRPLTEVRSPELEGVSAAACACLEGARRIYYSANHQELRVDFVDGSSLPFGALSDGQRNLIAVAADIAWRATQLNPSFGAEAPARAAGVVLIDEVDLHLHPAWQWRVLDDLLRAFPGLQFVVTTHSPQVMSAAPRGSVRLLDPDHQAHRVERIAGKDSNTVLEDILGAPSRLKETREKLDMLARLIDDGQLVEAKALLAELSGFLGEDDAQIVAARWELAMAETGDASD

SEQ ID NO: 81039 - protein, 232 aa, Sorangium cellulosum So ce56
MRRIEKDREPACLADLRGTPGAAWSSVHGAQRQQMREHAFKEQHGLCAYCMSRLPGPPSAEGMKIEHFETRALSPELVFDWDNLLGVCLGDVGISDGGGHHRDRYHCDTYRGHLPREEQRIELNPAAFPPDVSSMFSYTNQGEMRAAHGLEPTMRASAEAQIERLNLNIARHQRNRRTAIDVLRSEFQRKAPRAARVKALLELSTTPDAAGLLPPYCQAAAYYLEKKLRQLG

SEQ ID NO: 81040 - protein, 431 aa, Sorangium cellulosum So ce56
MLRTLELVDVGPAPELHLELGRRLNVMTGDNGLGKSFVLDVIWWALSGTWAGSPAWPLGGAKEPKISYEMDDGTGNASWFQFESQGWSEAPTRAGALVLYARADGSFALWDPARNLDPEDYKRPRGSKQTSLFAGSGTTRRPPAYLFDPDEILDGKTHQGKTVCNGLIRDWVSWQEKKPETQGGRAFRHLCEALEQLSPNPQAGAETILAGKPVRLFLDDTREFPTIDTGYGEVPVIHASAGMRRIISLAYLIVWAWHEHVEASRLLKQEPMSELVFLVDEVENHLHPEWQRRIAPALLRVLEALAPSMRVQAHLTTHAPMVLASLEPCFDPEQDKLFVFDLEARTVALREVPWARFGDASRWLTSPAFNLRRARSIEAEQAIDDASALMRGEEPRRSRTREEVDRALHDTLADQDPFWARWRAFVEEGGT

SEQ ID NO: 81041 - protein, 243 aa, Sorangium cellulosum So ce56
MIRVELLPEPTSFDEEVRAPGNAWLAQHPDAPPEAMPALWRPMTHLLADGFNHRCGYSAMWTPRGTVDHYLSRSTHPERTYDWDNYRFASGEMNSRKGTWNDRVLDPFEIEDGWFEILLPSLELVMVEELIPAEQRDRARFTLKTLRLQDDDGILEQRQSWYDEFLNGEVTLSWLSRKAPLIGKAVQRRLGGLDPATIADDETHWRWFLEEDLTLKGLRRRAPRLAEAVETALRRPDRRRAGG

SEQ ID NO: 81042 - protein, 502 aa, Acinetobacter baumannii SDF
MGRNGSGKSNVLEALVAIFRNLDLGEAPPFSYKLTYRLGEPHKMNQPSDRWMEITIDADPERGTLAKQYEVHIRDLLNNEKQKDMFNETPSDVIIPFSKVKRDKDGKAPYLPNYVFAYYSGPSDRLEKYFKKHRTDFYRKLLKDEINLRGDIRPLFYAKPNHSQFVLLAFFLSEKDSEERAFLREHLGIEGLDSIHFVMRQPEWAKKKEELFWGAHGVVRQFLDELIQHTLSPIKVTRQEDTSLTGNNIRNEFFHLFLPNVEALRAFAKNLTADELFKMLESTLLSEIISEVNIRVKVSSSEAPLTFRELSEGEQQLLTVLGLLKFTGGKDSLFLLDEPDTHLNPSWAVKYLKFLRKFVPNHEASHLLMVTHHPLAIAELEKEQVQVMKRDDKNLISANMPDENPRGMGINLILRSDMFGLKTTLDDDTNQRLANRNALAAKETLSEEKIVREHGFPPEDEEQYLARLNSELEELGFNLATDDPDYLDFLRNKYHVKHEESN

SEQ ID NO: 81043 - protein, 269 aa, Acinetobacter baumannii SDF
MRWICKDIIEERLTQEWRDLAEHAKNELIAAPDKETRKAILKKVSSTKVWRDFYDLLPDSLNHKCWYCEAEEIRSDMPVDHFRPKNKVEDDKQHDGYWWLAFDWTNYRCACTFCNSRRVFDETEGGKECRFPLENPDERAFTPTDQIKLDNERPYFLDPFNPDDEKLLWFDPDGKPTFRPLATVEQQTKVKNSIEIFHLDQTKIVRARNKIRLEVERQVRKIKNNDDVQAAKNQLRRMVQNTEMLSRTAIVYLRAHRELQEVKDILDLD

SEQ ID NO: 81044 - protein, 468 aa, Sphingobium japonicum UT26S
MNASKAAPVYYSELRLSNVKAFLPGVVLDLRLDGGPAPWTLVLGENGLGKTTLLQCLALMRPILNVEQSARTDARDPDRVEPAIPAYEDALLVEIARVGEGLQVGIEAEFSIGRELRPAERPKGRGKHVATKAAYRVDKQDLTEFDFSKTKRKPFLPPLVVGYSAARHPPYRRSDVVSDQEDSTASLFNAEIELADAVQILEDLDHIALREDRNRSDKTDSTAESRAAILYREIRQALACILPEVELPERIHVYGPALPGFAEEKTGVWIETYSGEVPLHSLSIGYQTMFAWTVDLAWRMAEYHKDSVDPLREPAIVLIDELDLHLHPKWQRRVRRDLSSVFPKVQFIVTTHSPVLAQTYLDTNIAVVTREGDHAIIDNDPQTVRSWRLDQVSVGLLHDADPYAPEIVDAFETRRTLLGKQTLNREDRERLEAANALVAAIPSDLAPEDDKAAKLIREAAALLVKRAP

SEQ ID NO: 81045 - protein, 264 aa, Sphingobium japonicum UT26S
MIRHTKSTNVPSSLGRGVQANEDNCTAYDAAAAGYRNGERSFDIRKGIYGTDVVKRQLKADQYDKCAFCESIFDANVAGDVEHYRPKGAVDTDDRRIYPGYYWLGYNWENLCYACPDCNSYRKRNCFPLENEANRARDHHADITLEQPLLLDAYGPRDPRAHIAFRGEAVTGLTAAGNATIDILALGRTALARDRLQHLRMLTLVHESVSLFDGDPRPEAIAFLQRARAELAAAILPDARFSAAAADHLAALDAGENFLPVSAA

SEQ ID NO: 81046 - protein, 774 aa, Caulobacter segnis ATCC 21756
MLSVDRTDEPAPACLSDERSAPARSALLELFTGNRETIAQTRVRFEGLAVDGPELGEALGRLFRNRCAFCETQTTTWPYRFRPTEEAGPSGQAPGQDEYRSHLYYTWLTNAWRNIYPICEGCRPTEPSLFPVNRKRTPLPTEDAIRLYVERPAGDWRGEIAESPVFVAPAGREDLRKHFAPLPDGILMPTDQRGEATVRHFNLNRPPLVEARRRALDDYFRRLLLARQRPDFDKIMDFAGLDFGGGWFLHLYQLARILGHGGGDRQVLSRQRIAAYFRDRAKRRDFQQRLQNARDELARDPEQIRRAKLRPSLAPAGTARPVRVALRNFKAIEELTLELPETSGRISSEGEPLAPCLIILGENAAGKSSILEAAALAISDEEVRADEAPLASGFMLDPMLMGAEGQSRPRPGSVTVDYDDGLQTKLAFDNNGFQSSFTLANVEPRIPVFAYGAYRMFLGHDEASASGVIRSLFEPDYVLVNPEEWLAEIRETPLFEEVIRALRYILGIGQAFDTIKVDEKTKRCVLVIKVERPGQTPIFTRTPLATVSSGFRAVLGMACDVMRNLVARQNRFSATLAKSRAVVLVDEIEAHLHPRWKLKIMQGLRDALPNVTFIVTTHDPLCLRGMDGGEVKVLLRAAKAFCAPDEPPTFVDQLEDLPPIGALTVEQLLTSDLFQLFTTDADTIETGLAGVGDLLAREQARRLEPGDDARLQKVRDQIGKDVAVSLPIGSTEVQRLVQEAVEQYLRERLRRPGGGLMALREETRRAIVDALKAL

SEQ ID NO: 81047 - protein, 344 aa, Caulobacter segnis ATCC 21756
MRKVDRKTATPPASLTGANRKGPNELKRARAHFAAHPPRDEFTFTAYKGDDVRYTLEALFHGKCAYCEARYDMVGPVDIEHFRPKNADPKGTHDGYWWLAAAWSNLLPSCIDCNRKRWHWTPTQLASLTELLKEQKQRPAAYVKTGKESSFPITGPRVTAEPPTAQAEALLTAELALLLDPCVDTPADHIVFHIDRADPLGVIYPLGQAGAAPHIPPTVDQLPVVEAAARAANVSPRGAVSIQTFGLNRLGLVQERTKVLRQLEFLGGTIEELSLTADELEGLVLAGQNAVVRDRAVQRLRAIVRRILAQIRAMAQPQAPFSAMVSAWIDAFTSASSASLPVAR

SEQ ID NO: 81048 - protein, 416 aa, Comamonas testosteroni CNB-2
MFINTVKTPRNITVHFGIEPANESNHISLLTGPNGSGKTDVLASIAKVFHGNTKTTNAVVRWYREARFYRSTAEKPNPADEAEYDYMPVRLITQTFSPFSRFPSGRRQSAQHLASIYSRGNETNENYICIGFNQKSRIELRTFTSSIVEDAILRLSERPKSARVAFQVLEDLNFKEGICLKYVADPKLQQLVEIDRQPDHLERILRVFARTGKLFLLNQVFSGRTLHRLRRELESGDVNETIEYLRHAINMISEHIAGSRIIKGINVNAYSYTAFKHRDSMSSDFAYLQAFSVLSRLGLLRITACELQPIGGETIDIRQASSGQQQMLCSIFGLAAAVYDEAVVLIDEPELSLHPRWQMQFFKYLETILSVVKNCHVIMATHSPLIVQAAALHNVQVISMGHDTAEQTTTELDDYR

SEQ ID NO: 81049 - protein, 262 aa, Comamonas testosteroni CNB-2
MKRFRRRANVLHPVNSLSQDLHSEIKKLALEKSLHWSTSAGDYVNAIVKFRNEVKEHYYVQQRRRCCYCSTELLDHKITFDAEHILDKADYPEYMFDEANIAVACKLCNQKKSNKAISTSGRRFSELSKKSSDYSIVHPHLDEWNEHLDFDQVDRIVALPNSQKGKNTIAICGITALNATRLADAFAIEDYKVAEVTLRTFLEVEDQARKLELLSLLDELAQHGEPDAATVMQALKGDVQATPQLPVVASAVGSALIGPSAP

SEQ ID NO: 81050 - protein, 438 aa, Pseudomonas savastanoi pv. glycinea str. race 4
MSQGTLAHPPVLVKETDMRLDHLHLQNFRCYEDAHFDFQPGFNLVVGVNGSGKTSLLLGVAGCVGNLLGSIGVHQPSIAESDVRFALVKFEDRIRFERSYPLVLTAQGGAFERQEWHVSLERSSLQTNFSALHSLVFSENLISIDVSTHGDLPVFAVYQANRRWLTMSVTAELAAQSKPSRLDAYTSWFDAASNLKNFETWFIGKTLERFQRLSRVGSSSVFNDELTWINSAIQCALPDAKGIEYDMELRALVVDMDDRKIPFNDLSDGQRGMVALFADIARRICLLNPHMGKDVLSKTNGIIVIDELDIHLHPGWQRTIAPALKKAFPSIQFIAASHSPQVIGSLQPGEVILLNNHDGSHPRATYGLDSSSILEEVMGVPQREPEIEALLDELFSTLENNELEKARLQLDALKQKAPDLPEFAGAEALLKRKELIGR

SEQ ID NO: 81051 - protein, 214 aa, Pseudomonas savastanoi pv. glycinea str. race 4
MKRVIKGAEPASFIGWKARANEDWTPTYPTLQNPQKRDLHNCLLQEQNFSCCYCGREIELDSSHIEHFRPQDHYLPLALEYSNLHASCLRETTPGNPLHCGHYKSNWFDEDLHISPTEDDCEQRFRYLLTGKIQSTSHTDLPATTMIEKLALDIAYLTKRRQEAIMRVFDEQILAGISDTELNILVQGLRSGDANKQLAFGHVVARYAEQLLAS

SEQ ID NO: 81052 - protein, 451 aa, Pseudomonas savastanoi pv. glycinea str. race 4
MQNYRCFGEFEIDFDPHLTILIASNGGGKTTILDAARVALWPFVKGFDLGGQTGKSATIQIEDVRLAQFGSGNMESQVPSVIEAKGVWWESAVESSWLQQRVSLKKSTNTIGDAGSKALTSYGKSLQECVRSDAHVTLPMVTYLGTSRLWFEGRFSSAAAQTTLDKSEYSRTSAYLNCLSYSSSFKTFTAWYIWMYRSYREAQLIALERDEEMSDAGQRFEKIISAVKEAIDRLIKAPTGWHRLEYSASHQQQLVMHHPDQGVLPVEMLSDGLRNTIAMVADLAFRACKLNPHLGERAPLQTPGIALIDEVDMFLHPFWQQTIVGSLRAAFPAMQFIVTTHSPQVLSTVRRENIRVIGKDAQGRLIASRPLAMTYGEPSNSVLRSVMQVDPQPPVDEKPGLLQLTEWVEKGRYDEPQAILLMQQITEALTEQHPQLQRLQRSIKRQKALRG

SEQ ID NO: 81053 - protein, 170 aa, Pseudomonas savastanoi pv. glycinea str. race 4
HVENKSQNPQRTFDYNNLAACALDSQSDLEVLKIQGAEVFGGHASGKSKGVDMARFVSCHMPDCSRFFAYLSDGRVVPADGLSPEEVDRAEYTIGLLNLNSPYLQGLRQSWWDELEALFEEHVNQNMSLHCLAGIDLIPVGANLSQFFSITRNFFGGIAEEVLEQEAGRW

SEQ ID NO: 81054 - protein, 571 aa, Sphingobacterium spiritivorum ATCC 33861
MLNVNIVQNEVYNLLIKHWQKDPSFRFTFRKSNRGSRLDKGYWFYGNEWYLAVSFWTGMDWKNKTPNIIFIIHLESGNTCLEINTSDSDEKRRFITQFFVNELGLQSNGIRYQKYYQGNYLECLENFIKTDKVLIDNIILEHAKSFFPIIKNGIFFIEAADFEGQKEKIDRYREDILIENSIETQKPIKISEIEIVNYGPIKNLQINEIPFSSQWIFFTGENGTGKTSILRAIATAICNQKIQVSGFEDENAEISLKLFLSSSDTITYLYPYNQTLENDTFPLTHGFAAYGQSRLKTTHGLDSKNLEFISTELTSSLFNDETHLIDLQYQFDIWRSQQRIRFDKRENYITEILTDILPNLYDIKFDDQIDGVSVTTYIEKDHENAEFAKVTFNKLASGLKSMIAMIGDILIRLYNQQPDVNDPSEFTGIVLIDEIDIHLHPKLQKQIVQQLSKTFPKVQFIASTHSPISFLGAPKNSQIFRVERNSAEGVKIRRLDELLELGDLLPNTILTSPIFGLDDIIPESHDQKKLVRTETNYSEIEFNDIVQKRISSFITDEKEQQLINLFKSRRQ

SEQ ID NO: 81055 - protein, 302 aa, Sphingobacterium spiritivorum ATCC 33861
MRFVIKREEDKTDRLASDETYRALLEITNTRNKDLITDTIYREAYDHPDGKRSRVEDHLSIAYHNKCAYCERICKADIEHYRPKKGVKEDGSHPGYYWLCYEWTNLIPSCITCNREGAKHNKFPVIGPRVSAPVLLVDGSINLALSKAGVDPLLSERPYLLHPEVDHPEDYFEFEIDPNGEGIKIVGIDGEGRGNATIEICLLNRLEVKLDRVERVINDFKDAINALFVKLENGNIDDNQLADRINEHIDLLYIRSQQENRNHTYLSKYIVASDQNFEKIVLPFLPDRTRAIILAAFRAYIP

SEQ ID NO: 81056 - protein, 770 aa, Brevundimonas subvibrioides ATCC 15264
MLHVDRASHPAPACLSDERSEPGRRALFDLFSLDRAVAAQRSFRMSSVYVEDNELHSAVTRLFRGRCAFCETEDELRPYRFRPSEEAGPSQAAPPQDADRAHLYYAWLANAWENIYPICGGCHPRDPSIFPVTGRRRRLPTPGEIDRNFTQPTGSWITEISDHPLFLDPCEGTDLRKHLAAIPGGAMLGISGRGQATIQHYDLDRPGLQARRGAAFDRYRAQLLGATDGGPRFAMRFQDMEFGGGWYLLLYQIARTLGGGTGGRPVLSISRIDRYYATWLSNPEFQFLFDQAWFDLMERPEQLLEREVPERSLVHGEAPQPTLFQIHNFKALEKIEVRLPPPRSLDGTKVGSQGSTLVVLGENAAGKSTLLEAIALSLVDEGTRNDLPGQSQAFMLDPRLMGSPDTSETARRGEVRVTFENGYWTTMGVRPNLPTLDDDRISRLPVFAYGAFRLYLTAEKKIRRSSPIRSLFDAGYVLPNPDAWLASLHKKPEFEEVSRVLKVIFGFDQEGDVIVVKRGACYLRVRHRRENGDDLVQDTPLKAVSSGFRSVLAMVCDVMRGLLSQRDRFSASLAFSRAVVLIDEIEAHLHPRWKMRIVTALREALPNVTFIMTTHDPLCLRGLRAGEVMVFRRVESRAPDSLPVVVEQLEDLPDVGSLTVEQILTSDLFQLYSTDGPDIEARFAKAADLLAAERAGADFSDDDRDALKQARADMRLLISRAMPVGSTEVERLIQEAVEQYLATRRRARADALGGLRDKARQSIIKALEGL

SEQ ID NO: 81057 - protein, 348 aa, Brevundimonas subvibrioides ATCC 15264
MRFVDRSKQTAPACLTEAKQAGQRELARARKKYTSANPPSTFTFRAYKEDDVRHAMERLFHGKCAYCESRYDITAPVDIEHFRPKGEVEGEIHTGYWWLAADWENLLPSCIDCNRRRYQHSPTLLASVTAVLDSSPTGFSRDYQTGKHSSFPLAPGGVRMTTEPMGTKRKDATKAELALLIDPTSDRPEDHLQHYIDRHSPMGLVLPTGGSAVSFPPFAFEGAKDAMAIEKAARAAHLSPRGSVSIQVYGLNRLGLVQERTRLLRRLELLSELILKLFTMEADLDDLATGEADPVKHQKLTALAKQANALAHRALSEVRLAGADEAPFTSLAKAWIADFRRELAPGVI

SEQ ID NO: 81058 - protein, 315 aa, Pseudomonas amygdali pv. morsprunorum str. M302280
MMDTLGAAVPIEALFDQLGLQTKFRISLSATSKRKFSEALSSPDALLEYIHNYSNYQRRMQVDMFTSTSKKDVMSIFEGYKHLRQQTDKSHYFDIDLKSDGRGHSEIYDFLNIVRRVGLIKDVHLELFRVGAYESSAFSNASSGETQLLYGFSSILRYACDDSIIFIDEPEVSLHPAWQIRYVGLLKKALVAVKNCHLIIAMHSHFILSDLDEANSSLHVFKKEKDGGISIENLEYSTYAWSPENILYSVFNVRTIGNHAFEKDLQEALNLIAVKDSDLVRLSVLASKFQGLVFDSSDPLNKVIGAIRGYSDGHH

SEQ ID NO: 81059 - protein, 209 aa, Pseudomonas amygdali pv. morsprunorum str. M302280
MAITNWYLNIDRLPQFPDEVIDYLEGLKPHKAALWDKTNKEMAEYKSSLLEQLAEIQDNRCAYCGLSLDWNLVDREHFVHKGQLTGYPEFMFNLKNLFAACGFCNRRIKGQGVTLQTYNENYDECVFCIIHPFFDTPENEIEFLELQQGQHILVKALTPKGQSTIDFFLLSDKRLTVRRAGFIAERELEAEMDSGAYAELKLVSYYRPD

SEQ ID NO: 81060 - protein, 416 aa, Pseudomonas amygdali pv. mori str. 301020
MQNYRCFGEFEIDFDPHLTILIASNGGGKTTILDAARVALWPFVKGFDLGGQTGKSATIQIEDVRLAQFGSGNMESQVPSVIEAKGVWWESAVESSWVQQRVSLKKSTNTIGDAGSKALTSYGKSLQDRVRSDAHVTLPMVSYLGTSRLWFEGRFSSAAAQTTLDKSEYSRTSAYLNCLSYSSSFKTFTAWYIWMYRSYREAQLIALERDEEMSDAGQRFEKIISAVKEAIDRLIKAPTGWHRLEYSASHQQQLVMHHPDQGVLPVEMLSDGLRNTIAMVADLAFRACKLNPHLGERAPLQTPGIALIDEVDMFLHPFWQQTIVGSLRAAFPAMQFIVTTHSPQVLSTVRRENIRVIGKDAQGRLIASRPLAMTYGEPSNSVLRSVMQVDPQPPVDEKPGLLQLTEWVDKGRYDEP

SEQ ID NO: 81061 - protein, 195 aa, Pseudomonas amygdali pv. mori str. 301020
MEEQYGLCCYSEIRPDRVGLSFHIEHVENKSQNPQRTFDYNNLAACALDSQSDLEVLKIQGAEVFGGHASGKSKGVDMARFVSCHMPDCSRFFAYLSDGRVVPADGLSPEEVDRAEYTIGLLNLNSPYLQGLRQSWWDELEALFEEHVNQNMSLHCLAGIDLIPVGANLSQFFSITRNFFGGIAEEVLEQEAGRW

SEQ ID NO: 81062 - protein, 452 aa, Pseudomonas amygdali pv. mori str. 301020
MEIKSFKLVNVGRFSDLEVALAPTERHASKVTVLVGNNGAGKTTLLKSVATSLSWLVARVRTPKGAGSRIDEDMVQNGTATSSITIRIEDVLISDDEINPLESEWAITATRKGRNATSSTVLSELNRLADGYRSKLTEKSDTSLPLLAFYPVERSVIEIPLKVLARHTFDQLDGYDNALGRGVDFRRFFEWFREREDSENETGISTELLNELSQKILIDTELWKVLTREHASSRDRQLTAVRTAVEAFMPGLTKLRVRRKPRLHMAIDKEGKTLNVSQLSQGEKSMMALVGDIARRLAMMNPALENPLHGNGIVLIDEVDLHLHPKWQRSLIAQLTTTFPNCQFLLTTHSPLVISDSKDVLVYVMDDGELREQDSLYGLDANQVLSSVMDTDIRNEEIQTALDKLQHFLMRGELDEARTLYTELADELPANHIELAKASLLIRKLEVRREKD

SEQ ID NO: 81063 - protein, 216 aa, Pseudomonas amygdali pv. mori str. 301020
MRKIEKGSLAVLEKWKRANKGKKYGDLVGHEDIKDAIRHACVTEQHGLCAYCCCRITAEKGSACNEHVEAQHLAPHRTLDFGNIVASCTKAGRCDAAHGHQTLPLTPLMIECEKELQFELSGLVAGTTPRACASINVLNLGDTHESNRGLVGERKQMIDALLFSCSIDPAELFTEEDEVLDLLRNDLLEVNAQQLLQPFSPVLVNVIIGIQRARQR

SEQ ID NO: 81064 - protein, 793 aa, Pseudomonas syringae Cit 7
MRGKIGYIVRITPIILGRTRQGNKFMQYIQRDVPVPAILTGSAANEHREFLVRFMAQSEEQLSQKYPPASSLNLSDQSMSAALKRLFIGRCAFCEAWADLMPYRFRPKSQSLPYEPNKFAHFYYSWLDIAWQNIYPICHSCLPADGEYFPVLGKRAPLPDTILYQQYAQENTGMWPAYPLREKSILLDPCFDQALYKELGTRSDGSLVGLSERGSLTIKHFNLNAATRTAERFASHQEYLQQLLQWVGEANAKESIKIFDFKKLEFGGSWYFLLRRLAIFVGAKTISRPVLSMAGIARVFAKLLKIADGRSRLEQCIQQLADNEPQEFSSEDTIMYLKRPSTDSVTSLRIENFKSIEHLDINLRPQTPTTPAEGTRQVPALLIIGENSAGKSTILEALALGLSSTQAFVSLGLTTNNFILAPEFLGAAQPRAVSRALIEIGISNGSKRTLLIEQGGINIPDEMQQENIPVFAYGAFRQYQHQGPSSKPKPDAFVHNLFDGRMLPNPERWLLKLSDARFPMVIRALREILSIDGRFDVIRRDIASKQCYVVTGIRDDGSPLSQSSLKVASSGFRSILAMACDVMRGLMNPSIYPDFESLQTARAVVLIDEVEAHLHPRWKMRIMRGLREALPNVTFIATTHDPLCIRGMNDGEIVVLRRVQLRQGTTDAGLQSQVEAQTDLPPLSELRIEQLLTSDLFQLHSTDDPEMDQQFAHIADLLAIPSEQLEPEQLRTLKRFNDDVASALPVGTSEAHRVVQDAVAEYLQIRARTSVQRVADAKASVKAKIIQALEGIL

SEQ ID NO: 81065 - protein, 309 aa, Pseudomonas syringae Cit 7
MRRVERIGSVPSNLESANKGGKTERDRARDHQLDTNPKKGSFTYAGYKHDDVKRKLAALFHNKCAYCETFFSASAPVDIEHYRPKGSVADDPAHPGYWWLAMSWDNLLPSCIDCNRKRKQYLPDASTSLKALYDSSTNAGMNLGKGGKQDSFPIRDSGKRLAAESYAYIDEEPLLLDPTRDDPREHLRFSVDHTSPVSLVLAGSAPGRASDRGAMSIQTYGLNRLGLVQDRTRLLRRLEFLGEMILDLGITVDELKALPAQAALDNAIKRLEVMQGRMLMEIKEMAAPKEPYSEMVGAWLNNYIEQLKA

SEQ ID NO: 81066 - protein, 357 aa, Pseudomonas syringae pv. maculicola str. ES4326
DEVNPLESEWEITTTRKGRNATSSTVLSELTRLADGYRSKLTSKSDSSLPLLAFYPVERAVIEIPLKVLARHTFDQLDGYDNALGRGVDFRRFFEWFREREDSENETGISTELLNELSKKILVDTELWKVLTREHASSRDRQLTAVRTAVEAFMPGFTKLRVKRKPRLHMAIDKDGQTLNVSQLSQGEKSMMALVGDIARRLAMMNPALENPLHGNGIVLIDEVDLHLHPKWQRSLIAQLTTTFPNCQFLLTTHSPLVISDSKDVLVYVMDDGELREQDSLYGLDANQVLLSVMDTDIRNAAVQKRLDRLQELLMAGDLEEVRSLYKKLAIDLPSGHIELAKASLLIRKLELRRAKD

SEQ ID NO: 81067 - protein, 216 aa, Pseudomonas syringae pv. maculicola str. ES4326
MRKIEKGSLAVLEQWARSNKGKKYEDLVDRDDIKDAIRHACVREQHGLCAYCCRRITLEKTSAHSEHVEAQRLAPHRTLDFQNIVASCNQPGRCGKAHGHQLLRLTPLMVDCETELQFELSGLVRGNTDRARDCIKVLNLGSDQASNRWLISERKAMIDNLLYSQGMNSSGLGLESDDVLDLLHDELLVPDEQQQLQAFSPVLVNVIRRLKASQAS

SEQ ID NO: 81068 - protein, 451 aa, Pseudomonas syringae pv. maculicola str. ES4326
MQNYRCFGEFEIDFDPHLTILIASNGGGKTTILDAARVALWPFVKGFDLGGQTGKSATIQIEDVRLTQFGSGNMESQVPSVIQAKGVWWENAGDSSWLQQRVSLKKSTNTIGDAGSKALTLYGKSLQDSVRSDAHVTLPMVTYLGTSRLWFEGRFSSAAAQTTLDKSEYSRTSAYLNCLSYSSSFKTFTAWYIWMYRSYREAQLIALERGEEMSDTGQRFEKIISAVKEAIDRLIKAPTGWHRLEYSASHQQQLVMHHPDQGILPVEMLSDGLRNTIAMVADLAFRACKLNPHLGELAPLQTPGIALIDEVDMFLHPFWQQTIVGSLRAAFPAMQFIVTTHSPQVLSTVRRENIRVIGKDAQGRLIASPPLAMTYGEPSNSVLRSVMQVDPQPPVDEKPGLLQLTEWVDKGRYDEPQAILLMQQITEALTEQHPQLQRLQRSIKRQKALKG

SEQ ID NO: 81069 - protein, 195 aa, Pseudomonas syringae pv. maculicola str. ES4326
MEEQYGLCCYSEIRPDRVGLSFHIEHVENKSQHPQRTFDYNNLAACALDSQSDLDVLKIQGAEVFGGHASGKSKGVDMARFVSCHMPDCSRFFAYLSDGRVVPADGLSLDDVDRAGYTIDLLNLNSPYLQDLRQSWWDELEALFEEHVDREMSLHCLAGIDLIPVGASLSQFFSITRNFFGGIAEEVLDQEAGRC

SEQ ID NO: 81070 - protein, 314 aa, Pseudomonas syringae pv. actinidiae str. M302091
MRSVFAAALSHLSAVLARNNAGEQIDFPVLAFYRANRRWSSARISAEFAAQQRTSRFDGYANWFDAVADLRDFESWLIARTLERLQDRLDSTSTVEREDELEWVNRAIRLAIPDAHDLRYDLRLQSLLVDMGEGNAVPFHELSDGQRSLIALIADIARRMCVLNPHIGKDVLANTSGIVIIDELDIHLHPAWQRNIAPTLKKAFPKVQFIATSHSPQVIGSLQPGEVILLRNGDSSHPRATYGLDSSTILEEVMGVPQREPEIEVLLDELFSTLENNELEKARLQIDALKKKAPDLPEFAGAEALLKRKELIGR

SEQ ID NO: 81071 - protein, 214 aa, Pseudomonas syringae pv. actinidiae str. M302091
MRRIIKGTEPASFTEWKASANEDWMPTYPTLQNPQKRELHNSLLQEQHSSCCYCGREIELESSHIEHFKPQEHYLPLALEYSNLHASCLRETKPGNPLHCGHHKSNWFDETLHISPLADDCEQRFRYLLTGKIQNTESADLPAATMIEKLALDIAYLTRRRQEAITGIFDEQFISSASEAELTHLVQSLRSGDAGKQVAFGHVVARYAEQLLAS

SEQ ID NO: 81072 - protein, 451 aa, Pseudomonas syringae pv. actinidiae str. M302091
MQNYRCFGEFEIDFDPHLTILIASNGGGKTTILDAARVALWPFVKGFDLGGQTGKSATIQIEDVRLAQFGSGNMESQVPSVIEAKGVWWESAVESSWLQQRVSLKKSTNTIGDAGSKALTLYGKSLQDSVRSDAHVTLPMMTYLGTSRLWFEGRFSSAAAQTTLDKSEYSRTSAYLNCLSYSSSFKTFTAWYIWMYRSYREAQLIALERGEEVSDTGQRFEKIISAVKEAIDRLIKAPTGWHRLEYSASHQQQLVMHHPDQGILPVEMLSDGLRNTIAMVADLAFRACKLNPHLGERAPLQTPGIALIDEVDMFLHPFWQQTIVGSLRAAFPAMQFIVTTHSPQVLSTVRRENIRVIGKDAQGRLIASRPLAMTYGEPSNSVLRSVTQVDPQPPVDEKPGLLQLTEWVDKGRYDEPQAILLMQQITEALTEQHPQLQRLQRSIKRQKALRG

SEQ ID NO: 81073 - protein, 157 aa, Pseudomonas syringae pv. actinidiae str. M302091
MEEQYGLCCYSEIRPDRVGLSFHIEHVENKSQHPQRTFDYNNLAACALDSQSDLEVLKIQGAEVFGGHASGKSKGVDMARFVSCHMPDCSRFFAYLSDGRVVPADGLSLDEVDRAEYTIDLLNLNSPYLQDLRQSWWDELEGLFEDHVDQDMSLHCL

SEQ ID NO: 81074 - protein, 705 aa, Pseudomonas amygdali pv. lachrymans str. M302278
MQRFARNEIPPPIFREKRFKLARKELLELFTLDTQELSQTRITGEELSLDLSQVGPIHDALGHLFHGKCAFCESQDLTVPYRFRAASSVTSAMGMVDSHLYYVWLANAWENIYPICIKCIPRQPAFFPVDGKRVPIPSLEQIRRYAAEDLGSWRTSGPRESAVLLDPCIDRNFERHLFPSVDGDLLPLSERGDTTIANFRLDRLDLNKARAARLREYREALLAPDRNRANLRYSNFQNLFDFQELEFGGLWYLQCRLIARYLSQKVGMVMPTGRSHIARTLKTLLFMGDYKLSHEQLKSWIEETDFGHLPLEIPPTDYGVLEPAPVIQKAVVPRIYPSLHSLQFDHFKVIEHLKLKLDIPTAESQLNNAALQPALLILGENATGKSSILEAIALALSPRETRRALNLTPGSLVLSPAQLGSNDTPTQFWARVRLGFDEGRDKVLSIDNAACKQFGPRLVPPVFAYGAFRQYQKKTPPVFEPAHGIINLFETDRLLANPEQWLLGLKGEDFNDVARALKIIMSVEGDIKVIEPAPDGKSCLIVTAPAGVVTKTPLNDVSSGYRTILAMVCDIMQRLMDRRINPDFPGLEHAQAVVLIDEVEAHLHPRWKIQIMQVLRRALPKITFIATSHDPLCLRGMQDGEIVVVHRRSRAGGANTQYATCIEQLHDLPDSTQLTIEQLLTSDFFNLMSTDQPATEKQLATLPTC

SEQ ID NO: 81075 - protein, 365 aa, Pseudomonas amygdali pv. lachrymans str. M302278
MRFVDRSLIKKPRAMRPRKTTVSAADQELLDLTAHYEKKSAALAAALAADDPVAASASVAEEFSAKKPPFTTYRKDSVKTQLYAIFHGKCAYCETFYPAVAPVDVEHYRPKGGVSQDADHPGYWWLAMEWENLLPSCIHCNRLNKHATPKLSTQLVELRADGTGFSDQYKVTTGKGNHFPILGPRATPASRDCSTEYPLLLNPCLDDPQEHLAFHVDRKKLIGLVLPKPHNGAGLPAHVSTTDLLPAFADEIDQALRDKLSLRGAVSIHTYGLNRLGLVQDRTRVLRQLAFLEESVKDLCAMIQSLEARINDPFAVENIRIIKRMEALVERTAQHMADMAKPQAPYSTMVREFLQGFEARLVAIP

SEQ ID NO: 81076 - protein, 300 aa, Pseudomonas amygdali pv. lachrymans str. M302278
MLARNNAGEQIDFPVLAFYRANRRWSSARISAEFAAQQRTSRFDGYANWFDAVADLRDFESWLIARTLERLQDRLDSTPTVEREDELEWVNRAIRLAIPDAHDLRYDLRLQSLLVDMGEGNAVPFHELSDGQRSLIALIADIARRMCVLNPHIGKDVLANTGGIVIIDELDIHLHPAWQRNIAPTLKKAFPKVQFIATSHSPQVIGSLQPGEVILLKNGDSSHPRATYGLDSSTILEEVMGVPQREPEIEVLLDELFSTLENNELEKARLQLDALKKKAPDLPEFAGAEALLKRKELIGR

SEQ ID NO: 81077 - protein, 214 aa, Pseudomonas amygdali pv. lachrymans str. M302278
MRRIIKGTEPASFTEWKASANEDWMPTYPTLQNPQKRELHNSLLQEQHSSCCYCGREIELESSHIEHFKPQEHYLPLALEYSNLHASCLRETKPGNPLHCGHHKSNWFDETLHISPLADDCEQRFRYLLTGKIQNTESADLPAATMIEKLALDIAYLTRRRQEAITGIFDDQFILSASEAELTHLVQSLRSGDAGKQVAFGHVVARYAEQLLAS

SEQ ID NO: 81078 - protein, 737 aa, Pseudomonas syringae pv. aptata str. DSM 50252
MRVLIKLKKLSNPKPVEISTKNTLYVREMAKLRAYFKLNPTERAPTRPPFDKDVLDAQSVLQELKRIQHSKCAYCETILEHNPSRFVSHYRPLSNAFDPHQDAEHLECYAWFAYEWRNLMLICKDCDNHKLNFFPIAGRTAIALSSWRAAQLREMPLLLNPFEDNPSDHLMFDTDGVACSTSAAGKETINILNLNRPALCIKRKEQIGAGLKIILGNSNEHALREALREYTDHEVLHGGAVRNCLGHVCRILQTQIRHGRYSAHTDLIKKIIRLRNEFSVHDWEEAISRCKSNDLAFVIQNNELGELQPRRYAYINRIEIGRFKGVEHFTLDLDAGPTGQSRSETSCTMLLGENATGKSSILQAIALALMPSGERQRLRLDQKSIIPYGIDDTFMPPLQPAVTLRFSNGEAVAISMNLQTGRLKSVGSPHNVVFGYGSRRYFVLGKSTKAQTCPNRTLFNQAANLPDPTNWLLNLKEEKKFDAVARALASLLSLRAGEFVGRDDHSIFIQRHTSPLPIEHLSDGYKSLFAMAVDIMREMLKHWDSLEFAQGIVLIDEIENHLHPRWKMRVMRALRDSFPRVQFITSTHDPLCLRGMLEGEVQVLYRDRVGHLQRVEQLPNVANLRIEQILTSDYFGLATTEDPLRQHALEQLAKYAAHGDSDLTQTERRHRDDLLENYGSLPMIGDTLDRQIIAQALTRHIRDADIATPFEHASAREASVRAIIEVLERNRKKYGTR

SEQ ID NO: 81079 - protein, 124 aa, Pseudomonas syringae pv. aptata str. DSM 50252
MVPVNRSLVEKPASLTAPNGAGHREHLRADIHYQNPHTTAYGFSHYKEPDVVMALNTLFHNKCAYCEGKITNTGPIDVEHFRPKGRVAGVLNHPGYWWLATEWTNLLASCIDCNRSRNQTLLGS

SEQ ID NO: 81080 - protein, 576 aa, Pseudomonas syringae pv. aptata str. DSM 50252
MRLDKLTIGSAKDSPTHQFKNLKNVTIDFDQDHWVTVVIGWNGTGKSNVLEALAIIFRDLIGKERMPAFAFKLAYRMGTGEGVRHIHIDADPDRENEPLIIHVATDAEARGEGTLTPFIEGEEAASALRGKAIKLTAFLKADAESLPRYVFSYYSGESTRMYEVFSPYLESYDSKLRNGIDPGLKRLFYAMPVHSQFVLLAFMIQQSDVVRAFLDDHLGIDPDDGIESVLFVLRQPPWKSKAPDGDPRFWNARGVVRDFLSRLHDIALAPIEISRQVSTSIWNKTKLQFKYLYVKDIAALRRLVGNQAPAQFFRDLESTYVSELIEEVRIRIRLKKNDGSVTFRELSEGEQQLLTVLGLLRFTAEDESLFLLDEPDTHLNPRWSVDYISYLKQFIANGTKQEETSHILLTTHNPLAVAELDREQVQILRMSKQEGQRQILACYPEVAPRGMGYAAIVTSDMFGIASSMDASTQLQLEKQRALGAKPDLSVTEQGALDEINDDLNRLGFRFFHPDDEFSRYLRLRNEALKARFGVIDPLDLAEKAVTMTRQEREDLATDLITKLVEDENEELGGPSR

SEQ ID NO: 81081 - protein, 267 aa, Pseudomonas syringae pv. aptata str. DSM 50252
MRYIDQDELALPEGWLAKATRASAAVVAGAKPDEDESIWKELKDALAALFPEKKCWYCESPVDRADNAVDHFRPKGRVADAANPHAGYRWLAFDHRNYRYACTFCNSRRKGIENDTVGGKADRFPLLDEATRLYTPGPLGQEKPILLDPCELNDWELIGCRRENGKPCATSQDAVERRRAEESIAIYHLNYEPTCKQRHAAAVRLMADVEQAKLFFGQPGMNDHFTATAKKVRRAIDRKAPYSGDMIFLLKGQRHADHPWIQKLLEA

SEQ ID NO: 81082 - protein, 336 aa, Pseudomonas syringae pv. aceris str. M302273
MLTAQGGAFEHQEWHVSLERSSLQTNFSALNSLVFSENLISIDGATHGDLPVFAVYQANRRWLTMSVTAEHAAQSKPSRLDAYTSWFDAASNLKNFETWFIGKTLERFQRLARTGFPGILTDELTWINSAIQCALPESKGIEYDMEMRGLMVDIDDRKTPFNDLSDGQRGMVALFADIARRICLLNPHMGKDVLSKTNGIIVIDELDIHLHPGWQRTIAPALKKAFPSIQFIAASHSPQVIGSLQPGEVILLNNHDGSHPRATYGLDSSSILEEVMGVPQREPEIEELLDQLFSTLENNELEKARSQLDALKKKAPDLPEFAGAEALLKRKEIIGR

SEQ ID NO: 81083 - protein, 215 aa, Pseudomonas syringae pv. aceris str. M302273
MRRIIKGTEPASFTEWKASANEDWTPTYPTLQNPQKRDLHDRLLQEQNFSCCYCGREIELDSSHIEHFRPQDHYLPLALEFSNLHASCLRETTPGSPLHCGHYKGNWFDEDLHISPTEDDCEQRFRYLLTGKIQSTSHTDLPATTMIEKLALDIAYLTKRRQEAITGVFDEQFISSASDAELANLVDSLCSGTANTSIAFGHVVARYAEQLLTQR

SEQ ID NO: 81084 - protein, 449 aa, Pseudomonas syringae pv. aceris str. M302273; identical to SEQ ID NO: 80910

SEQ ID NO: 81085 - protein, 216 aa, Pseudomonas syringae pv. aceris str. M302273
MRKIEKGTLAVLEKWKRANKGKKYADLVGHDDLKDAIRHTCVIEQHGLCAYCCCRITVEKGSACNEHIEAQHLAPHRTLDFNNIVASCTKAGRCDDAHGRQPLPLTPLMSECESELQFELSGLVAGLTARARVSIKALNLGDTHDSNRGLVGERKRMIDALLFSCSMNPGELLVEEDDVLDLLKDELLESDAQRLLQAFSPVLVNVIRSIQAARYS

SEQ ID NO: 81086 - protein, 452 aa, Pseudomonas amygdali pv. tabaci str. ATCC 11528
MEIKSFRLVNVGRFSDLEVALAPTERYASKVTVLVGNNGAGKTTLLKSVATSLSWLVARVRTPKGAGSRIDEGMVQNGTATSSITIRIEDVLISDDEINPLESEWAITATRKGRNATSSTVLSELNRLADGYRSKLTEKSDTSLPLLAFYPVERSVIEIPLKVHARHTFDQLDGYDNALGRGVDFRRFFEWFREREDSENETGISTELLNELSQKILIDTELWKVLTREHASSRDRQLTAVRTAVEAFMPGFTKLRVKRKPRLHMAIDKEGKTLNVSQLSQGEKSMMALVGDIARRLAMMNPALENPLHGNGIVLIDEVDLHLHPKWQRSLIAQLTTTFPNCQFLLTTHSPLVISDSKDVLVYVMDNGELHEQDSLYGLDANQVLSSVMDTDIRNEEIQTVLDKLQHFLMRGELDEARTLYAGLTDELPANHIELAKASLLIRKLEVRREKD

SEQ ID NO: 81087 - protein, 206 aa, Pseudomonas amygdali pv. tabaci str. ATCC 11528
MLEKWKRANKGKKYGDLVGHEDIKDAIRHACVTEQHGLCAYCCCRITAEKGSACNEHVEAQHLAPHRTLDFGNIVASCTNAKRCDKAHGRQLLPLTPLMIECEKELQFELSGLVAGTTLRACASINVLNLGDTHESNRGLVGERKQMIDALLFSCSIDPAELFIEEDDVLDLLKNDLLEVDAQQFLQPFSPVLVNVIIGIQRARQR

SEQ ID NO: 81088 - protein, 421 aa, Pseudomonas amygdali pv. lachrymans str. M301315
MRLDHLHLQNFRCYEDAHFDFQPGFNLVVGVNGSGKTSLLLGVAGCFGNLLGSIGVHQPSIAESDVRFALVKFEDRIRFERSYPLVLTAQGGAFERQEWHVSLERSSLQTNFSALNSLVFSENLISIDVSAHGDLPVFAVYQANRRWLTMSVTAELAAQSKPSRLDAYTSWFDAASNLKNFETWFIGKTLERFQRLSRAGSSSVFNDELTWINSAIQCALPDAKGIEYDMELRALVVDMDDRKIPFNDLSDGQRGMVALFADIARRICLLNPHMGKDVLSKTNGIIVIDELDIHLHPGWQRTIAPALKKAFPSIQFIAASHSPQVIGSLQPGEVILLNNHDGSHPRATYGLDSSTILEEVMGVPQREPEIEALLDELFSTLENNELEKARLQLDALKQKAPDLPEFAGAEALLKRKELIGR

SEQ ID NO: 81089 - protein, 227 aa, Pseudomonas amygdali pv. lachrymans str. M301315
MRRVIKGTEPASLTEWKASANEDWTPTYPTLQNPQKRDLHNCLLQEQNFSCCYCGREIELDSSHIEHFRPQDHYLPLALEYSNLHASCLRETTPGNPLHCGHYKGNWFDEDLHISPTEDDCEQRFRYLLTGKIQSTSHTDLPATTMIEKLALDIAYLTKRRQEAITRVFDEQILASISDTELTLLVQGLRSGDANKQLAFSHVVARYAEQFLASLNPPPEKSSVGNT

SEQ ID NO: 81090 - protein, 429 aa, Pseudomonas amygdali pv. lachrymans str. M301315
MQNYRCFGEFEIDFDPHLTILIASNGGGKTTILDAARVALWPFVKGFDLGGQTGKSATIQIEDVRLAQFGSGNMESQVPSVIEAKGVWWESAVESSWVQQRVSLKKSTNTIGDAGSKALTSYGKSLQDRVRSDAHVTLPMVSYLGTSRLWFEGRFSSAAAQTTLDKSEYSRTSAYLNCLSYSSSFKTFTAWYIWMYRSYREAQLIALERDEEMSDAGQRFEKIISAVKEAIDRLIKAPTGWHRLEYSASHQQQLVMHHPDQGVLPVEMLSDGLRNTIAMVADLAFRACKLNPHLGERAPLQTPGIALIDEVDMFLHPFWQQTIVGSLRAAFPAMQFIVTTHSPQVLSTVRRENIRVIGKDAQGRLIASRPLAMTYGEPSNSVLRSVMQVDPQPPVDEKPGLLQLTEWVDKGRYDEPQAILLMQQITDSH

SEQ ID NO: 81091 - protein, 195 aa, Pseudomonas amygdali pv. lachrymans str. M301315
MEEQYGLCCYSEIRPDRVGLSFHIEHVENKSQNPQRTFDYNNLAACALDSQSDLEVLKIQGAEVFGGHASGKSKGVDMARFVLCHMPDCSRFFAYLSDGRVVPADGLSPEEVDRAEYTIGLLNLNSPYLQGLRQSWWDELEALFEEHVNQNMSLHCLAGIDLIPVGANLSQFFSITRNFFGGIAEEVLEQEAGRW

SEQ ID NO: 81092 - protein, 509 aa, Dickeya dadantii 3937
MDVSLPEDLYTAQATQRLPKERMMKIKQFRLHNVGRFTSLDALIAPTADYPSNVTVLVGNNGAGKTSILQALATSLSWLVARVRSEKGSGSGINEGTITNGHTSAAIEVMAQDTPPLSGHAADNDAEYHWTLAKTRSGKKGQHTSQLNAVSALADHYRSALTQNEQSSLPLIAFYPVERSVLDIPLKIKNKHHFQQVDGYDNALNQGVDFRRFFEWFREREDIENENDGVVLTNLFESNPEGVLKVFEDIEDADYRVDKLEIFDWAGLSEEFKKLNNALKLMQEVQDKAKDPQLNAVRSAITAFMPGFSNLKVRRKPRLHMSVDKNGEAFNVLQLSQGEKSLMALVGDIARRLAIMNPTLDNPLHGQGIVLIDEVDMHLHPSWQRSIIERLTTTFPHCQFILTTHSPLVISDYKDVLVYSLDNGELTVVPSQYGQDANSVLLEVMDTHIRNARIAEKFSDLLDMIQRQQLTPAKALLDELTAELPATNLELTKARLLLRKQELRGEKNH

SEQ ID NO: 81093 - protein, 210 aa, Dickeya dadantii 3937
MRKITKGTEPASLTAWKRANPTGRYDDLTETERQDIRDACAKEQFYLCAYCCKPISGDNSDTMNEHVQARKLAPHRSLDFTNIAASCTTPNQCDAAHGSQPFSLTPLMAECETELQFMISGRVSGTTARAQDAIRVLNLGDNETHNKKLIEIRKQFIDSLLWTNGIDPDEGLEDDDLLTAVINDFSSPQNGRLTPYAPVLVNILRGWLSA

SEQ ID NO: 81094 - protein, 458 aa, Streptomyces violaceusniger Tu 4113
MYLKNLRLRNIRSFHGARDVDLDLTRPDGSYAGWTVLAGRNGSGKTTLLRAVALTISGPAVARSLVPGFDTWVSRDETVAKAEVCLVHDPEQDQFTTGRRPVRPIWAGLRWTAAEQTSLSGKPGSSRAGQPALNAIGYQKERPVAQRGPWADNPVGWFCAGYGPFRRLAGGSSDIQRLMSSSGAVARLTSLFHEDASLAEGVSWLIEQHLRAFEDKDGARDLKAAALAILGDDLLPDDYRIDNVDSEGLWVVNRNHRFPLREMSDGYRTVAALVVDILKQIHDAYGELVLDTTGGTPNVASSGVVIIDEIDAHLHVSWQKRIGGWLKAHFPNIQFIVTTHSPYICQAADPGGLIRLPGPDEDSPVEVVPQHLYDRIIFGSGDDAVLSDLFGLDTPYSDQAEQKREELLALELDVVRGRASEEEKDRYRHLKRKLASSPATRVDEIAARLHSRHPRHDS

SEQ ID NO: 81095 - protein, 248 aa, Streptomyces violaceusniger Tu 4113
MIRVTRVPLPQATLTSMAGYTGDIGQATVPKQRARQLWKQTSVRRHIHPVLKGVLAEMAPGLERCMYCGDSQGTDIDHFEPVRVNPLRTFDWNNHLLACSLCNSHLKRDLFPLAADGTPLLVDPSSEDPAPHLHLSLAAGAYIDLTDRGAATIKVFGLNREILVRGRRNAYRITPLLLNDWRAAFDTGDKEDAAACASTIWEQPTADVVHAMFHQAVAPGAEDIFTDESQTLALLRDPVIRAALLSTG

SEQ ID NO: 81096 - protein, 465 aa, Escherichia coli ABU 83972
MRIDKLSLLNFRCFKQLDITFDEHITILVAPNGAGKTTVLDAVRLALFPFIRGFDASLYVKDKSLAIRTEDLRLIYRQEALNMEMSSPAKITATGEWASGKTATWMLDKRGEQPPHEDKMAAQLTRWGEQLQKRVREEHSLQQVELPLMLYLGTARLWYQERYEKQPTEQRLDNSAFSRLSGYDDCLSATSNYKQFEQWYSWLWLSYREHQITQLESPSAKLKEGVRVQRMKEAIQAIQQAINCLTQQVTGWHDLEYSASHNQQLVMSHPQYGKIPLSQLSDGLRNAVAMVADIAFRCVKLNPHLQNDAALKTQGIVLIDEVDMFLHPAWQQQIIQSLRSAFPQIQFIVTTHSPQVLSTVKRESIRLLEQDENGNGKALMPLGATYGEPSNDVLQSVMGVDPQPPVKEKADLQKLTGWVDQGKYDEPKTQQLMVALEVALGEKHPQLQRLQRSIARQRLLKGKAQ

SEQ ID NO: 81097 - protein, 243 aa, Escherichia coli ABU 83972
MRHVIKTQLGTVALLTAHENPPQDADQSTRRWRNFRRDKAAVMVQLINEQYHLCCYSEIRSDLRGLGYHIEHVENKSQHPERTFDYQNLAASALDSGENGGLSSLKGKNAFGGHAQGKQDVVDMAKFIHCHIRDCSRYFAYLSDGRIVPADELNAQETENAQYTIDLLNLNSGFLQTERRNHWEELEQLFDEHIEKDWDLQQLLQLDLVSTPDHKLHEFFSITRQFFQQEAEQVLQSHAPALI

SEQ ID NO: 81098 - protein, 540 aa, Vibrio cholerae MO10; identical to SEQ ID NO: 80874

SEQ ID NO: 81099 - protein, 205 aa, Vibrio cholerae MO10; identical to SEQ ID NO: 80875

SEQ ID NO: 81100 - protein, 842 aa, Vibrio splendidus 12B01
MSTNNSSHRDARNQARDIWKLIDYIRGASSISDYRSLAYSLLFIRYMQAKTGERFEYSNFYSSEDISNFIDNLVQRCIDSEMFHHDVAGFLREHISYVLLKHGSINEPNVRLALSDNFKNSSRSFVEATLSELDILFAENESKSGGEFYTPQDVNWLVTRLGAEYEPDSVCDPFAGAGSTAFSFDSALGTYFNIDTQEVNRDAHFQIVVSRIVKDVYGKDYLGDSLSTPYYQSQQYDLVASFPPFGMKIPKSNRRQILERRGNYWLEQAYNLPESRSDWFVTLSMLPALNKKGKLITGMSLASMTRSGAETKIRSFLVAQGNIEKVILLPKNIYHSTSISSVLLVLNNKSDGEKRRDIQFVDASLFYQPARGRNTLSFDNIEKIVASCLSDGRFSKTISSEDVANNNFNLNPSLYVEKTIKVNQIKLTNFRGYTDFTIPIHESLTVLVGENGAGKTSILEAISCGLGPFLTAMPDAKGKLIRKSDVHVGPNGVADSARISIDTNSSLSWDLATKGSDRNNLAKIGTQALSDYANQIVDSDEEYPLIAYYGTNRALSSSSGKVSISPFEVVQRSEGYDSALDAKINYGSLKNWFSKIEVDELKLRDENKNHSFVHPAKALVTSAVKTMVERAEDVAFDKATNDVVVSWKNEDEEIICLGLEQLSEGYRNMVALTIDLVRRAYLLNPTSKSPLDVSGVVLIDEIELHLHPRWQQVVLKDLTTLFPNVQFVVTTHSPQVLTTVEGECIRVVSNSYREAEFVSSPYGGENSRVMQQILHVNSRPDTEVSEKLKEYFDLIESGKGEEESAMALRKELTRLTDGTEPMLAEADLAIKRVNWMKSRKSK

SEQ ID NO: 81101 - protein, 250 aa, Vibrio splendidus 12B01
MSVLEIEEPELLKNFRLATPQATWRQLKDNSDANNALKVNAIKKTGGLCVYCEQKLIAKTDYQIEHFHPKKGNDNSDFGDGVPNRAIEWGNLYPGCLGGTAKVVDFTTQDDLDFRTNAKYKNKGRLTCGQRKGDVEPEGNFISPRDLNNKSPIFSFNDFDGSVSLNIKACISQGIPVEVAKNHLTKLNLDSQRLKDARFALASSLRSEFDKAFEFDSDTVDELVNDWLALDGNGMYTSPFISMISGKYVC

SEQ ID NO: 81102 - protein, 295 aa, Vibrio splendidus 12B01
MERSYQKNFLVSFFEATRQYSNQGNRNQPSSLSAIRTNAQHQQLNQDFSTSFESYLVAFFEAGYMASMMRNDPSEKQKVDNWLDSIAGDLRYLFEDNSLNLKYNEQERCFYIEQRGKNPYTFSTLSSGYSSTLKIYTDLLMKVELREMSPKELTGIVIIDEVDAHLHVSLQKKILSFLDRSYPNVQFIISTHSPFVLQSVDNAVIYDLSKLEQLEDLSLYSYDAITKGLLGVSTSSDELFQITSELSSLITNIEENQIRVNELIEKLSPVEGELDSKSKVILLMAKQSIEDLEGK

SEQ ID NO: 81103 - protein, 221 aa, Vibrio splendidus 12B01
MFNVIRPTNGPSCLSSGSSYNQPDVVVALKDVFHKKCYLCERDEIHDVEIEHFVPQAAGGDRMDWNNLFYSCSRCNGIKSNGHLNLLNCTDPSINVCREIRLKAFPTPDSDVLVEPQSDNPSEETLNTVELLKLCYNNSSTALRGVSREALMEQIFDGMCTFINARRLLKKPSTGRSNRQDALETIEAMLDVKHPFSAFWRWQYLDDNFLTTEYPELGSAF

SEQ ID NO: 81104 - protein, 438 aa, Vibrio sp. MED222
MTKQIQDIHVKLTHSNNSVRIEPKGKNIIITGANECGKTKFLEQLNDALVRIADVQNRKSYQVLYEDYQQSERQLQSLTTTDPNYPYFKKRVKELHDEMEVAQKVDLLLSDQTSYIEGYNEKTFLFGFYQATRQSQIQILQQKPSLKALLDSKVNTPLSADFGTVFEQYLVAMKRLSNDIKVDGSCEEQSDADRIDSWFSKVQEDLRELFEDDKLCLRYNREEESYFIEQPSKTPFRFDQLSSGFSAIMSIYADLLMKVELKSISAGELEGIVLIDEIDAHLHVSLQRKILAFFVEAFPKVQFIVTTHSPFVVQSIKDVVVYDLSLLEQLENLSAYSYEAILEGLLGVTANSLTLEDIMDDLSDEIELGAPNPETVAKLLERLSPHEANLSGEAQLFVSKGKRLLREYRKSEPTNDRQNVELMAMETKSTTTDLNEKE

SEQ ID NO: 81105 - protein, 226 aa, Vibrio sp. MED222
MFKVKRPKVAPAGLIKKYDSEDVVLKLRDIFYGKCYLCESKWPSAPEVEHFVPQSLDPKRLATDWDNLFYACRRCNSIKTAKDAKLLDCTKADVFSAIICELPTRKSKPVVVEVNQGFESPEAENTAALLRDCFNKDNTGYRKITKAQLRNELVRYCTRFMKYNDILLDYEAGRKEKEYAADRLERMVQPDFPYHAFWRRMFMEDSDLMQFYPHLIDPEEDLEKVG

SEQ ID NO: 81106 - protein, 698 aa, Bacillus sp. NRRL B-14911
MIRVYKSKWPEPFFYEWVNKNHIEYPDDYNRYHLEEYLSYFNNKCVFCESSLSDMKLMVGHYRPTNGALNITNGHFSENHYRWLDKDWSNTLVLCVECHRTKSNRFPLEGEFCSPEADEIDLTSEKRLLINPFRDFPEKHFLYDEEGIIIPKTKKGEVTVEVLNLNRHSLIEGRRREYSHFNRVCQAFIDNKEDEGILEEIIKQISQEAPFAGIKRYFLLKMIADDLIPYVQDFTPYLRILRGRNPITREDIQNKVAKEKYFNNTKKNDYYDVTDENDIHKYFSKQRFIESVEIRNFKGLKYLNLDFGLSQSMGAPWLMLLGENGVGKSSVLQAISIGLMGEQKRKEVILKSANNFVTNQKREGSIKIKLTGMVDPIIIDFTRDSHLFGGENHVDPRVLILSYGSTRLLPTENKIDMFRPSWARVENLFDPFVPLVDVENYLTWLEQEDFFIVKNAIENLFMEKVELIRNGGTKGIKFRFSNSIVRLEDLSDGYRTIIALATDIMMVMKNRWRSYDAEGIVLIDELDAHLHPRWNIEIVRKLRMAFPKIQFIATTHNPLTLRGLLKNEVAVMLEDNDRETIVLQNLPEQKGMMIEDILTSKFFGLYDTLPELNSIFHEYYRLLANPSPNTKQKDRIAILKEKLKDYDKLGNTKRDQMFYEAIDRYIAKEKATNEKLTSDSFIQDIDNIINSLRGFYKK

SEQ ID NO: 81107 - protein, 289 aa, Bacillus sp. NRRL B-14911
MIYIQRSETPPVLDLEDSNSVGSKEYTEAIKHFEDKDRNFTFRAYKEVKDVLEVMFNSKCAYCESDISPVSYGDIEHFRPKSAYHTTKAETLKYPGYYWLAMDWNNLLLSCEVCNRTYKKNQFPLVDEAKRKKKYDEEVIEEPLLIDPCDASSNPQDHINFTEEGLVEYTLGGRCKGKKSIEVYGLDNPKLTRKRKKLAKEISDKKSQVLRYMDNIRALLATPLPGELKSVLENNFIDLETVYKSIKNLNLPTEPYQGLVRNLTAEFLAKYSPIIDKLLFEFHEQKKEE

SEQ ID NO: 81108 - protein, 845 aa, Pelagibaca bermudensis HTCC2601
MIFFDHADRERDAPEWFASREVEEALRQIDTFLSLGARERAQTDPPPVWKLPVGRDVLDALEHRSMGLCAFCEQRARLGAWRFRPPAHAMPMAAPDERIAYLWRSFEWPNFFPICRDCTPSPQTYFPVDGPREGPPPRPAPDKSSSTGSFWRLPLSGDVHQTIIGPGQAPGRSPDEEAILYHPGESAQPASAFRATLDGALIPLNRRARETVKTYRLDRAELVAARSRVARELLLRLEKTPDRASESLHRLTGLRTDEAHPIPEGLQFPGFAYLVFRQLLADALGRMGLERPLSLSQIMRSTLSLERDVDFPRALTESLAAFQAEDEGTAGTGEQAPEAPQPAPPPDDTAARRAHPRIAQIALRDFKSLEAIDLKLPAALDTESDEILTETSMEPPSAPCLLILGENATGKSSILEGVALACLDAPARAALAESVGLSPRRLTLDPRYMGAPEQEPRDRASVEIVFHPEEPDETGRHLALTARRDARGGVFDERDDLPGPRPFVFAYGPNRIYGSETLDTPWRHYDTLFESGRRLSNPEAWLVELAQRDDGALDMVVAALRHIIQIDGRFETIDIAPDPLEGDALCAWIHLTRNGPEGRKSSVRQRLAFASSGYRAVLALVCDVLQGLMADGASVYEARTSNALVLIDEIEAHLHPRWKLQIISGLRRALPRATFLLTSHDPLCVRGMRPGEVLMLNRHLRDPDAVDDGPSEMEVVERVSDFGAFERLTIEQLLTSDMFQLVSVDDPRAERRYAEVARLLGQQAKAEASGNPDAGLTAIERDQLRAFHEEVAEGMPAGVSEVTTLVQKAVADFLRDRRTLDATARRERREAVEQEIRSFLEELLR

SEQ ID NO: 81109 - protein, 355 aa, Pelagibaca bermudensis HTCC2601
MRFVDRKAVAEPEILQAPFTRGRKKGLSELDDVTDFMARKAAGEATGSYTFLRYKEDAVTEALEALFFRKCAYCESAYDIVQPVDVEHYRPKGAVDGAEGHDGYWWLAMDWRNLLPSCIDCNRRRGQRIAGPAGATDVNAGKQTLFPLRDPTRRWADSAAQGEDDGSGEGRLLLDPTRDDPALHLAFDVDLAAPLGLIYARPDPDRPDPGRTDAAGALPALEETGPMVRAAAEAGLSPMGAVSIQVYGLNRTGLVQARTRVMRDMAFLHRLVVSLGELAMDLRERAEETTRPASDRDFDRRVAVKLDALRADAKEQMRLKTAPDAPYSEAARAWARATLAELKSDPAQPAPPAGR

SEQ ID NO: 81110 - protein, 540 aa, Vibrio cholerae MAK 757; identical to SEQ ID NO: 80874

SEQ ID NO: 81111 - protein, 141 aa, Vibrio cholerae MAK 757
MQVEHIKPKSGRNAQPNLCFTYSNYAVSCIQENRKTQTCGQKKKDNILFIEPTSPSCNSHFSLDTDGFINPRGFKNRKEKHSIQTTIDMLGLNKPHLQLERKKQIERLIYILKATKHNRHELTNKFIKSGNFKYILRELTM

SEQ ID NO: 81112 - protein, 306 aa, Vibrio parahaemolyticus AQ3810
MDISDSDALFELVNNNQFILRFFEANRLANNIAGNGQIESISNVKQAGKSQNFEQDSSNQFEKYLVSYYNYGSHVIARENNPEKEQQINAWFEKVQNDLRDLFEDHGLILQYNPEEQAFYIHQEGKDPYRFNNLSSGYSSILSIYADLLMKVELRDIPAEDITGFVLIDEIDAHLHVSIQRKIFSFFDKAFPKIQFIVTTHSPFVVQSVNDSIIYDLSKLEPLEDLSMYSYESILKGLLGVESTSDILNKRLDEMAEIINQEPVNTEKLQELIDSIEPYEGQLNARSRAFLLLGKNALLDSTDGEG

SEQ ID NO: 81113 - protein, 221 aa, Vibrio parahaemolyticus AQ3810
MFNVVRTYPEPPSIAKNEYNKDDVLKKLRPMFFDKCYLCERDDIQDVEVEHFIPHIKNTALKYNWENLYYSCSRCNGIKSSTHINLLDCANRFYDVGAMVKCLMPSTPDGDVEVSATSATPCIQTANTVTLLEACYNLDNTALREISRETLMEDMWDHYTELLNARQVLRKKRSGHTEKKNAKEIIEVMLDVEYPFSIFWRYYYLNDSFLVQHYPQLRVGF

SEQ ID NO: 81114 - protein, 790 aa, Kordia algicida OT-1
MIKIDRYKIQKPKFFHSKEYERLQQEIRDFYGLHRNSRSQRSYAVQYMPEEVISELMELFDYKCAYCESHLLGLKSGYESYLERFRPSNNAQGFDSKEIDADHYWWLTYDWQNLYASCHSCQRFKSNVFPVEGKRAALQTNYDEIAKKEDAYLIDPCVDFPEEFFTFNLKTYEIIPNEKSSPLAFSKIKFTPVVGEVIKQKAEATIQVLGLNRKDLIYERQNIAEETKREVEGLRKGIKNSHAIATEWNEILDGKSKKNHLAFRKTLLNYYITEDKEIYSILYNLSDQIQSYLDQQQNMQQEIQKLQIPPNFQAQEQTKGFNESLPDDLLENFMNVDDEKPRSSKQKEKKKKYSKYFADILKNVYLDKIELKNFKCFSHLVLELPGYAEDTSAEPWLVFLGENGVGKSSVLKAIAIALMGKEYLDVLKIKVDDILKYGKQSGYIKVYGKGNDEVFEVTFNRKTQEITASVETPPAFIIGYGSTRLLPNGRNLEPETDHPSYLKVKNLFDASVSLSNAKDWFLNSDRKTFDQVSKTLKNLLLLDDLDSIGRSKKNNQIFIKYHHSGDNINIDHLSDGYKSIFAVAIDMIYTLSQKNVVYELAEGIVLIDEIGTHLHPRWKMEIVERLRNTFPKIQFLITTHEPLCLRGLKENEVVVLKRDSENAIIVLSELPDPSSLRIDQLLTSEYFGLNSTMDVKTELLFKEYYELLAIDESERNDEQKVRLEQLQKEVKELKYMRFGNDKREEIIYQVVDELLAKNMRNKDLKIDVKDIKQEAIDRVRNLWKKLDQKK

SEQ ID NO: 81115 - protein, 306 aa, Kordia algicida OT-1
MEKIRSKKVVMIAIDRNSVEIPDILKDGSEKLKKELEEAIAYYSDPANTKAFKFKVYSNPTVKEALIKMSIGKCAYCESDILVTYVGDIEHFRPKGEIEELKATGNSKPGYYWLAANWDNLLLSCRNCNQKSKQRTASDDRLNSLGKMNQFPLFDETKRARSPEDNFQEEEKVRLLLNPCIEDPEEYFKYNINSGVIQPKKQEEFPKQRALASVKVFGLQRVPLVHARAKKAVQILKQMTRVERRYKDLLRAIDDEADDIPDRQEELDWEIEELHSFLNPTEEYLGMARQMIGEFMQKNFQLDISA

SEQ ID NO: 81116 - protein, 423 aa, Streptomyces pristinaespiralis ATCC 25486
MMAGRNGSGKTTLLRMIALTLTGERRAHQLEPELEGYLTHGATRGSAVAKVLANRSADTMAQDGNELVEARLDWRPEQDGSLFDELVEDYEPPTEVVFSAPRPLASALWSSAPPPGWFCAAYGPFRRLTGTGLYERTPQQLDRAAALRTLFEEQSALTEAFDWLLSLHLRTLEERPGIGQLKAWVLRLLNDGLLPDRYHIEDVDSEGMWLRRQGDSGPEGARTELRRMSDGQRTVIALVLDIVRQMHAAYGDLGFEEHVGGRIVLPHPGVVLIDEIDAHLHMTWQKNIGQWLTTHFPAIQFIVTTHSPYICQAADPGGLIRLPGSGEQKPPQVVDGELYGRIVFGTGDDAALSDLFGLDSPYSDEARELRSKLAELEYDVLLGRADAVKTEEYLRLRDRLSSSPVARVDEVMERYRLSRERDA

SEQ ID NO: 81117 - protein, 264 aa, Streptomyces pristinaespiralis ATCC 25486
MIPIQRLSLPQAVTARMAVLTERIGLRDTASGLRKKYADNLWNEEADVKRGLREVLLKMAPGVLGCCMYCGGFTATDIEHFEPREHDALKTFFWPNHLLACGPCNSTYKRHWWECDEETGEPLLIDPTRDDPFDHLLLNLREGKYRGETDRGRTTINVLALNLPERRLVAGRKIARLNIRSVVRDWGRAWQQGDAEAQRDALDVLKGQPFADVWQAMLRQAVLPGAALVMSDEPPEILSLLRNEELRAATLIQFPLQPTTAEAT

SEQ ID NO: 81118 - protein, 417 aa, Clostridiales bacterium 1_7_47FAA
MNQLFISALTIEKVRHLEDICIPLSKDRMKHLIFTGRNGSGKTSVLDAMAGFLNAVSTTNDPMEAQEYLNKDIDTLELWIKNGKSGNEISDIRKLIEHYKLRIEQAKQGINMQLNYPLNEIRSMYEAGGYITAYYKADRIFHTEIPRHVEKVELKEYYSISDTPRQDFVKYLLDLKMTQALAATGGKTEKADVIKTWFNKFEDLLGRIFEDGSLKLNFDEDTFQFTICETGKEPFDFNSLSSGYAAVLDIIVDIIIRMEKRTGRSFKFEMPGIVLIDEIETHLHLELQKRILDLLTTIFPNIQFIVSTHSPFILNSLENVVIYDLENHLLVEDGLTDVPYDGIVEGYFNVDKMSAMLREKYERYKMLVRKKNLSDEDIAEIAKLEIFLDEIPDYLALNISTEYKGLKLDFESREDLL

SEQ ID NO: 81119 - protein, 96 aa, Clostridiales bacterium 1_7_47FAA
MVKIERSYPAPESLLKEAAKINGSYAKPDVVERLKRDFHNKCYICEMKELQDPQIEHLLPHKDGRYKERKFDWENLFWACGHCNGVKTKVSMMTVY

SEQ ID NO: 81120 - protein, 410 aa, Coleofasciculus chthonoplastes PCC 7420
MDCIAALLIQLEIRILKIELTDLFESDTVSKKINETFKIDDIKLEAKESYASVTISLESSNKICWKIQKNINKQEVSGNYDQVNHYIEYLRQQLQQENQSINLPLLIYYRTRRMVLGTQTIDLDDLDITIIQCRINQLNAYRGAFNPEINNFQDFLIWFRQEEDYENEIRLRQDNAYRNPNLEVIRKAIEVFLAEFPDSDFHNLRVVRSKSQRNLDFTRNPAPPSLTITKNNQDFKLEQLSDGQKMLLMLVTDLARRLAIANPGLGVNALEGEGIVLIDEIDLHLHPQWQRIVIPSLTRTFPNCQFIVTTHSPQVLSNVKRENVFILEDFQLVEVTPHTYGRDSNSILYELMGVKERPNQVQEKINACFALIDEEKIEDAKIKLQELAELLGENDPEVIRGQTLISFLTE

SEQ ID NO: 81121 - protein, 220 aa, Coleofasciculus chthonoplastes PCC 7420
MKHIVKGNEPRSLLEHRSQPYADYDNYPQKDDLRQLLLTEQGYICCYCMQRIARDTMKIEHWQPKSIYPNLQLDYRNLLGACHGNQGQPQRLQHCDTRKGEIEITINPADASKNCENFIKYSSSGQIYSDDETINNELNEVLNLNLETLTRNRKAAMDAVIEGLRKKYPSKSWTVGILSKEIAKFDNVTQTAKYRPYCKFVVCLLNKKLSVAKNQAKSQG

SEQ ID NO: 81122 - protein, 456 aa, Coleofasciculus chthonoplastes PCC 7420
MEIQRVILNNIGLFENLEIPLAPTEQNPSNITVFVGNNGAGKTSVLKALATSLSWFTARLRTEKGSGNPIPEDAILNTANAASIEIEICDASGTSDNPNQNEIQHHFKWTLAKNRTGRKSRYTSHLNDCTRLANRYRDALTRDHKTRLPIIGFYPVERVVLDIPLKIRTKHTFLQLDGYDNSLSQGVDFRRFFEWFREREDTENESAMPEDVLNQLKPLLETNPDAWQRLNELNASAKDRQLTAVRTAIRQFMPQMDNLRVRRKPRLHMAIDKNGETLNVAQLSQGEKSLMALVGDIARRLAMLNPALENPLAGDGIVLIDEVDLHLHPSWQRSLCDRLIATFPNCQFVLTTHSPLVISDCKNVLVYTLTNGELQQLPSQYGQDANTVLLDVMDTSIRNQKIDAELNDLLDAIQDLKLTEAQQLLAKLTEELPANHLELVKAKLLIRKQELRHANH

SEQ ID NO: 81123 - protein, 107 aa, Coleofasciculus chthonoplastes PCC 7420
MRTISKGTEPSSLTAWKRANPHGRYNQLTEEIRRTIRQYALAEQFYLCAYCCQRIQNIDACHNEHIEAQKLNPRRTVDFSNIVASCNTSNQCGDAHKSQPLPLTSQG

SEQ ID NO: 81124 - protein, 422 aa, Mitsuokella multacida DSM 20544
MHVKTIAIHDFKGIEHCQLTFKPGFNLIIGENGKGKTSLLEALAIGISGFLSGVHGGGIHPRNIQSEEARTSYVLQGDGAYEPQYSWPHIDMNAEVAGSPYEWERAKDSYGAQTKTMPRDICHLAEQMVADTSAVLPVICYQSAGRVWSQKRKKQTSTFARKKSSRIAGYIDCVTDESSMKLMLEWCSRMEQIAWQTDKPVREYEAVKQAVATAMTKLEGASVAIFYDKRSEELLYQKGSAVMPISALSAGYQSLIWMVFDIAYRMAVLNPFLTERITETPGLILIDELDVHLHPRWQWHVIDVLRHVFPNVQFIATTHSPIIIASAKDVWCIDIENLASPKAAMSGYGLEVDYILRRIQNSADLPASVAAQLEAFYGAIDREDFTTAKEALTKLEHDIGPDSPLAVKARERLELELALSEG

SEQ ID NO: 81125 - protein, 234 aa, Mitsuokella multacida DSM 20544
MRYIEKHAEPRSLTAYKQQPHAYYDGCNKEDIRKRLLEDQGYLCAYCMRRIPEEITVEDDMKAEDGIVKKAQKMKIEHWLPESQCTEQQKLDFHNMLGVCMGNAGHPYRETTCDAHRKDKILTINPLDRDMVKKIRYNTHTGEILSDDTQINDDLNNTLNLNYEGSDFSLPLNRRNALAVCLTKIQVQSRNKPGNWRRSLLQKMLKAYENKDTNGKYIEYSGIVIWYLRKKLGS

SEQ ID NO: 81126 - protein, 438 aa, Butyrivibrio crossotus DSM 2876
MKLKNIKIENYRCFKRADIDFDENITLIVGKNGAGKTAILDAVAVAVSTFLLGIDGGVSRGILKDDARYEFYDFDGTIDSQHQFPVSIESTGDCLDKRNIKWIRSLNSENSNTTIKDARELTNISKDVQSRIMAGDRTLVLPLVSYYGTGRLYAQKKEKKNKKSLTEFKRQVGYVDCMAAESNEKLMLNWFQIQTLKNLQEQQKTGVVEKPLLLKTVEKAICKCFERISGSKNAGMIFDLDTHRLVLEYETADGSLRKFAMDEMSDGYKNTLSMIGDIAYRMAVLNPMLGDKVLEQTPGVILIDEIDLHLHPQWQQTIISDLNTVFPNVQFIVSSHAPAVINSVAKENIRILDNGEVYMPVAQTYGRDANSILREVMKVSERPIDITKRLDMFYAWMDDKKYDEADKVLSEIEDIVGTSDPDIAAARTSLDLEKMLGE

SEQ ID NO: 81127 - protein, 225 aa, Butyrivibrio crossotus DSM 2876
MIVIKRGKEPNSLLQFRKQNPNADYESDTPSDVLKDVREQMWREQKHLCAYCMKKIDSPDLVRIEHCRPRHPHNEVEHDKKATLDFKWMLGVCYGNSLVKGVKMEDETCDAHRGNTELTINPFDEKSVRKIKYKENGYIYSDDEKINKDVTETLNLNCQAMSLPQTRRRVLLAEKNRIMKKCNGKSHDAFIRELERTYQSLVQDQNLTPYCGIIISWLESKLKIS

SEQ ID NO: 81128 - protein, 411 aa, Desulfovibrio piger ATCC 29098
MSLDFGPRLNLFTGDNGLGKSFLLDIVWWAMTRHWPAELNPKLTAGKMALPTDKTRKAEIDFSFSAASKPMQTKSRFMPRLQGWTAKQGRPANPGLVFYAMADGSFAVWDPARNYWKSKGEDGNARPAAYVFSPTEVWDGLQREDGTWLCNGLIRDWAGWQKEKGTAFSYLESVLEALSSPDEEKLVPGELTRISLDDVRDMPTLKMPYGQEVAVVHASSGMRRIVSLAYFLVWCWEEHLRAKKLLGERPSNKTTFLIDEVEAHLHPKWQRSIIPALMNIMDRLMPHAEVQLILATHSPLVMSSVESVFDAKQDVWFDIDLVGDKVCLTERTFFRQGNVCNWLTSDAFDMKSGYSREAEAAIEKAKALLSCDNTGMSEARQVDVLLRNALSEIDPFWIRWRYVAEKKGWLR

SEQ ID NO: 81129 - protein, 199 aa, Desulfovibrio piger ATCC 29098
MIHVDQQPEPHDFDEKVRRKGLDWLRNQNFDIHGPVPKGVDIPRYWLVCLKDLYDSYGGYCAYLAVFFEFAVGGATVDHFVAKSKSSALAYEWANYRLSCSRMNSRKRDYDDVLDPFSVENSWFHLELVTGHIFPDPELPGEQKVRIQKTIDRLKLDDGASKEMRARHFQYYCEGQLTSEYLKKYSPFVWMEATRQNLL

SEQ ID NO: 81130 - protein, 385 aa, Streptomyces roseosporus NRRL 15998
MYVSRVYVENIKSFHGPRVVDLTLTRPDGTHAGWTVLAGRNGSGKTTLLRALALALSGRHTCSTRPLGGQSGGLVLRRLRTFPAHGRGSGEVQRLMLASGPVARQASLFHEDASLAEGVAWLIEQHLRALEGREGAAELKRAALSVLGHGLLPDGYRVEDVDSEGLWVTRDGHRYPLREMSDGFRTVAALVVDLLKQIHDAFGDDAFSGDDGEAGRSILSVPGVVIIDEIDAHLHVSWQRRIGPWLTEHFPNIQFIVTTHSPYICQAADPGGLIRLPGVEEDAAPEVVSEDLYERVVYGSGDDAVLSELFGLDTPYSEQAERRRAEFVALESRVYEGDTSPETVERYKQLKELLTSSPAARVHEMSARLHRLSEGIGDGEGGEAE

SEQ ID NO: 81131 - protein, 215 aa, Streptomyces roseosporus NRRL 15998
MAPGHQRCMYCGDSQGTDIDHFEPKSRAPLRTFEWLNHLLACAYCNSNQKRNRFPRSETDGSPLLLDPTLQEPLEHLRLVLPVGTYKGLTPQGDACIAVFGLNNRGALVDGRRTAYVTAKHSVELWRIATDRGRHDKGAEIVRAAWNRPSGADGASPGVGCDQAERRPPLSAVTNEDQPSAEKTTAGPSAALLSRTGTAAWPRATSRHSPWFPPL

SEQ ID NO: 81132 - protein, 415 aa, Blautia hansenii DSM 20583
MEQTFLTDIEIKKVRHLENISIPLDKNKRKHLILTGKNGSGKTSVLEEIVQHFNYILSDQFDSYDELTEKQRFYIDRIEEAEKISDLEKRTKSIQEEKRMLEWIEDKMKNWLEGVVSNFTSYMVLREKYQRGDFIFAYYKAEREFQVEEYKNIEKIEFQDKYSISENPGIKFTKYLVDLKATQAFTKDKEKYEKINKWFHAFEDILKKIFEDKNLQLNFNDETFQFSICETDREPFDFNTMSSGYAAIFEIINDLIIRMEAKSGLRTEFNMEGVVLVDEIETHLHLELQKMILPILTTLFPNIQFIITTHSPFILSSLDNAVIYDLQNRTLVENGLEKLPYEGIVEGYFKADTLSAELRGKFERYKDLVSKEKLSDEEYEEIDKLEFYLDEIPDYLAKELTSEYSRLKLEFSNRG

SEQ ID NO: 81133 - protein, 218 aa, Blautia hansenii DSM 20583
MIKIDRNPVPPLSLAVEEQKAKGVYNKPDVIQRLKEDSHDKCYICELGGLSDPEVEHLKPHHGRTIPERIFDWNNLFYVCPHCNNIKKESKYDDKIIDCCKEDPEKMLEQFYEEGHVNVHNIVDEERAFMTADLIQECFEKRNTGIREAACQHRIDRLADEMNILYKTLEKYKKNPELLRYKRSLRSTLSRNSIFAAFKRNYVRKHILDYPDLEEFLM

SEQ ID NO: 81134 - protein, 385 aa, Streptomyces roseosporus NRRL 11379; identical to SEQ ID NO: 81130

SEQ ID NO: 81135 - protein, 215 aa, Streptomyces roseosporus NRRL 11379; identical to SEQ ID NO: 81131

SEQ ID NO: 81136 - protein, 449 aa, Bacteroides sp. D1
MRINTIKIKNFRGFEDKSFEFDSRMNVVLGNNTTGKTTLLHAVQIALGAYLQALTLIPGGKYFSRNFLKGDQVRKYSESTKSFLLDEQKPSIEVNADYYVGRIALGTKDYSEQIKNITWLREGSKNSRKNNGELMDEVYYMEQQRRNADATKVNSIFPLMLSFGATRLQNNYNGAEKTKARASREEKAYKCALDEQVDFKSAFDWIYSYEKNILKELEFEGTDEAFIQAIKEAIPAIKQIFIDKKNDEFTAQIQMTGDLTPRWLTYDMMSDGFKSMINIVAEIAYRCIELNGFLGKDAVKKTPGIVMIDEVDLYLHPHWQQHILEDLQKAFPMFQFIVTTHSPFIVQSVDTNNIITLDAKVSPISPSNRGIEEIMVAEMGLDIDISNRSEKYRKKYDLAHRYYQLVKNGREGTEEANYVKSELNKLEAESKMFHDPAFEAALRLKRGDL

SEQ ID NO: 81137 - protein, 249 aa, Bacteroides sp. D1
MRPVTKKTIGESIMLGNGTTHVIQEEYKPYGNARPILLTNLGRYCSYCEQAFLCGSNLQTEHIQPKGLDVNGIKPYAELSTKWENFLLGCATCNGKGNKGDKNVVFEDIHLPHRNNTYLSLVYKEAGVVIPNPKLEGKSLANAEALISLVGLDKEDLDTDGRCGMRREVWEKAIMYLNDYENGEIKLRHLIDYIKVSGCWSIWFTVFSGHDEVRKALIEEFPGTAKECFDANNHYEPVNRNPKNAIDPV

SEQ ID NO: 81138 - protein, 444 aa, Bacteroides coprophilus DSM 18228 = JCM 13818
MHDITIKNFRCYEEKSMEFRRGVNLLIGDNSVGKTSLLHACNLVMSAFFSGYSDENTVWISADENDFRNTGITEQPVEILFHPGEWDFNTISTPIGESYSLVRDVDLKIEKKSKKNSRNLLSGLIPLRNYASNLKLWSHIVLKDKGIKQINPLPVYACFTTEDIHSTVKLEKNKFKTYVQKPSFGYYGCSDCRGLLECWIKRLLVLKEAQRGEEEINSVRNAIIDALGTDGCNIINDMDIRHNEGKVYFKFVDGRESESALLSDGYRRLVNIVMDIAFRCALLNKSMFGDQCYKHTHGTVIIDEIDEHLHPALQVRVLKALQDTFPKIQFIVSTHAPLVMSSVEPRKDENGNDINVVYKLEYIDGEYMHKELNIYGMDASTIIETYMGQPSRDLKVNNDIKSILELIDKGDIQTARKLLEELEKNIANGDPELTRMEALISFME

SEQ ID NO: 81139 - protein, 229 aa, Bacteroides coprophilus DSM 18228 = JCM 13818
MILITKNKEPKEWTEYRNTPGVDYQAIPELVQSLLKEQGYICAYCMRRIPTKDKIYKKDGVNFVYTNEDHRVEHIKSREQHDDLKLDYTNMVVCCPGHIGMQDHCDRLKGPKDISFSPIDKQFIEMIRYSSNGEISSTNDVYNNEMKDVLNLNTELLRRNRFLMLTEVIIQINSTCKKGKNWDKRTLELFLKKYSEKHSEKDEEGTKEKYYPYCGIIIWYLQKKLRTLD

SEQ ID NO: 81140 - protein, 434 aa, Clostridium asparagiforme DSM 15981
MRINALYLNDFRGIHELKLSLDGKSMILFGINGVGKSTILSAVNLLYANIINRIVKLRFKQTVNLELSDIKYRKASAKIAADFIFEQEKEVYHYGREITYDNKRSQNTAELDRLVDHYEKLYVGEVKIDEENNLIEENEHFNLPIFVNYGVNRLVLKTPLRIRRGESYGQYSAFEHSIENQIAFSKLFEWFLEQELFETQMQKQEPSYRDIALQAVKKAMLAMLDGYSDIHIVAKPYSMRVTKGKEVLDVLQLSDGEKCTLALFGDIARRLAVANPSLENPLLGTGVVLIDELELHMHTSWQRKVIRVLKKTFPNLQFIITTHSPQILGEVDQAFNIISLSHEADTIKCTSISSLYGLDSNTVLEDVLNTDSLNHEVKLKIDKMYGCIEEKKFDEAEMLADFIDEITIKRNADTVKARLLIKVGRKRYAQNQKK

SEQ ID NO: 81141 - protein, 221 aa, Clostridium asparagiforme DSM 15981
MPRHFTAWKKAFIRRNGREPSYNDLYGTEEYYKIKQDLLQEQGCVCCYCEKRINLNDCNIEHFMPRNPDRNVLTEEECDICRNAQLDYENLFASCLGEKSGISDHCNSHKGNWYDFRYCISPLSDQIEGIFGFRLNGKIFAVDNNSSAEQMKNHLHLDSYVLREQRKQSYYTVLELEFADVELLDQDDYIADTIGYYSEKDENGKYTPFCSMITYCLEHYL

SEQ ID NO: 81142 - protein, 583 aa, Vibrio sp. 16
MLCILSQPSLKGSKLNTANAYFIIFLEAQVMEIKIDHSKSIRKLESNAKKGNFYSAFQLYEYYSEGKFVKKDSVKADYFLEMSNSLFEQQEVKIKEINIENFRNFDSLFLSDFDPNINVIVGTNGAGKTTLLDAIDTSLSWLRNSILKTGGSGNYISEKDINLYSDIPYATISSVIEVNHKIDVPLEISKSREGTAKRRNQLLAHRTIGEFYKIANEKNPTFNFPLLAYYNVMRSYDVNPRDISGHDEVIGFDKFEGYRNSLNGKTDFQSFFNWYKRLDDILARRESNVSKATVLKELGLTPSLFEKLEILAEHDEETRESLEVIRSKFPDEVDDILDEDYAKQAKLMVNQAISSFMTGYSNLEVQLEPFVDLLIEKNGRKISVLSLSQGEKTLLTLIADLTKRLIQLNPSLENPLQGQGVILIDEVDLHLHPKWQRKIANNLKKTFPNCQFFLTTHSPLVLGEVNPSQITLLSLDENCSVTIRKPSQSFGLTSNDILNELMSDGASEYTQLGRSELVESMLRQINKLIAIESEDSLAEAREKIIELEELTFGEIPELLGAKMELEILSNHDELTGEDNETDH

SEQ ID NO: 81143 - protein, 215 aa, Vibrio sp. 16
MKQIIKKAEPVKLTQYRLQSDAVYDGPNFTVVKNDIRTSLLEEQGYLCAYCMKRISFHNMKVEHWAPQETHPDKQLNYRNLLGCCKGNEGFPPSEQTCDTKKANLNLSFSPADSSCSIESKVIFANDGLVFSTDQKFDRELNDILNLNYYRLKRNREEKLEGLKRVLNRDAGRRTKSQLQALISRYSSLDTNGMYREYAAVILGDLKKRYARAPR

SEQ ID NO: 81144 - protein, 413 aa, Fusobacterium necrophorum D12
MKIKKIEIKKLKGIKNLSLSFENEGKPLDIIVLAGSNGTGKTTILEAIKNIFVGDYSDYGNENFPVRMEIFFESLEEVAISKSKMSSKETNIKQWKILNAFRNYSSLKEELEQEFFDYQLAKNLKILPKIIYLPTRTNFQNVNTKTTALKASNHFVNIVDNEIFKDIPSYIATRVYYVANTQENLTLKEAKEKVAEEINSVFKILDLDIKFIGLSKDEESNPIFSNSAGEEFDINELSSGEKQLFLRTLSIQMLNPKNSIILIDEPEVSLHPEWQQKIIEVYRKIGSNNQIIVATHSPHILGSVRKENIFVLVKDTEGNITVKTGEELYASYGQPTDKILEGIMNLSFARVPEVASKLENLRQLVDNNKYNTEEFKEKSEELHEILGEKDIDLMLIDMDVELKQKENLNAQSE

SEQ ID NO: 81145 - protein, 160 aa, Fusobacterium necrophorum D12
MTIKENLKKSLLKEQEGNCCPYCEVKIHLERSHIEHIKPKDKFPKFLHEYDNMIACCVSNKNCGATKANQWDNLFINPVLDNPEEYFKYDIKTGRILPIDEVGYKFDRAETTIRFLNLNEKNLCDKRKVYILKFRDTQKEYRKFFQEFPSLKRYLQNILT

SEQ ID NO: 81146 - protein, 390 aa, Fusobacterium ulcerans ATCC 49185
MKIKSIEIENNKALKNIKINFEKENEILNTVVIAGSNGSGKTTLLESIWDYFKNEMGIRRYGIGIKAELFLENDEQKIKESLLSSLNYLMYYKENDFKRYQNIVENIKVIPKLIYIPTEINFNEVKTKTTTLHRDYEFFNIVNSKMIEDIPSYIASRITYLANTEENLTMKEVKEKVNSEINGIFEILELDVKLTGLSKDEKSMPVFTNSSGDEFDINQLSSGEKQLFLRTLAIKMLEPENSIILIDEPELSLHPKWQQRIIEIYQRIGKNNQIIVATHSPHILGSVPRENIILLSKNENGEVISTTGEELYTSYGQPVDRILEDIMGLETTRNPKVFDLLNEVRKLVDENQYETNNFKEKYSELKSILGETDKDLFLIDMDIQRKRRKE

SEQ ID NO: 81147 - protein, 188 aa, Fusobacterium ulcerans ATCC 49185
MFKINKKEEPGFFKKFKTKKGLYNWRVYDYKIKRELKNYMLEYEQNYYCPYCELKINVEESQVEHIKPKEKFPELMHEYSNYLTGCKSPKTCGQFKANQWSEKFIDPTVEDPEEYFTYDIKTGKIIPKEKERLKVEKADYTIKVLNLNDKRLCEIRKTFIEQNLKNMECLDYIDKFPSLKEYLKENFN

SEQ ID NO: 81148 - protein, 465 aa, Escherichia coli 83972; identical to SEQ ID NO: 81096

SEQ ID NO: 81149 - protein, 243 aa, Escherichia coli 83972; identical to SEQ ID NO: 81097

SEQ ID NO: 81150 - protein, 452 aa, Pseudomonas amygdali pv. tabaci str. ATCC 11528; identical to SEQ ID NO: 81086

SEQ ID NO: 81151 - protein, 216 aa, Pseudomonas amygdali pv. tabaci str. ATCC 11528
MRKIEKGSLAVLEKWKRANKGKKYGDLVGHEDIKDAIRHACVTEQHGLCAYCCCRITAEKGSACNEHVEAQHLAPHRTLDFGNIVASCTNAKRCDKAHGRQLLPLTPLMIECEKELQFELSGLVAGTTLRACASINVLNLGDTHESNRGLVGERKQMIDALLFSCSIDPAELFIEEDDVLDLLKNDLLEVDAQQFLQPFSPVLVNVIIGIQRARQR

SEQ ID NO: 81152 - protein, 455 aa, Ruminococcus sp. 5_1_39BFAA
MCEFNIQEIELFNYRQFEDKKFVLNSRMNVFAGKNGSGKTTVLEAANVVLGAYLAAFKTYVPSRFVFNIKSTDARRKTQISDDSRILTAGAIPQYPCKVSCKAAWNIDYESIGFQRVLLKQDGRTKFGGKNPMQQTVIEWESKIANADHSDEDVILPLVLYLSSARLWKDGNKRTVKTGVLSRTDAYSHCLDAQHGLDIAFRYIDTLKAVAVEENDGKIFPAYEVILWAVNEAFRDELKSGEKIIFSTKYEDDIIALRTSEGTVLPFQMLSDGYRNVIKIILDIAARMCILNPYLKEKALQETPGIVLIDEIDLSLHPTWQKRIIGILKQLFPKIQFICATHSPFIIQSLEEGELITLDQPLESEYSGESIEDISEDIMGVVLPQYSEKKRKIYEASKLYFEALTQAKSQEDIDRLGKRLAELEAEYSENPAYMAWVHQQYLEQKWKVKKNETNK

SEQ ID NO: 81153 - protein, 231 aa, Ruminococcus sp. 5_1_39BFAA
MRPINKGESPYKKINEYKDALPYLERRIGMYCSYCEFSIPHVPEVEHVVSKSKGGDLTDWNNLNLGCKYCNTRKKAQTMPENKKNYLWPDEDNTAIAYSYINGIPKVNEELLIKLDSTGDYLKRARNTYNLVGLGNLPMGKDRDRRFGQRNTAYQKALNSLEHWNHMKDLSKEYQNDMKNQIIMTALGDGFFSIWMEVFCDEPEIRLALIEAFPGTNLNYYDEKGCVKEII

SEQ ID NO: 81154 - protein, 429 aa, Selenomonas sputigena ATCC 35185
MYIKRLQLENFRCFEQLTIDFPKDYTVLIGGNGAGKSSILDAVAIAMASFLAGCGIQAANFHKTDVRFLTYTYEKGGFNREAQYPVRISAQAETENQECIAWTRALNSERGRTTVGEARPIMNHADALCQRVKKNLPVTLPFLAYYGTGRLWLPKRTKKDAVMRGVPSRLHGYVDALDAATNEKLMLQWFQRTALMEVQKGVSLPIFQAVKRTMEKLYAEMDDTAEVVQVSYDFNELEIEIRVTDKAGTNVSLPLRYFSDGIKAMLSMTADIAYRMVTLNPQLGGEAIAETPGIVLIDEIDMHLHPSWQRKILTALRKSFPKIQFIVTTHAPAVLANAENEHIMIFSHGKVVSSEKYIYGRDVTVILRDVMHTEVRPKEVVEKKALFYEVLEKGEFSRAEELLADLEKVLGAQDEDILRMQVMLDMERL

SEQ ID NO: 81155 - protein, 212 aa, Selenomonas sputigena ATCC 35185
MIYIKKNEPPGEFIRYAKSSGACFDGMDSAVKATLRTALLQEQKYLCAYCMTSLEDSYKYVKIEHYVPRDADNELAYKNLLAVCCGNAGKPKTVQTCDTRKGNTILQIDPQNQHHMADIFYDGNGKIYIKNKEWQADLDDVLNLNCPELQAGRKAALDGLCAVLYKENKAKSASKAYLEKRLKFYQEGKDGRLRSYCGILRYYLQKRIRQCR

SEQ ID NO: 81156 - protein, 326 aa, Bacillus cereus Rock4-2
MGRRFCMTDIFITELKINKVRHLKDIHIPISEKTRKHLILTGKNGSGKTSLLEGILEYFAILDYTTLSMLDRHRDFINVHKNELTRYEDRLKEDPDNSAFLMQINEAKRNIQSNVEIIAKYEGKIKPSFNTLLNFDEYHENGKYIIVYFDANRTSHMDIPNGIEKTRLLPTKEIRANANAVFLKYLVDLKAQQMFAQQDGDKQTANDIDLWFKNLEQCFKTLFENDKLVLKFDYKDYNFIIEEPGKESYTLNTLSSGYSAILHIITELIMRMLAAKAPLYDIQGIVMIDEIDVHLHISLTKKNIKVFNRVISKHSIYHYNAFSVCY

SEQ ID NO: 81157 - protein, 178 aa, Bacillus cereus Rock4-2
MNVEHFIPHKGNKGLEFSWNNLFWSCAHCNNTKLAKYDNILNCTDPEDNIENRIKFMIEPVPFARVNIEALDQEEKTIQTVELLNKVYNGSTHLKVIEADYIREALVDEMLEFYKLLQSYAKSTNEQLKNIFFLQIIDELDSSSAFSAFKRQLIKKHSNLMKIFGESFDTPSEEFNAS

SEQ ID NO: 81158 - protein, 437 aa, Bacillus mycoides Rock3-17
MIIHDLKLENSHGFEERYITFSDKFTVLVGDNGTGKTAVLDGLAVALGAFLSGLDGVHSRHIRRDEIHREIFKLGGLSDIQMQFPVKISCTGTVAGNQLEWSRAVNSKKGSTTSKEARSIIEYASYLQKDVMNGEEITLPVISYYGTGRLWVQKKEQNNIRRKSDRLEGYEDCLDPASNEKHFFSWMEKMTYIELQRGETPPVLKAVRKAISDCMRTWKTIEFDVDSQELHAIKNDDTAISFHLLSDGVRNMLGLVADLAHRMAQLNPALGDAVIRETPGVVLIDELDLHLHPSWQRRVVEDLKRTFPKVQFITTTHSPFIIQSLEEGELRRLHEEDDDEVVRDEEFVNKSIEDISENVMEIENVQRSEKYKKMYEAAQKYYSLLQEGKQASDAEVERLKNELDEIESLYSDDVAYYAFLQMERRAAGLASDTNETD

SEQ ID NO: 81159 - protein, 112 aa, Bacillus mycoides Rock3-17
MAVEHMQPKSLHDDLALTWDNFLLACVNCNSIKGHNPINLEEYLWPDKDNTLLAFHYMEGGLISVSSTLTPEVKQLAERSIKLTGLDRYPSMDPNTNPERTDTRWRYKTYSI

SEQ ID NO: 81160 - protein, 410 aa, Acinetobacter calcoaceticus RUH2202
MCKPNQLKPFQNVFTIITGNNATGKSRLLNSIISTTLDSPAYDFKKVIGISNTLNNKFPDFKNPKYIKLTNIEFSDLHKIKKNVTETDPDYFKSELYRIFINYGLPVNLTQPYTLNLEKILPFVAIKSIESPSILQKIKILFDFLEIKGNVKITFEIKNRNKLLKTLDEIIEKKEASDKTLKQIKKIFNDIQGFQNKTIYLDELIDYPACYELIRCGIINIAKIRFALKDHSYDLLYRDLSSGQISILSLGLSLIYSLEDNSLVCIDEPEINLHPEWQKQIIKLIQKLSDEYKGCHFFIATHSPLLISNLNNQSFILDLSNNKLLQSIDIINRSSDFQLTEVFNFPGNNNEYLIRKLIIILNKINSDENFTFDLDSLKLLNHIKTLVNEEKFDKEDKVNILFNLIESYRG

SEQ ID NO: 81161 - protein, 218 aa, Acinetobacter calcoaceticus RUH2202
MLVFKIPTELKSLIDSYDKKNHQIWNDENNQDVKSFRSLIRNHYLSSQKLTCFYCRQYIFSTNGLHWQVEHILPKSKFPQFLFEPKNLIVICPDCNREKSDQNPHVDGEKACTRPSYPSTSGRFKIIHPLFDNYEEHIERVPANHCDYPNHYFLKAHTPKGKATVRMCYLDRFTQEFAGYKDMRGKQVERLDDFLERDLNTLTKEQKKALVQRIMDSM

SEQ ID NO: 81162 - protein, 441 aa, Acinetobacter junii SH205
MPIIYQLEQNKNILKFIDNDFELQNTNIFTFLVGKNSVGKSRLLRSLIIHALEEDKFDKVLALSNTQYHKFPSYRDLPNKEQISNNKYTRLAFEARTPIYSGGYDYRKKINNFSKKNYHYLFNFFDENNIKFHKNLNTNLNFAQSFESFLTQFSFKEKPYYNLLTILDFLKLDHYVKCTILPTNSFKTEDLNIKINNYFNNSKNITSEEYEIFRRLKDSLYDLKNLRSFDLLHLSLYELESISFLIESGLVRIYKVSFSKDKKIFNYTDLSSGELAVLSLVLGLTATITDNSLVCIDEPEINLHPQWQEKIIELIELVSENYYGCHFFIATHSPQLISGISEKNSFILDLTNNSLKTIESFKNRSSDFQLSEVFNFPGKNNEYLIRKLILLLNKLNNEEDFILNTESNNFLKHINKLLKEEKIDQEDKVRILFNLVNSYRD

SEQ ID NO: 81163 - protein, 218 aa, Acinetobacter junii SH205
MEIFQIPTELQDFINRYDKKSYQLWNDEKNKDVNNFRRLIRNHYVSDQKFTCFYCKQYIFSTNGLHWQVEHILPKSIFPQFLFEPRNLIIICPDCNHEKGDQNPHTEGVRACNRPNYPSTSSRFKIIHPLFDKYEEHIERVPANHCEYPDHYFLKAHTPKGKATAKMCDLNRFYQEFAGYKDMKGKQVSSLDNFIEKDLNDLTKEQKIELVQRIMASM

SEQ ID NO: 81164 - protein, 449 aa, Bacteroides sp. 2_1_22; identical to SEQ ID NO: 81136

SEQ ID NO: 81165 - protein, 235 aa, Bacteroides sp. 2_1_22
MGNGTTHVIQEEYKPYGNARPILLTNLGRYCSYCEQAFLCGSNLQTEHIQPKGLDVNGIKPYAELSTKWENFLLGCATCNGKGNKGDKNVVFEDIHLPHRNNTYLSLVYKEAGVVIPNPKLEGKSLANAEALISLVGLDKEDLDTDGRCGMRREVWEKAIMYLNDYENGEIKLRHLIDYIKVSGCWSIWFTVFSGHDEVRKALIEEFPGTAKECFDANNHYEPVNRNPKNAIDPV

SEQ ID NO: 81166 - protein, 432 aa, Bacteroides sp. 2_1_33B
MKEIRLENFRCYTELSIPLKSRVNLLVGDNATGKTSVLRACKFVLSAFFSGFSDDNTKWVNPGNEDFMQMETGGILLQERPIHISFDVADVMGKEADSTGGDSFYTLIKKSKKNSRSLTSGLKEYKDWAALLMHNYISKEGQRIALPLFANFSTEDIHAIRKIDFGKFKEYNHKPSFGYYECLEGDGFFPYWIKRLLVLQEGRENHLEIDIVRKAIQKALGAGGCAIIQDMEVRPIRKKVYYILMDGREVEADFLSDGYRRLVYIVTDLAFRCALLNRGIYGEETCAKTRGTVLIDEVDLHLHPTLQSVVLKGLCEAFPGLQFIVSSHAPMVMSGVESNEENIVYKLSYSEEQGYRIMPTVTYGMDMSTLTYVVLGQTPRAVEVDRQLNELFELIDVDRLKEAGDLLRKLRGKYGDSLPELARAEAMLNCLI

SEQ ID NO: 81167 - protein, 209 aa, Bacteroides sp. 2_1_33B
MRKVDKRPEPKEWVEYRQTPGAKYEAISELRSSLLEEQGYVCAYCMRRIPVKDRNSNETSRIEHVLSREKHPDRELDYHNMVICCPGAISSDFHCDKLKGNEDLTFNLFDDELFTSLSYKSKSGKIVSANEDYDRQINQLLNLNNRWLMANRLQALLGVIDYLNRKGWTASNLNQQISKWSNMDAEGRYKEYNSIVVWYLKKKQRQCDL

SEQ ID NO: 81168 - protein, 414 aa, Fusobacterium nucleatum subsp. animalis 3_1_33
MKIEKVHIKNVKGIKDLELSFKKDDKILDLIVLAGVNGSGKTTILEAIKDFFDNKNVNYDELEKSNINLDIFFEDFEKNKIEEAQKNCKDRYEHKLKEFFYALKSCEYNRKNNGEYYSDLIANFFENPPKIIYVPAENKFEEIQTYSTTLSKKYEFINTINSNVIRDIPSYIATRRNYLATIEEDLTMKEITNKVVNEINGIFNILELDVKLKGFSKDEKTMPIFENSVGEEFDINNLSSGEKQLFLRTLSIKMLEPKNSIILIDEPELSLHPKWQQRIIEVYKKIGENNQIIVATHSPHILGSVSNENIFILYRNENGKIEAKTGDELYSSYGQPVDRVLKDIMGLKSVRTPKIDRDIQELRKLVDEDKYDTEEFKKKYNNLLEILGNTDEDLFLIDMDIKMKQKVNSNVESK

SEQ ID NO: 81169 - protein, 188 aa, Fusobacterium nucleatum subsp. animalis 3_1_33
MLKVNKKKIEPEEFTKYKSKHKIINWDSFTPEIKQVLKQYLLEEQENSCCPYCEIEINLENSHIEHIKPKNIFPNLLADYNNFIACCLTKKRCGNSKASKWSELFINPVIEDPEDYFEYDIKTGRMVPIFKEGEKYEKAKYTIELLNLNEDRLCKIRKVFIINYTKNIETRKYLSNFPSLRRYLEDRL

SEQ ID NO: 81170 - protein, 420 aa, Leptotrichia hofstadii F0254
MKIKNLHIKEYNGLENLDINFESEGKVLDLIVLAGINGSGKTRVLESIRYWFEMFRSKAVNVELFYEENEREVLESLMNSEGLTEVEKEAQKDIEFTDCLRNIKFYNYDYRHNKTENQNYNSKIISRSFEKLKIFPKIIYVPTEINFEEIKKAQTNLKKEYSFINIVDSYEIKDIPSYIATRISKVANEEEDLTMGQVRKKVFAEINGIFEILELDVKLSEISKDENSMPIFTDSSGKKFGINELSSGEKQLFLRTLAIKMLEPENSIIMIDEPELSLHPKWQQKIIDVYKKIGKNNQIILATHSPHILGSVEKESIILLVKNKNGVVEVRTGENFGNSYGQTMERILEDIMGLETDRNPSVYELLNQVKEMVKNDNYESFEFERKYSKIKDILGEDDRDLFLVDMDLQIKKGRKNAESR

SEQ ID NO: 81171 - protein, 205 aa, Leptotrichia hofstadii F0254
MLKVDKNDEPEFFTEFKKKSNPKSWKDFDFEIKDKLKEYMLENEQKIDGNYFCPYCERLISVEKSQIEHIKPKDKFPKLFHNYSNFLTGCLENQTCGSTKGNKWDDKFVNPVEYNPRDYFEYSISTGEIIPKYENGIEYEMAMKTIEILNLNQKKLCESRKSFIYQNSSRKEGKIVIDIENLKYITKFPTLKEFLLKNLKSATEK

SEQ ID NO: 81172 - protein, 378 aa, Leptotrichia hofstadii F0254
MKIKNLYIENEKRLKNLNINFENNGKILDVVVLAGINGMGKTTVLEVISDYFENIERNLKNKNKIDIKFESGEKNLDNLVANRETKVIYVPATVEFSNNLWNDDSFLELSKEKLSYTIGTYKFRSIPDYIRSKIMNKVTEGIDKSSQQIMEEVFSEINEIFQVLDENIDIKLVGMSKASSLEEILPIFKNSSGDTFDINSLSSGEKQLFLRTLAIKTMEPQNSIILIDEPELSLHPRWQQRIVDVYRKIGKNNQIIIATHSPHILGSVRKENIMLLDKDDEGQIVVRTGDELYDSYGQPTDRVLKDIMGLETTRNPKVFKLLEEAGELVDKNEYESEEFKTKYTKLREILGNKDEDLLLMDMDIQIRKKRGLKNVESR

SEQ ID NO: 81173 - protein, 104 aa, Leptotrichia hofstadii F0254
MLKVDKKDEPEFFSEFKRKKNPKHWDVLNKPENLHIKPELKSYMLKNEQKIGDKSYCPYCEMILSSENNDLKEDKECHIEHIKPKSKFSNLTFDYRNFFNILFR

SEQ ID NO: 81174 - protein, 425 aa, Erysipelotrichaceae bacterium 5_2_54FAA
MFTRIKIEDWRQFSNIDITFHEHLTVLTGANGAGKTTVLNLLSKSTGWNPQFVSSYEKDENGIVKYLNSLKNFGHKLFIKLVSTENTQPINNKLGELEFSDGTITDLILPDNITNGTYSIDIQGGKTEKGVFVNSHRPNFPYKAVKSVPTSVATRQQIYSKYNEFNKTFVFDTYRNANEVSATSLIKETLASLAIFGYGNQSVVPNETARNLFEGYVNILKIVLPPKLGFERIAVNIPEVILCTKTGDFPIDAVSGGISSIIDITWQLYMFADTSESFVALIDEPENHLHPELQKSFLGNLIKAFPNVQFIVATHNPFMITSQKDSNVYVLNYNEQNKVYSLKLDYVNRAGTSNAILRDVLGIDSTIPTWAAEELDNIIDKYSHCDLSQKNLASLRKELSSIGLADYIPESIVQIAGRMKSDAED

SEQ ID NO: 81175 - protein, 220 aa, Erysipelotrichaceae bacterium 5_2_54FAA
MRKIKKLEKPQILEINAAKWAQEYCLCLASGKKPSDEMVSRYKEPTIKATLEKETHEKCAYCESKMKHITYGDIEHILPKNKDARPDLYVEWTNLTLACEQCNRSGKRTYYNPQLLLINPYTDDPEQHFNDIGPLIMPVLGDKRAYVTRNILKLNRMALVERRTERIALVEPLLILWVNEQNDGMKEILEQQLHDEYSEDKEYSSTIKSYLKANGFPVRE

SEQ ID NO: 81176 - protein, 479 aa, Acinetobacter sp. SH024
MKYINTILLKNIKIPLNGRNLVLTGKNGVGKTYFLTKLYEQLQFEFRDKYISTDDQFHSSKIYDTVNIFYNEFIAYSDILEINSKYVNSISSLASEKNKKNSNKIKELKELQHIYNEHLKIFLQEVNIFTNSNDSNFKNKSKNYYSTKPEHLIRSNDLLKKALDELTSFQKFFKINFNERETNNSTIFSFFDVNSRLQVPEKYIHMGNMYDVKDLTYYLEELKLNFDSDIEGALERYLLEKREELRNSEDNICEEIYKIFSDIENDLKLIFDDETTVLSFDDFNNRVLIIQKNENISFGFDELPSGFKSIFKIYSNLLIKSKLIKTRKNKLNGIVLIDEIDSHLHISLQQKVLPFFTKAFPNLQFIVSTHSPFVITSTNDNTVVFDLSNNEFFEDNLSHYSHESIIKELFHVKEENENIKILSDQLLQFIESRNLTQDLNAIQELLNEINKDFEKLSVELQLQYMIAKNKLTKLKHEAK

SEQ ID NO: 81177 - protein, 223 aa, Acinetobacter sp. SH024
MFSVIRPDTFPKSLTKSTKDYRATDVVEVLQDIFFSKCYLCERKGFSDVNIEHRDPHEGDLIKKYDWNNLFYACVRCNGIKANIYKNIIDCCQTLDVAQAIELHCPIVNNDDHKVIVTVGNLASTIEIESTIKLLDQCFNDTNTALKGISRHTLIKQIQKYQTKLLIIKDELLDDSLILTSSEKNLRIEKLKVMCDPEFPFSAFWKWYITRDVDLSKIVGNVF

SEQ ID NO: 81178 - protein, 411 aa, Bacteroides sp. D22
MGNFITSIKVNHIFHLENFCIPISENEKKHLIITGKNGSGKTILLNAIVEHLSQVCNDKALRFLDLKKNLESNQAWLQQAETTGDSKSIASGQNNVEYYKNRVEEFYGKVELSFHDIYSISKDFFSQNFIIAYYADERKSLFVEPKNPVKPDLKMKTDLKHNKVDQFLNFMVDCKVQEALARNEGKTEDADYIRQWFVGFRNILRQIFDDTTLELDFNYKDYSFLIQTRGKSFKFTELSAGYSAALDIVADLILKMQSQNNVVRAYEKEGIVLIDEIETHLHLELQRVILPILTTIFPNIQFVVTTHSPFILNSLENAVAFDLEHREPIEDLTDYSYEALAEGYFGVRTDSSEIQMRLQRMEELIRSDRLSISDKSELEMYLQDFDKIPEAVAPAIKAKYYDLKREWQNKN

SEQ ID NO: 81179 - protein, 213 aa, Bacteroides sp. D22
MIRICKNADKPQTLDKSYNTDEVCKQLLMDQNDKCYLCERRLTTDYQVEHFKSQANNGDLKQTWENLFVACGYCNNKKSNKYDDILDPTQYDIETIIEHSNDFVNQKAIFDSDNRTSEVLSTIKLLNLLFNGKLSYRNCREQRFYDEFIQKMNFFSYVVDEYMSGKKEYYYPVIKEQLDIRSEYLGFKYAIIHSNDLLKHDFGDMTIWNKKGE

SEQ ID NO: 81180 - protein, 458 aa, Simonsiella muelleri ATCC 29453
MQVKSITLHNIGQFKELTIPLAPFNDNAPKVTVFIGNNGSGKTTVLKSLVTALNWLSARIRSERGRGLDIPEEVIMNGQSSGMVVLNVNVKNAEQSFTWQISKSKQGRKNQFSTDLKAINSLADIYRTNLTENAQADLPILAFYPVERSVLDIPLKIREKHSFEQINGYDNALNMGVDFRRFFEWFRNEEDAENEIYKDIPKLPPELVNILRQHNIDRAVVEKVKDNLHQAENRLKNETKLAYVKQAIQEFTGFEEIHIQRKPKQKMLVRKNNQEFDVIQLSQGEKSLMALVGDIARRLAMLNPSLENPLNSQGIVMIDEADLHLHPQWQRQLIARLTKTFPNCQFVLSTHSPLVISDSKDIVVYSLENGEMQQIPSQYGQDANTVLLNAMETAIRNEEVTQKLNNLLDLIQYNQLDDAKVKLTELHQELPENNLELAKAQLLLKKQEIRHEKNSKNS

SEQ ID NO: 81181 - protein, 206 aa, Simonsiella muelleri ATCC 29453
MRKIQKTHEPNSLTQYKRNNPTHQYKDLKDENVRQDIRQTCTEEQYYLCAYCCKEISGTNVDTMNEHIQPRHHFPNLSMDFNNIVASCNAKGHCDGSKDSHILLLTPLMDECETEFKFKINGEMVGKTERAKQSIDILQLNQRKLCESRKQAIANMLYVQGLGNPIDVEDDELLQSVCDDIMMPENGKLPAFAPAIVNAIKNWINS

SEQ ID NO: 81182 - protein, 413 aa, Fusobacterium periodonticum 1_1_41FAA
MKIEKVHIKNIKGIKDLELSLKKDNKILDVIVLAGVNGSGKTTILESIKDFFDNRNVNYNEPEKSNINLNIFFEDFEKNNIEEAEKSSNNYKQPLWNFFNALQSYQYEKYNNNGLYQNLIAKRFENPPKIIYVPANNSFGLVETASTTLSREYQFINYVDSVLMRDIPSYIATRRNYLATIEEDLTMKEVTNKVINEINVIFDILELDVKLKGFSKDEKIMPIFENSAGEEFNINDLSSGEKQLFLRTLSIKMLEPKNSIILIDEPELSLHPKWQQRIIEVYKKIGENNQIIIATHSPHILGSVSNENIFILYRDEKGKIEAKTGDELYSSYGQPVDRVLKDIMGLESVRTPKIEKDLEELRKLVDEDKYDTKEFKEKYNELLEILGNTDEDLFLIDMDAKLKQKVNSNVESK

SEQ ID NO: 81183 - protein, 192 aa, Fusobacterium periodonticum 1_1_41FAA
MLKVNKKSEPEEFTKYKSKNKIINWDSFSTEIKQVLKQYLLEEQENRCCPYCEIEINLDKSHIEHIKPKNTFPKLLSDYNNLIACCLTKKRCEDSKASEWDELFINPVIENPEDYFKYDIKTGKIIPIFKDGEKNKKASYTIDLLNLNDNRLCDIRRKYIFEFLNYSKYNKNSLSNYPIKFLSLRRYLEGRL

SEQ ID NO: 81184 - protein, 304 aa, Edwardsiella tarda ATCC 23685
MSDVKTRYKLPPLVIGAQRKITYKTINGVTREKDTQGSINEYCDNALSSLYNNSSRDIKQWLINRYFVIDKSWAEEEKANWEHLIKSLPIIGPFNSEFQYLDTGRDLESVFSIYGKKCFLEELSSGFQAVLYIIIAIFEWIEACLPVGERDVTTARGTVLIDELDNHLHPEWQLTVRQGIAAIFPNIQFIVTTHSPHLLASAKENEIIMLPSSYTDEVYEFQPSKKAYSGWSTDLILTELMGVRSLDNKDYEKLVKACYENIKENNLKALKENYFRLESICHPGDTVLIILKTRIAGMEAKAND

SEQ ID NO: 81185 - protein, 228 aa, Edwardsiella tarda ATCC 23685
MALVAKYNEYKKIPPNEKEAALKHYRHDDIRNALKESSFHKCAFCEGIPEETGFAEVEHFHPKSIYTDKAFEWTNLLYSCKACNNNKLNHDTQKQPIINPYDFDPSDCFTYTDIIIEPKAGANHDIAEKTIEVCGLSDKRLFSARGDILVSFRIFEADIREAMEEFDLARTSPNKQKRAGRINDALRTIEELSKPSARLSNFCTYLLANSEIYQEAKQRLQEYTSENL

SEQ ID NO: 81186 - protein, 421 aa, Pseudomonas savastanoi pv. savastanoi NCPPB 3335
MRLDHLHLQNFRCYEDAHFDFQPGFNLVVGVNGSGKTSLLLGVAGCFGNLLGSIGVHQPSIAESDVRFALVKFEDRIRFERSYPLVLTAQGGAFERQEWHVSLERSSLQTNFSALNSLVFSENLISIDVSTHGDLPVFAVYQANRRWLTMSVTAELAAQSKPSRLDAYTSWFDAASNLKNFETWFIGKTLERFQRLSRAGSSSVFNDELTWINSAIQCALPDAKGIEYDMELRALVVDMYDRKIPFNDLSDGQRGMVALFADIARRICLLNPHMGKDVLSKTNGIIVIDELDIHLHPGWQRTIAPALKKAFPSIQFIAASHSPQVIGSLQPGEVILLNNHDGSHPRATYGLDSSTILEEVMGVLQREPEIEELLDELFSTLENDELEKARLQLDALKQKAPDLPEFAGAEALLKRKELIGR

SEQ ID NO: 81187 - protein, 227 aa, Pseudomonas savastanoi pv. savastanoi NCPPB 3335
MRRVIKGTEPASLTEWKASANEDWTPTYPTLQNPQKRDLHNCLLQEQNFSCCYCGREIELDSSHIEHFRPQDHYLPLALEYSNLHASCLRETTPGNPLHCGHYKGNWFDEDLHISPTEDDCEQRFRYLLTGKIQSTSHTDLPATTMIEKLALDIAYLTKRRQEAITRVFDEQILASISDTELTLLVQGLRSGDANKQLAFSHVVARYAEQFLASLNPPPEKSSVKNT

SEQ ID NO: 81188 - protein, 515 aa, Acinetobacter haemolyticus ATCC 19194
MENTLTHLVANAHDEQFDSAYQLFINYYNGLNKFDKNKSEAEKYFRLATDLFQRECFLEKIEICNYKKIRKLRINFEKELTVIIGDNGVGKTTILDAIRKNMMWISASIRKDNASGGTISPEEVNNQSLTDIAGTYIDCNFNLGSKNQVRGLIARALDTSVIPLKSELTNYRDIGQKIRELNDYKAINFPLFALYGVDRLSERKFSSSDLVFNKIDGYEESLNKGSNFNVFLEWVIQILKISKGTLSEDQELLLQDIRALELGGASDSLSPLNSMYLKLKKAFEEKAIQQSNNEANKILNNINLVYQEIYEDFIGLELVNNDDGKDKVQLILKEDSFFLHQLSDGQRVFLGLIGDIARRLILLNDNSDHPLMGQGIVLIDEIELHLHPKWQKKIIQVLRKCFPKIQFIVSTHSPQILGEVQGKQLRILELQESREIDVIIPDQSYGLTSIEILEELMGGEGRNSNVKEKIEKIFKLIDREEFLLAEQEISKLELEVNGEIPELVEAKNLIFMMKE

SEQ ID NO: 81189 - protein, 213 aa, Acinetobacter haemolyticus ATCC 19194
MLNITRLPEPPSLIAYRQQPKAEYDGPQFTPVKKDIRTQLLISQGYLCAYCMERIIDDQFQTKVEHWKCQDNYPEAQLDYTNMFVVCLGKTQNNQHCDSSKGNQDLTINPANSIKKVESFIKYTRIGEIYVDDDDDISKDLNATLNLNNDRLKRNRKAVYDAINTRLSKIKGTATKKDLDDLLQKYSQSNADFHRIPHCGIAIYFLKKRLSKI

SEQ ID NO: 81190 - protein, 465 aa, Escherichia coli MS 45-1
MRIDKLSLLNFRCFKQLDITFDEHITILVAPNGAGKTTVLDAVRLALFPFIRGFDASLYVKDKSLAIRTEDLRLIYRQEALNMEMSSPAKITATGEWASGKTATWMLDKRGEQPPHEDKMAAQLTRWGEQLQKRVREEHSLQQVELPLMLYLGTARLWYQERYEKQPTEQRLDNSAFSRLSGYDDCLSATSNYKQFEQWYSWLWLSYREHQITQLESPSAKLKEGVRVQRMKEAIQAIQQAINCLTQQVTGWHDLEYSASHNQQLVMSHPQYGKIPLSQLSDGLRNAVAMVADIAFRCVKLNPHLQNDAALKTQGIVLIDEVDMFLHPAWQQQIIQSLRSAFPQIQFIVTTHSPQVLSTVKRESIRLLEQDENGNGKALMPLGATYGEPSNDVLQSVMGVDPQPAVKEKADLQKLTGWVDQGKYDEPKTQQLMVALEVALGEKHPQLQRLQRSIARQRLLKGKAQ

SEQ ID NO: 81191 - protein, 243 aa, Escherichia coli MS 45-1; identical to SEQ ID NO: 81097

SEQ ID NO: 81192 - protein, 452 aa, Escherichia coli MS 21-1
MMNIRTLKLTNLGRFEELDVHLAPVEEFKSNVTVFIGNNGAGKTSILKSLATSLSWFVARVRTEKGNGSPIPEDAILNGRSSATIELQVLNTHPATEAATPYRWLLARTASGKKSTTASSLQEASQLAAFYRDQYTQNSGASFPLIAFYPVERVVLDVPLKIKERHNFLQLDGYDNALNQGIDFRRFFEWFRNREDAENESGLPQDVLDKLSTRIDLDNTVLNALTAIMASSRDRQLTAVRTAISRFMPGFSNLRVRRKPRLHMSIDKNGQTLNVLQLSQGEKSLMALVGDIARRLAMMNPMLENPLNGEGIVLIDEVDMHLHPTWQRTIIQRLTTTFPHCQFVLTTHSPLVISDCKDVLVYSLDDGELTQLPSLYGQDANTVLLNVMDTDIRNATVAEKLNDLLDLIQKNDFINANALLNTLSLELPENHLELVKARMLLRKQEIKHARNN

SEQ ID NO: 81193 - protein, 219 aa, Escherichia coli MS 21-1
MREITKGQPPASLQQWVRAKPRDKNANQWFQELYAQKKWDIVGDLSQQCAQEQFYLCAYCCDRVTGTNRDTVNEHVEARDLAPARSLEFTNIVASCKTKGQCDDSHKNQPLLLTPLMPECETEFIFKISGRIEGTTPRAIDAIKVLNLGDSERNNRALIEKRKQLSDSLLWANGIDPSEGLEDDDLLQVVIDELLTPVDGYLAPFAPVVANILKNWMTA

SEQ ID NO: 81194 - protein, 465 aa, Escherichia coli MS 153-1; identical to SEQ ID NO: 81190

SEQ ID NO: 81195 - protein, 243 aa, Escherichia coli MS 153-1; identical to SEQ ID NO: 81097

SEQ ID NO: 81196 - protein, 416 aa, Escherichia coli MS 57-2
MLNKSNVIKHIHVLLPDTNKNININVDGKNVIITGGNGCGKTRFLKLLYEQVSAQIEQYEYKTYDQIKQEISNRQNWMQHTPPTDRNYFSWKQEIADYEKQLKKMRDIRIELADLNKYCIDFNERKSLLRYFGAVRENNISHSGTIDSLKTLKDEEISVSLSQDTSNKFERYLVSFYNYGSHLIARENDKVKGDKVDSWFYFLQKQFRYLFEDDSLKLNYDAEEQTFYILQDNKSPYRFNQLSSGYQSILSIYADLLMKVELKGITSDELSGVVFIDEIDAHLHVSLQRKIFSFFVSAFPNIQFIVTTHSPFVVQSVNDAIIYDLSTNEQLEDLSMYSYEAIVKGLLGVDTQSDLLNKQLDKLALLINDDIIDTDKLQEVVNSIQPYENQLDMRSRTFLLMGRNALLDAKDATEGE

SEQ ID NO: 81197 - protein, 221 aa, Escherichia coli MS 57-2
MFNVARTYPAPDCISRNRYNDAEVTEILKPLFHEKCYLCERNEVQDAEVEHLIPHEGNDNLKYSWDNLFYSCSRCNGIKGNRHKNILDCTDLSINIFNQIICKMPSMPDDDVVILPNVNPPTLSIVSTVGLLNECYNLKNTGLRKISRESLIEQMFFYYSRFIEARMTLKDPSKGNSRKRDAEEMLEAMLKTEHPFSIFWRWHYLGDGFLTANYPDLRVGF

SEQ ID NO: 81198 - protein, 468 aa, Bifidobacterium bifidum S17
MTNYRKFGGRFSADANSNGGHSDSMVPGLTVDFDRQMTVLVGENGAGKTAVLDAAAVALGTFLKAFPEVSGLRIQGSDARRKYYSQYGETDIQEQFPVSIYAQADIAQPVQWRTVQERGNPIAVPIEWRRELNSANGSTTFSKASQICSLSEMYQKLVQMDPDAVLPLLAYYGTDRLGLHGRMTGKARASAFKNRFRGYDRCLQSSLNYRQMDAWWRKQYDRSLRGYDVPTYRAVCKTVERCLETLLRENGHATEARLEYDFDDGLRLSYTDSDGVRLESMPLWTLSDGYRGVVGLVSDIAWRIAALNPFMGDSVIDWTPGVVLIDEVDLHLHPKWQSCILGVLMKSFPQIQFIVTTHAPMVISSVASDRLRVITLDDKNDGIYQAVSPRNETYGSSASLVLRHVMGSLDKPRKVQDLFDRFSRQMDADEFPEAKQTLGELERTIGADNPDLSGARSSYFFYAGEVRD

SEQ ID NO: 81199 - protein, 279 aa, Bifidobacterium bifidum S17
MMLYVDKDNAHPPSIEIAKAKRVLKNTDGVEVCYDSLGQLQEASQLIPHLWDSLGADQGWLCVYCMRCIAVQPVSGVSRKMHNEHYIPRHQDYEGYEEARRHGKEAELPYPQYTQADLDRHSLDYRNLFAVCDGKYQKDEKASARDGHRAPHRKEDEESSGPKVTCDTLRGNSKLTVDPRRKDHIDSLSYGKFDATLSSSIPEVNDDINVRLNLNYHWLKEERAMALVGLYQWFEKNASARDFPRKCRERLQELQQGKDGKLQPFAPMLIWALTKRMRR

SEQ ID NO: 81200 - protein, 388 aa, Faecalibacterium cf. prausnitzii KLE1255
MEHFITSIHINEVRHLKNIEIKLSPEKRQHLILTGKNGSGKTSVLQAMKDYLQAIDDGVYQKLCIRRSYKSNDKFSELEKIVAETFAKYNSGVEVDVSNVVGLDRLYSQGEFVTAYFPADRKTVIHRAKGVQDVKLENQYSLDDTPENILLKYMVHLKTQQAYAKNENDLSVEKKIAEWFSRFENALKVLLSDDSIRLIYDYKNYNFLIEQKGRNPYSLDELSDGYSAIIGIVADLILRMDRNWLLKGELSQYDVEGIVLIDELETHLHVELQRKILPFLTEFFPRIQFIITTHSAYILNSISNACIYDLEKQVRFTDFSSYSVDDIAEGYLDATAFSDELQKKAKRYQELYGRTDLSDDERAERADLRMELKDAEDVLSKIEGKKVL

SEQ ID NO: 81201 - protein, 153 aa, Faecalibacterium cf. prausnitzii KLE1255
MFDWENLFLSCNHCNNIKNDKFTPILDCTKVAVDKKIAFRRHSEPFMPDKLEITALEDDVETRNTVALLNEVYYGSTAQKIEEAKIIRKQLSKELNAFEECVTDYNAADGEDKKDLELSIMMKLKWNAPFAAFKRWMIRDASDKFPELLKYCQ

SEQ ID NO: 81202 - protein, 622 aa, Mucilaginibacter paludis DSM 18603
MIMKLERIEIKNFRGIEDATIELNDQLNLFVGINGSGKSTILDSIVISLSWLVARIQRQNAPGKPITLQSIKNDTPFSSITAKLIEAGNKFNWRIARVQSGSLLHEKSDLGEVSSLASFYIQEHDLQQSYPVIAYYPVNRIVGNATVDISGRESIASLDVYENALGGQTNYHAFFEWFRLQDDIANERANSRSKWMVSNSSWINKRIDKLLGYLDKLIPPENVDEAEYMKRRLKDRFRRLEPMYEDARYFLHELSDLFHFAIYRSKNEEGLGSAFREIDFMLHTMSKLSDSGKDDLIEFNDYPIGIIEEVLQQLFKLHEENEISKYRTQITHFIWEALLFSSQLSLWWLSDKARNEIETLFVKNNPARLRSGIVKNNTSEFMENLERIIKNDVERVQNAYRNQGRELFFVTRTIENFVPGYSNLRVRRVPRPHLLIDKDNESISLDQLSDGEKNLIAMVGDIARRLSMANPYSENPMAGKGIILIDEIDLHLHPGWQRLMIPKLTELFPNCQFIVTTHSPQVISHTKAESMFILRVEHNKVKFSKAIESYGLNTDRILEDILGVDARPLHEKKMIQSVYLNIQQGHIDEAQSIIKDLLKLIGEDPELLKAQTLIKRRAIIGK

SEQ ID NO: 81203 - protein, 214 aa, Mucilaginibacter paludis DSM 18603
MKHIIKSPEPQALTDWKAQDKKYIKGLPNFERIKGLYRRPILNSLRVDQGNICCYCERTLKDGDCHIEHLMPQEYYEEYSCEYDNMLACCQLNLAPKEPRHCGVSKGSWYDDQLMISPLQADCETKFMYTADGRIYPSIDDDEAADLTILHCQLNIDRLAAERGKIVETFIDPTLSEDDLIQYVKNYLAGKEANNGSYNPFYTTIQYLFGGFII

SEQ ID NO: 81204 - protein, 443 aa, Mucilaginibacter paludis DSM 18603
MWVEEISLDNIKCFEKQTIKLGTKKEPYPWINLLGENGTGKSTILQALSLLLAGPEGAAQLLKPDGWLKDNFKPGKMTIVLHQGLNDPGQYGNEKKERKMFRYTFYVTGSEKLTINNKTFTEPIITEDTNSRVIPWLRENALLPKGKGWFGAGYGAFRRLTRANRILVPSLQTPLRYTNFFTQFREDQALEAFETWMVYLDYRISKSDDSIAKKQKEWGIKAINKLLPEGNSFDSIDGNGRIWFKVQGSKVSTVALSDGFRSVLALAGDLIWRLIEAFPLSDDPLNEEGVVLIDELDIHLHPTWQRTIAGLLRQTFPGMQFIMATHSPLIAAGSGEDAVTYRFYRKDNNTIVEEIKNIHALSVDKILQSEAFGLISPFSPETQNKLDRYFQLKKKKTLNNSEQTELDLAIPLVREALGELPNENSLDFKVQEFLMDKLNDKNK

SEQ ID NO: 81205 - protein, 223 aa, Mucilaginibacter paludis DSM 18603
MIKINRTGKPSVLQKKETIWVEKIKNASSADERHKAISKYRHPEIKAFLSEMFNGKCAFCESYIENVDYGDIEHFKPKAKFPYEAVIWENLLLSCKKCNGAGQKGDEWPLESEGGLLINPCEEDPNDFFSFEFDAETLVSIVKPKNKRGETSERIYGLNKQTLIKDRNQKVRIFVFLASYYNIDPRARTFLDEFIETSGEYSAFAKMIKEKYVDNASENNQQR

SEQ ID NO: 81206 - protein, 540 aa, Vibrio cholerae O1 str. 2010EL-1786; identical to SEQ ID NO: 80874

SEQ ID NO: 81207 - protein, 205 aa, Vibrio cholerae O1 str. 2010EL-1786; identical to SEQ ID NO: 80875

SEQ ID NO: 81208 - protein, 465 aa, Escherichia coli B7A; identical to SEQ ID NO: 81096

SEQ ID NO: 81209 - protein, 240 aa, Escherichia coli B7A
MIKTQRGTVALLTAHENPPQDADQSTRRWRNFRRDKAAVMVQLINEQYHLCCYSEIRSDLRGLGYHIEHVENKSQHPERTFDYQNLAASALDSGENGGLSSLKGKNAFGGHAQGKQDVVDMAKFIHCHIRDCSRYFAYLSDGRIVPADELNAQETENAQYTIDLLNLNSGFLQTERRNHWEELEQLFDEHIEKDWDLQQLLQLDLVPTPDHKLHEFFSITRQFFQQEAEQVLQSHAPALI

SEQ ID NO: 81210 - protein, 393 aa, Yersinia intermedia ATCC 29909
MKIQKIDIKDIGGIKRAIIDFDEYMNIICGPNGIGKTTILDSVAHSFISTNSNVLKRHAQSTNGQINIVLNDCDSIKESNISFEKFDPEDHSYINGLGQAGRKVIYLNISRMFKYVSLSNISKDEERQEHSIYSLLTNGISVADMKNWFAKRCLFVNTPDALSDNNKINLELAKKCFSLLNVEYSFSRVDAKKFDVFVCTPNGEIWYEYLSSGFKSCLSILFGIIKEIELRMSDDDCLAQDFDGIVLIDELEMHLHPEWQSKIVSVLRNTFPATQFIVTTHSPHVIQNAEPNQIIALGTDSNGFTYVRELPSNEFGYTGWTLDEVLKDVMGMEDTRSQKLKNMLAEFDKAIDEENKIEAESIYRELDMALHPSNVLRKMLSIDLSSISEEVEK

SEQ ID NO: 81211 - protein, 248 aa, Yersinia intermedia ATCC 29909
MIKLERNFTPLFFSPQNVSRLTERFKNNGSHVWHHDDVKNSLMEISDKKCAYCEVKLGEKSTYHEVEHFKDKNDYPDDVIEWNNLLPSCRHCNSSKGTHDVVHEPIINPFNDIPAEYFYIKNFRVKGKNGIGTLTIDVLNLNDREHLVKPRCETGTIISEKLEDSVVLFEEYISNPTNQKKRKLIGTVRGILNECQKSAIFSAVSATILHTSEDYLIIRDIMKANNLWDEDMEQLHLMSRSIKLPTKA

SEQ ID NO: 81212 - protein, 428 aa, delta proteobacterium MLMS-1
MSIMMHITKITLKDVRCYEDAEIDFGTSGTPIVICGNNGSGKTTLLRSIALGLCDHISAGALLRDLPGDFIRKSSDDITTDKKAVIVIELASESGRDTYAITTTFKTRRGVGFEWVETKTKINGVSKKEYEFPWQNIFVTAYGAGLRTIGSEDYAQYLAPDAVYSLFDYSYQLHNPELAWRRLVEVGKNKKRIDKLITDTLKDILSLDKESSKITLENNGIFIDSSWGKQELDALGDGYRALVTLTLDILAWQLLAKNHELIIESYDSNNKSTRTIKTWKSITDFKRLKGIVIIDEIEKHLHPRLQLQALKSLRAHFPNIQFIVSTHSPLVISSAVDVPTVFIDQGHIGEKKNLDGWLAENIYLQMGIGGSRPEETKHLISDYEKLFRKNLKKPLQGNELKNFNLLRRKLKALPGTDLTLLDIETKHL

SEQ ID NO: 81213 - protein, 231 aa, delta proteobacterium MLMS-1
MRNVNRVVAPQSFRNEATKWAQKLRSKLKTGKATDHYFGQYNQTSKKHVRSDMEDSLLAMYTNMCCYCEARTEKKQGEIEHLRPKKRYPEKTYDWGNLHWACADCNGIKLEKFDDINPILDPSEPEPITQHIETQIDEDNLWIWLFEINSSSRGNTTIEHADLNRELLKRARMKIYLKTLKLIDAIKKNNTGAQKLKMNKISLKNLYNGEFGFATTVKAAFSNAGFTYNEI

SEQ ID NO: 81214 - protein, 540 aa, Vibrio cholerae 2740-80; identical to SEQ ID NO: 80874

SEQ ID NO: 81215 - protein, 205 aa, Vibrio cholerae 2740-80; identical to SEQ ID NO: 80875

SEQ ID NO: 81216 - protein, 519 aa, marine gamma proteobacterium HTCC2143
MALIFKKLEYNASIPRKSLNTAYLQPNNWDDFHFKTLFKLTIFDEAGEKYDVGNVKIGYVNQVAGWTSKNIEPEFKFLSSDFFSLGQDEDYYKNITKLNGDDRKQVLTALRDVVYDEGILQLSLEHDVMKTSLLREVSLSLVSGPFRRVLGGGELLTDFDFGYSIAQGSRTAGLDISFSVDPDSNPPTNIHVLIGRNGVGKTHLLNNMVKALVAEEESEKNVGAFYSLDSNERSPFSQRQLQELFSSVVSVAFSAFDPFEPYPEQKDKTKGVRYSYVGLKRATNHGGKKGTPMSRDMLTKEFLESLSSLIDKGYKDQWITTISGLEADDLFSDIDLAGVVKKSSANDLDPEVKKIFNKLSSGHSIVLLTLTKLVEKVRNQTLVLLDEPEGHLHPPLLSAFIRTLSDLLSHRNGIAIIATHSPVILQEVPKSCVWKLRRTGLDASAERPEMETFGENVGVLTREVFNLEATESGYHQLLKKEMATTKSYKKILRNFNGQLGAEARGVLRGLLLVSEAEEE

SEQ ID NO: 81217 - protein, 282 aa, marine gamma proteobacterium HTCC2143
MVRILPKPKQSPKAVYLTCISKVKKPALKASLTSVADTIDTDATDYDDKAERALLYLIAESDDVDGVVTQEQMEKVYTGRMAAKKAPGREIYDKLKAAAPHGVCPFCAQRSVKTLDHYLPKAEFPSLVVVPFNLIPSCSDCNKVKSSKVADSADKQILHPYYDDVTAHQWLIAAVNETTPAAFSFDVMNVQAFDQMLNSRIEHHFDLLELAELYSSKAGVLLEDIRYRLEELYRVGGKVEVHNYLAEEQSSRRRNNINSWQTATYQAMAESDWFCDGGFRGI

SEQ ID NO: 81218 - protein, 423 aa, Nodularia spumigena CCY9414; identical to SEQ ID NO: 62974

SEQ ID NO: 81219 - protein, 216 aa, Nodularia spumigena CCY9414
MKYIKKNREPEKFSSWKALENDDWKPSWDDNFQAPEKQIVHDALLQEQGYICCYCGMRITRKNSHIEHLQPRSAYPQLALEYTNFIASCQGESEEPPPIPVHCGHQKKYWYDERLMVSPLEINCADFFHYPASGEILPTDDSGKKAAAETTIEKLALNINKLQNMRKLAIDATLLGIEDLTDAEIQQLAQGYEEMDSNGQYTPFSAAIIYLLKNYF

SEQ ID NO: 81220 - protein, 449 aa, Microscilla marina ATCC 23134
MKIKELELNNFRGFKHLKIQFPDNNLAVFIGTNGSGKSSVLDALGMASLWFLRLAKWNESDQYFFDRFLLKGFNLINQDIRINSDEALQVKLTGQQANGIRISKFTNQEISIGSFNLKKTSIVNANGSLPIVAYYQTEKHHFLRRTNQKHEIEEGEVNDNNPIKKILPQLATYQNAFSSKISHAEDFSEWFKQIEDEEVRQIRNKSDFSYRDFRLEVVRKALDVFFSALGSDKYTNLSVKVNDSPVFEFKASDYSLAINKNGQDFDINQLSDGEKTLIMLVCDIARRLTIANPALENKLEGEGVVMIDEIELHLHPAWQRNVLPALQQTFPNIQFIVTTHSPHVLNNVDARNIFLFRNENNQITCEQPDSTLGRDVNWILEEVMGVSARPREFEPKLTKVQKLIEEGGKENLSKARDYIEQLFQDFNLTHDRELNAKLAVIKRKEVLGR

SEQ ID NO: 81221 - protein, 271 aa, Microscilla marina ATCC 23134
MKYINKQASPQKFEDWKKKNNPTAWQPPGFLKKYLLEEQGYICCYCGMRIFDNHYTPIEHLLPKDKDKYPEKMYEYSNLFASCNGDQKNITHVCEADDTWEVIMQKYHTNKEVLYAMNFAEKPHKKINPYTDLLQKGDSVIVQVVSSPKKLHCDAKKSNKEIAIHPKMTNCESYFVYDYGGAIKAKDANNKNVTDTIEILGLDVEKLKKLRREAIEDRLIDIDAEGFSIQELELLIKGFGEKNDKGEFDVFCQVIVAILEDEKKYKKALGK

SEQ ID NO: 81222 - protein, 412 aa, Microscilla marina ATCC 23134
MRIDKIRLKNFRCYEETEIEFHPNFNIVIGINGTGKTAVLEALTVAAGSFFLGIDYAENRHIRPEDIRVLSTEFDINEQFPVEVETWGVINGQEISWLRELTGPKNKTTYVKALKIKELAKEIQSRVRAGENVNLPMVAYYSTERLWKERSDTTKISGSRLKDGYYNGLKATSNNKFFTKWFEKEEMVVLQQRKESVGLQVVRKTVSNCVDGCENVYFDFNRRELIMEYNDGRKLPFKYLSDGVRNTLATVADIAFRCAMLNPHLGEDAAQLTEGLVLIDELDLHLHPSWQKEIVNNLKTSFPKIQFIVTTHSPLILSTVQDRIVTMVDGKAYYSVNTYGRTANDVLRNVMATPERIEDVQDKLDLYFELIEVGEGLSENAMNLRKQLEEAIGNDDPELARADVLLAFYEDE

SEQ ID NO: 81223 - protein, 227 aa, Microscilla marina ATCC 23134
MRYIQKGPEPESLTNFKGLKHKNWKPSYDVLPDEVIKDIINSLLYYQGGLCCYCQVEINQQTSRLVHFHSQQYFKKEELNYENLFLSCSTSEGMPPQYQHCAAHKDEAIIPKFMDDTRCNAYFKYNTLGEVVPINAYGLRTIKQIQLNMNKLSPSEKTVLNTIEVLNLNASKLKEQRKAIITELAKVLRKVKDKEKIKHAMTVYQKRDKNGRYPRFAGVVLSYLSSL

SEQ ID NO: 81224 - protein, 429 aa, Marinobacter sp. ELB17
MNLKEIKLKNFRCFEEQSFQLHPEFNLIVGINGSGKTALLDAISVVIATWLLGFRNRPDKKSLSTGDVRLKYVVKNDEPQFIESWPVTVKAEGTINDKDVRWERSKHSESGNTRYGNASELISLAHDLDGKLGEDVSLPLISYYGTMRLWQDPRQSKVRPDVVIKKKPSPLDGYRHCVDPRIATRELVAWFASQEWSAYQHRKEPLMLRVVRDAILSCIDKAEHLSYDPKRKELVLTRDSSDPQPFSTLSDGLRCVLAMVADIAQKMVKLNPHLGEKVLRETAGVVLVDELDLHLHPKWQKRIIEDLRTTFPRIQFICTTHSPFLIQALRSGEELLVLDGQPIAQLANKPLKEIAEGIMGVENSETSHRYQKMKESGKRYLELLDEAELSPDDKLEEFKRQLADCIAPYADNPAYQAILEMERIKKLGS

SEQ ID NO: 81225 - protein, 244 aa, Marinobacter sp. ELB17
MRPIRKQLSPVPGDFDEYSDAKPDLISRLGMYCSYCERPVSTNLAVEHIEPKKGPHGQPHLTNRWENFLLACVNCNSTKGDKKVDLQNLLLPDRDNTSAAFVYRKDGNIDIHNALTQQQATLAENTLKLVGLDKPKSVALDANGKEVALDRVSQRMQAHLLAERAKDNLTACNLEPMRKQIVDTAFITGYFSIWMAVFDGEIDMKLRFVNAFKGTKDSECFNHVNADLIMPAPNPDSWSNGSKV

SEQ ID NO: 81226 - protein, 426 aa, Marinobacter sp. ELB17
MHINNLTLQRFRGAQDLSLDLSEKLNVFVGMNGAGKSSILDASAILLSWLANRIKHSGASGRPIAEDDIKNGESSANLKVQLCEQGSYFGWNLAKVRKGYSKKDLASVLISASEAAKRIQGAITENVGDVNIPLFAYYPVNRAVLDIPLRIREKHQFELLSAYEESLTSGANFRTFFEWFREREDLENEHRKYRDDLIKPDDFQFPDPQLAAVRRALEIFMPDFTELTVRRNPLRMEVLKKGRRLTVNQLSDGEKCLMAMVGDLARRLAIANPRRADPLQGDGIVMIDEIDLHLHPKWQRLVVPRLMEVFQNCQFLISTHSPHVITHVRPENLFLLSMTDEGKLDAVRPVESYGKTVDRVLEDLMGLQTTRPNQVESDIRGIYTQISEGHLEAAKSSITTLEQEIGEDPELVKAKVLIRRKELIGR

SEQ ID NO: 81227 - protein, 211 aa, Marinobacter sp. ELB17
MKYVIKNEEPVPFAEWKALANDEWQPTYNDLSGETKASVKTSLMQEQGFLCCYCERRLTASDSHIEHLQPQRDPAVDPLDYSNLLCSCQNQIKKGKPRHCGNLKGDWYDPELLVSPLNPDCEGRFIFAGDGFITPAEAHDAAARETIARLGLDIPKLNDLRASAIEPFLEESLTMDQLSQFVDGYLSTGPEDRLGEFWTTIKTLFGDFVIA

SEQ ID NO: 81228 - protein, 465 aa, Salmonella enterica
  subsp. enterica serovar Saintpaul str. SARA29
MRINKLSLLNFRCFRQLDITFDEHITILVAPNGAGKTTVLDAIRLTLFPFIRGFDASLYVKDKSLAIRTEDVRLVFRPEALNMEMSSPAMITATGEWESGKTATWMLDKRGEQPPHEDKTAAQLTRWGEQLQTLVREEHNLQQVELPLMLYLGTARLWYQERYEAQPTEQRLDNSAFSRLSGYDDCLSATSNYKQFEQWYSWLWLSYREHQITQLESPSAKLKEGVRVQRMKEAIQAIQQAINCLTQEVTGWHDLEYSSSHNQQLVMNHPQHGKIPLSQLSDGLRNAVAMVADIAFRCVKLNPHLRDEAALKTQGIVLIDEVDMFLHPAWQQQIIQSLRSAFPLIQFIVTTHSPQVISTVKRESIRLLEQDENGNGKALMPLGATYGEPSNDVLQSVMGVDPQPPVKEKADLQKLTAWVDQGKYDEPEAQQLMAALQAALGDQHPQLQRLQRSIARQNMLKGKAQ

SEQ ID NO: 81229 - protein, 241 aa, Salmonella enterica
  subsp. enterica serovar Saintpaul str. SARA29
MRHVIKTRRGTDALLTAHEQPPQNSDQSTRRWQHFGRENKAALMTLLLNEQYHLCCYSEIRADLRGLGYHIEHVENKSQQPGRTFDYQNLAASALDSENGLHLFGINAFGGHARGKQEAVDMAKFIHCHLPDCSRYFAYLSDGRIVPADELNAQEMERAEYTIDLLNLNSGFLQTERRNHWEELEQLFEEHIEKGWDLQQLLQLELVPSLDHKLHEFFSITRQFFQQEAEQVLQNHAPALI

SEQ ID NO: 81230 - protein, 303 aa, Beggiatoa sp. PS
MKLILNCETKKPVNLPLVIYYSALNAPVNPVDFNYARDDFATDIFTAYDGALDKTSFDFINFFNWYKWQENIEKQLGENKILDTVRNAICQMLSDEHHQFSMLSINWLNNPSGEMMIHKDDMPLNINQLSSGEKMLLALVADLARRLAIANPHRENPLLGYGVVLIDEIDLHLHPRRQRAVIPQLQKTFPSCQWIITTHSPQVLTQVQQRCVVMLEDFKVVKNTPHTFGRDTNSILYELMGLTQRPIEMQQRIDEVYELIDDGKLEEAQTLLEALSEHLGENDVAIVRARAHLDFMDDGYEVH

SEQ ID NO: 81231 - protein, 217 aa, Beggiatoa sp. PS
MAMKYIKKGKEPSSLLAHRKKSYADYDNYAEKDELRDALLNEQGDICCYCMQRISKDNMKIEHWKPQSQYPELQLDYENLRASCKGNDGKSKFLPRHCDTSKAEQEITLNPVDEAKNCEKLIEYRRNGKIYSHDPIIDKELNDILNLNTQTLVNNRSEIIDQIIEDLTRIKGKKAEWSISEVKKKIQQYESKANGKYKPYCQVVIYFLKKRFAKELK

SEQ ID NO: 81232 - protein, 328 aa, Beggiatoa sp. PS
MKIKQIKINSYKVLQNLEISFTDRDGNILDTVVIAGVNGSGKTTLLELIANSFDTHFKFESHSDYIDFIDKDATKLIYMSVFDHPKEFVTLKIKDFLDYLREQNEDLTIRESNKKLTDEINAIFEGLNLKTKFKGISKSITREVIFENDIRDDIKLDELSTGEQQLFIKALNLKMMEPKNNLILIDEPELSLHPNWQNQILRIYQNIANPGDNQLIVATHSPQIISSTPNQSLRILIKNGKNIEVKQIDKTYGLEIEEVLQDLMGTQYLRTPPIAKEINQMWHYLNRGDLKNFEFIYDNLEKLLDINDKELLLARFKKARLMSRMENS

SEQ ID NO: 81233 - protein, 189 aa, Beggiatoa sp. PS
MINVKNSRLEYFEIFKKNKKAKNYQQDCNDFELKEQIRADLLQKQHNQCAYCERKIDKKNSHIEHIRQRDKFHQLECEYSNLVLSCNDENSCGKYKDSQKNPIAKFWQDEFIHPVFDNPEEYFSFNEDGQVFATKENATKTIKYLNLNSPKLIRNRKSLLLQLMYMKDIDNILEYFNEFENLLKEYLGE

SEQ ID NO: 81234 - protein, 446 aa, Beggiatoa sp. PS
MKISHITIENFRAIKKLDLPLDPQLTVLVGNNAAGKTTILDAIAVGLGAILTHLPSVSGIKFRQSDIREELATELKDEQAPSQAPYTRVTLESIEGIIWDITKKRDQTKRTQQAIPPDKKLDQLHDFLENIINDVQDGKPTHLSVIAYYGTDRAVLSSSLQRDFNKNFNRFKALEDALVATQRFQTMIEWFAFQEDIERREQSKRHDFEYRLPVLESVRQAICKMMPDCSNPRTLIDPLRLIVTFEYQSGPQEILSLNQLSDGYRITLALVMDLARRMAQANPHFHDQAIQQSEAIVLIDEVDLHLHPIWQQQVLVDLMATFPKAQFIVTTHSEKVLTTIKPEHIVLLTRQQDNIIAERATSSYGAESGRLLVEIMGVNERPPADKNKFTELLGKYYDLIESNLGESPEALKLRHELNQESPHDPILIKADMEIRRQRVLYGKQSA

SEQ ID NO: 81235 - protein, 202 aa, Beggiatoa sp. PS
MKKVKQFDMLPEDLQQFLTTYPPDKRNKQDWNAFRNHESGKTYNNLIQALIDIQRGLCAYCEINLIENDYQIEHFHPKSDICSEMDWMFEITNLFAACKGGTQTNLFGTKTRHPDLNRCLPPIKKNRSCGEAKDDNVMDDEILKPSELPISPSLFSITRKPSVGIVNKNKDKEGALKVNENTCLQAGIDPKKSANNNRGIQS

SEQ ID NO: 81236 - protein, 264 aa, Beggiatoa sp. PS
MENTLWAAYISACKESVFDFNRFFIWFTWQENIQREVGSNKKYEMVRQTICKVISDEQNTFDNLHVTWQQNPTGDLCIEKNGTLLNINQLSAGEKMLMILVADLARRLIVANPKSDNPLHGEGVVLIDEIDLHLHPSWQRAIVPNLIEIFPNCQFIITTHSSLVLSNVSHKNVIILEDFQAVKITPHTYGRDNNSILYDLMGVNQRPDDIQQQLDKVYELIEEGKESEARTLLEKLSKDLGENDVAIVQAHVSLNFMDIDDETN

SEQ ID NO: 81237 - protein, 174 aa, Beggiatoa sp. PS
MQRISPNAEKMKIEHHKPQTKYPKLQLDYQNLLASCKGNDGGPKHLPRHCDTSKADQEITLNPVDKLKNCEPLIKYRTNGQIYSDDLVINHELNDILNLNTPTLINCRKAIRLQVIKELTKIKGKNAAWPPTKIKKIIEKHKDKDETGQYIPYCQVVIYFLKKKTQHQIKSNHE

SEQ ID NO: 81238 - protein, 198 aa, Beggiatoa sp. PS
MDINSEQPIFKSFCGPLILSNELSGGEKQLYYKAILFDKLRPQNSLILVDEPETSLHPTWQQEILKLYNNIPGNNQVIFVTHSPHIIASIHPDNLFVLNMNEAKKTVECFNAKDKGFHTKGNEPNDILDEVMGTPLRDWETQNRIDDLSEHLRLHPEDYNKPEMQIIINGLIEDLGQTDSFVIRLKHQLMMIKRRKQG

SEQ ID NO: 81239 - protein, 221 aa, Beggiatoa sp. PS
MRYIDKSNRCAEFDEYVNSDSPSIWNEFKTDIKLKLHQHLWREQQGLCIYCQQEVPEKTETEYKIRSHIEHIRPRRGHNRDKYAHLTFCYKNLSVSCEGFDCKRDDSSNPKKEFCEHNKGNKYDEDKFLNPVECKDIEDYFSYDINGEIHPNDNKNDEDISKAKEMINILYLNHLTLTNMRKKQYQLIIQEQENGIDIEEFLNPDYDDLPGFYTMLKQLFL

SEQ ID NO: 81240 - protein, 373 aa, Beggiatoa sp. PS
MYIKEIYISDYKILTDLKIQLQPPPQSQNSVNVIAGINGTGKTSLLKGIAFRFANRLSSEEFQLTFDVETEKKFCKNGDLQIQKLKEYFERKASNTSPKVIYIGSYLVYQFMPVTQLETAYQFINQLKPENILGNAEYYIREYILAHERNSYEADPRKRTREAIDHFNHFFKEANLLTELYDLDQKHFNRPVFKQKGCDRLVSIDCLSDGERQLYGLIIALMILEPYNSIILIDEPELAMHPAWQQIILSIYAKIGQNNQFIVATHSPQIIARTPINHLIFLRKNLTSHKIEVIYPKHPPSGIDVNSILSEFMGVEFIPKEQVELYQKYRELVEKHQENSLDAQKIKQQILERESNTSEFMQEMQLMIQLRGE

SEQ ID NO: 81241 - protein, 235 aa, Beggiatoa sp. PS
MRFIKKNEQAPDCLNQLVKQYKQPKTCYDKLTKNKKNKECKNLIQQQMLEEQQYLCAYCERKVENNNDVIHIEHIRPRLHYLEKVCDYKNLILSCHGSQCPDVNQADYQGEIHSCGHHPAKGNYFDEAKFLNPVELTDISDYFSYRIDEGRIDSSEKDTIKADYMICLLNLDNPYLNNGRINARKALLKMVQKSSQNKQEAIKIFKQLLNLNHPPAFISYLRYYFHHSFNISDSN

SEQ ID NO: 81242 - protein, 453 aa, Beggiatoa sp. PS
MKIEKLHLENIGVFENLDLEFKSCGQPAKKAEIHIFTGANGSGKSTLLYALAGALAGPLQQPMDTKLIFQRFHHSNPKAFIEALFENQQVINYTITKRQKKSYFTGFPLISDDSPSSSEISHAYASSNQQSPNDFINNFMRSQKVPHDRNEGRSFAAFAYSGNRTFKSLDELTTEEMMDWDPYNNTLSFLETNSERIIQSIANQKIKQAIELSQNNQEAAKQYNLVVQSIENAIENIVGWNIKFKLQTNPLNLFLEVNQKVLDFNVLPDGLKSIMSLIADLIRRLDKIVWVDNGNVLEHPFILLLDEIDIHLHPAWQRKILPVIQKIFPNAQIFVSTHSPFVVGSVSDAYVYSFKLTENISILDKVEPSQAGNSYSLILETIFGVEESFDEETETQFRQFYQYRDDIMQGDDNKIEQWLQLARDMMTKGIEVADIVGMELRQMSRILDKDLSL

SEQ ID NO: 81243 - protein, 204 aa, Beggiatoa sp. PS
MMKFTRPKRPGYLDNYKKWGREYAKKKKEYTEKKRKTPPKWNKKIRQWEQLKSDLAKLTIDHCSFCDSYPLVAKGQQTIEHFRPRSSYPKLAYVWHNLFLSCKICQEKGDKFSKKLLKPDVIGYDFYRYFMVDFKTGEIKINKRASKEDQERAIITMNIYGLNNHNRSEARSNYYNRITHQERKKKIKISRDIDTLSYRFMFEI

SEQ ID NO: 81244 - protein, 462 aa, Pedobacter sp. BAL39
MRINTLELTNVRGFTHAKLEFQPGFNLIVGINGVGKTTVLEALRISMTHILKEIKSPIIASESFKKSDININTDQLHVNTSFTIDEHNYDFIYSKSAKSSYIKEVEIITSQNKAIRREQEAKESEKAKQKLEAEKSGIEEAKEEKSETKIPFREEGITLEDIISFKPEIKRTQNTPELGLFFSTRRSLLVNQSQKSGNPKIPHSAAYVHALSETRAFNVKMFAEWFKVRKELANFTPEQINVIKLIEQTIYTFLPGFSDLDLVEDEISKELIFCITKSKKVLNFNQLSDGERGVLALVFDIARRLIIAYMHSDNPLEGEAVILIDELDLHLHPKWQRTIVSDLQRTFPNCQFIATTHSPQIISSVLPENIQIIKNFEIDQTVKSFGLDINWILKFIMEDSDRLKESEEAITAVQKLIDEVEFEKARALINQYKNQENLNLDEWIMFEARMSHFEMFDDEEDN

SEQ ID NO: 81245 - protein, 244 aa, Pedobacter sp. BAL39
MKRIIKGHEPASFIQFKQENEKGGVKLRYDESLGSAQRTPIKEALLKEQGYICAYTLKRIALESSHIEHLKPEELCRKQMEEEIVTVSDLDYGNMVACFPKKGLKGIPNEKYFGAIKKDAWWENEGADFISPLREDCEIHFKYNKDGSVEEVTLKGKKTIEVLSLNHDILKHERANAINEFIYKNDKPLNTLQTLHAIENICKKNKGSFVEFCIPIKHSLDNHLEYLEKVKQKRKIISKAKKKQ

SEQ ID NO: 81246 - protein, 454 aa, Vibrio sp. AND4
MIIERVTQDKVYRFMDENEFAEGNVYTAIIGKNGSGKSRLLNSVIQDLLNLRGYPSSFDRELPFSRNKSFSGRLECRGIPRKIIAVSTSPFDKFPLPKRHEPIGNYSYLGLRDLLSNNLGLAYMSKIINSLITTILHDPSRAAVVGHVLQYLGYSDEVWARFQLSPTIGRIETFLRSDDPVGQFTKFLSSPSIRNVDRSFYFDDYGQIDENKVHETFRIFDKIMAYTSKPRFDLVINKGGVHLLGGMYEINEDFLFLIQSGIAKLRDVTLEKREFRQRVKISDASSGEQSVVMAMLGIASQIEDQTLICIDEPEVCLHPEWQEKYIDLLVTAFSNYIGCQFIIATHSPQIVSNLPERNCNIMSMETGNFERSTEYQHRSADYQLAAIFKAPGHRNEYLNRIALNTFVKVGKNKFFDREDIDTFQLLNDSIDNIRANDPLYNLIIALKEMYNRYG

SEQ ID NO: 81247 - protein, 220 aa, Vibrio sp. AND4
MANIIRNPVIYCEDLENLMASIKNSEGFSHTSWSTADLQVLRVHIRNHYRLQQQGVCAYCRQPVSLQSAANCHVEHIAPKSKYPEFMFEPKNLCVACADCNEIKKEQETMGEEPDPICNGNDRARYPRAASSFYIVHPHFDDYDEHIEIFNGHYVDKTAKGHFTIGACKLNRRLRAFGWEETLISEPELNCLMTDFLGADDAIIKNEKLQSIKRALVKVR

SEQ ID NO: 81248 - protein, 534 aa, Shewanella benthica KT99
MNKTTSKSSVIKKLERNAENGVFYSIYQLYEYYLNGTYVDKNEVKSERYLLDANNIFSTQKLELTHIKLQNFRAFSEIDIKIPDNRLTVIIGNNGGGKSTILDAISHNMSWLVNRMTKKGGTGESIDDLDLTLGTKAGFSSIITKFKLNNNIYVDMELVNVRDGFDTSKKSYIKDITKIGNMYKKAKLFNDKVNLPILAYYTVNRALEANSKDMASFDETSSIKEVDQFEGYIDSLNGKTDFKYFFRWFKRLDDIEKHRKIKNDVSFLDQLNELDKSDLSDEEILKIIKSRSANSNSNSNSNKIISDIQKIKDSLNNVIQLFMPGYGNLEIQMEPYLSLTLDKNKQKFNVLQLSQGEKTLLALVLDISRRLIILNPSLPNPLDGNGIVLIDEFDLHLHPEWQRNVVRSLSKAFKNCQFILTTHSPQIIGEVKHNQLIVMKRNDKNEIDYYQPTQSYGLTSNDILNEIMMENGEKGQLTRTPIVENKLKKIHELIADDKNIEALSEIEQLEQQINGEIPELVGAKVDIELAGWDE

SEQ ID NO: 81249 - protein, 212 aa, Shewanella benthica KT99
MHEISKNKEPNILAKYRMVLGSVFDGGDFTVVKDAIKKSLLDEQGYTCAYCMNGIKASNMKVEHWASRKTHPNLQLTYTNLLGCCKGNEGEPKENQCCDTRKGNSPIKYSPAEPNDHINKTIIYLGDGRIKSNDISFNEEINLILNLNLDRQVKNRLEAIIRVKRSLAIKDGNRSQENIVKMISKINKRNGNNKFIPYYGIMLHYLSKKLRG

SEQ ID NO: 81250 - protein, 452 aa, Pseudomonas syringae pv. tomato T1
MEIKSFRLINVGRFSDLEVALAPTELHASRVTVLVGNNGAGKTTLLRSVATSLSWLVARVKTPKGVGIRIDEDTIQNGAATASIRVDAYNAQIIDPLIRGADFYWEVAGTLKGRKATSSTVLGELSMLAEGYRSVLTAKSDSSLPLLAFYPVERSVIEIPLKVHAKHTFDQLDGYDDALGRGVDFRRFFEWFREREDSENETGIPTELLTKLSQTISIDTELWKVLSREHASSRDRQLTAVRNAIAAFLPGFTNLRVKRKPRLHMAIDKNGQTLNVSQLSQGEKSMMALVGDIARRLAMMNPALENPLHGNGIVLIDEVDLHLHPKWQRSLIAQFTKTFPNCQFLLTTHSPLVISDSKDILVYVMDDGELRVQDGLYGLDANQVLLSVMDTDIRNIDVQKRLDRLQALLMAGDLGEVRSLYHKLANDLPSGHIELAKASLLLRKLELRRAKD

SEQ ID NO: 81251 - protein, 216 aa, Pseudomonas syringae pv. tomato T1
MRKIEKGSLAILEQWTRSNKGKKYADLAGREDIKDAIRHACVREQHGLCAYCCRSITPYKDSAHNEHVEAQRLAPNRTLDFQNIVASCNQPGRCGNAHGHQLLPLTPLMVECETELQFELSGLVEGKTDRAQDCIKVLNLGSDQASNRWLIGERKAMINALLFKHGLDASELSLEDDDILDLLHDELLPVDEYQQLQPFSPVLVNVIRRIKASRIC

SEQ ID NO: 81252 - protein, 262 aa, Pseudomonas syringae pv. tomato T1
MSVEGDIKVIEPAPDGKSCLIVTAPAGVVTKTPLNDVSSGYRTILAMVCDIMQRLMDRRINPDFPGLEHAQAVVLIDEVEAHLHPRWKIQIMQVLRRALPKITFIATSHDPLCLRGMQDGEIVVVHSRSRAGGANTQYATCIEQLHDLPDSTQLTIEQLLTSDFFNLMSTDQPATEKQLANVADVLNKLKRKETLTDEDEQVMRYFEKEIKEALPIGTSEAQRVVQEAVAQFLQERREKPSIEWGAIRTDAKTKILNILRNS

SEQ ID NO: 81253 - protein, 238 aa, Pseudomonas syringae pv. tomato T1
MEWENLLPSCIHCNRLNKHATPKLSTQLVELRADGTGFSDQYKVTTGKGNHFPILGPRATPASRDCSTEYPLLLNPCLDDPQEHLAFHVDRKKLIGLVLPKPHNGAGLPAHVSTTDLLPAFADEIDQALRDKLSLRGAVSIHTYGLNRLGLVQDRTRVLRQLAFLEESVKDLCAMIQSLEARINDPFAVENIRIIKRMEALVERTAQHMADMAKPQAPYSTMVREFLQGFEARLVAIP

SEQ ID NO: 81254 - protein, 395 aa, Pseudomonas syringae pv. tomato T1
MDGEKVDCKYDTKGLHVDVDGEPINHKEIPLPSRVIAISASWNDKFPFSDTDEDNFYKYCGVRETSNASWTATLSRRSIENLLNVPLRLHQESITELFEYLGVDTKLKITFRFRNAEDLLALIGDPHELVSFVQSYSKNNSRMQVDFFKKFSLQDALRVEAGWNQISRKKTFELDVNLRHTTVDYSDAYFAINVFRRIGLITDVDLRVQKIDSTEAYPFASSSSGEAQLLYCFSSIIRHAKDNCLIIIDEPEISLHPAWQIKYISLLKRALSSFRGCHVLIATHSHFIVSDLASESSSLHIFKKIESVSDIRNVEYSTYAWSADNILYDVFDVRNVGNLAFERDLELALTLIAQKTTNFTELRALKQKFEKVLFQDSDPLKKVIDTISEYVDGNH

SEQ ID NO: 81255 - protein, 168 aa, Pseudomonas syringae pv. tomato T1
MKIYKTELLSQLLRIQNNRCAYCGLGLDRNLIDREHFVHKDQNGGWPEFMFVAENLIAACAYCNRALKGCTTTVAQYSANYADCRFNLVHPILDDPRAEIAFIPDMHGDAILAKSLTKKGLDTLTFFELMTPIMTAKRAAYLLEIKRMEEMALADYNELRAISHYKPS

SEQ ID NO: 81256 - protein, 447 aa, Dethiosulfovibrio peptidovorans DSM 11002
MLINLTLNNFRRYEKAHFCFHPKMTILVGENGKGKTTILDAIAVMLGTYFQGSKIKTGQSTVKKDDARLLSVELGGQFNLEPQDDVFIQARSTIRNETIDWIREMGDRGGKAKDIVSIGTQDRKKAVKGEPIDLPLYLYYGSGRLWDIHRNVKTGKPGSRLDAYRFCLDPKSDQKAFEEWFKKLTLAELQKKNSFKGLQTVRNTVLRCIPNSSDFYHDVERDELIIVTDEGPMPFDHLSDGYRNMVAMVADIAHRASRLNPHLEEKAATRTKGIVLIDEIDLHLHPKWQRRVVSDLQEAFPEIQFIATTHSPFIIQSLEPGQVIDLEATEEKAERTCDTGEQASPGTTAPYSNRSIEDIVEDIMGVDIPQRSERYQKMYDVAKEYYKTLREARDADETRKKELKEKLDRLAAPFSENVAYYAFLEAERIAAGVTSEEEKREDKKCDR

SEQ ID NO: 81257 - protein, 244 aa, Dethiosulfovibrio peptidovorans DSM 11002
MRPVVRGKRPKEKGKPIELKKYGYARGHLIQRIGEYCSYCETKLNTSLAVEHVLPKKATETSEEEGKRRELDWDNLLLACTNCNSTKSNQEVSREKCLWPDRDNTFMAIEYSEGGLVSPNQDMPLNIIEKAEKLIQLVGLDKTPSDEPIYRWEASDRRWLHRKETWDMATRKRDQLKKIEPSNDETFRNIIVDLAKSNGRWSIWMTVFQNDEDMCRRLIDGFNGTCKGCFDDNMKPIHREGGLC

SEQ ID NO: 81258 - protein, 396 aa, Providencia alcalifaciens DSM 30120
MKIESIKIIDVGGISNLVLQNLNQQINIICGENGVGKTNVLDSIASCFSEFDKNIISKKSGSENGFIEMDVTQNVAPKAFALNIQIQKFEPSANDQYIVNNSYEKNKNNLLYLRTNRNINYKKISSIKSDPEIQHRSRYSSSGIDNEDIKDWFLNRVLHSKHENHLSETQLENLELSKKCFSILNSTYSFNRLDTRNEIFLMTPTGEIYLEYLSSGFKSIIFILLGLIKEIDYRFEKDKISAECYEGIILIDEIELHLHPEWQGKICGILKSVFPKAQFFITTHSPHVVQTAAYGEVIALERSIDGIVSQRSLPSSKYGYQGWTIEEILEDIMGMPDLRTIKYNQVKRRFDIALNEEDKKEALSAFQELDKMLHPQYPLRPVFKMQLDKISDDEND

SEQ ID NO: 81259 - protein, 242 aa, Providencia alcalifaciens DSM 30120
MMKMIKLKRVLKPIYLTDAKVKELTEEFKKDKSKAVWKTKSIGDALLKSSSYKCAYCECELQKEDSYMQVEHFKDKDKYPDDVVKWENLLPSCARCNRKKWTLDVNLNPIVNPYDDDPRIHLKQQAFRLYGKDLKGENTIEKLYLNDDDRVVYSRFLASNEISRQLSELTKISSNLDQLRNSMTKLLQACQSDKPYSAFTAYTLHSNKDYGKLKDLLLKNNMWDADLIELHDNSSYLQLDAR

SEQ ID NO: 81260 - protein, 403 aa, Arthrospira maxima CS-328
MQINHLKITNFRGFEQAEFEFQPGMNLIVGINGVGKSSVLDALRIAFSRILPELTDCQERRINFNIDDIMIGKTELKVEINVDISGIPFRCKVSRGKRHEQELKPDGYQILGLIKDDPNQPLVVYCATRRSIVTEQDLNPNRSLGNQSAAFVDALIPRMLRLREFIDWWLVQEELLDEKPQLTQGRIDALNDAVTCFLDWCNNVRAVPASDTYKKPTLLLDKNGVTLNINQLSDGERGILALILDLVQRLLQANPELENPVQDGKAVVLIDELDLHLHPQWQRMVVHKLTEIFPNCQFIATTHSPQMIGEVKPENIIILDQDKQPYIPDQSLGMDSNWILRFLMETPERDMDTQKKLEDVESLIADKNFSEATEKINSLRQLGEFPELVRLQTRIDRISRLGK

SEQ ID NO: 81261 - protein, 239 aa, Arthrospira maxima CS-328
MKYIKKEQEPEKLRSWFNNQYDQEGNRLGCDYYNDVPSDVKRDLKDHLLGEQGFLCCYTGILIDTDTSHIEHLKPYSICRDEKNYEDVNYLNLVTAYPGRNYKSQDDEVNQPSKKSKKNSKKCPFGAHAKDNWYELDNFVTPLESDCEDRFKFDNSGKVEATNHQDTAAQITIEKLVLNHERLIDLRRAAIDEAIFPPDTELDESDIKEIANGLYSQKNAEGKFAQFCFVIEQIAKQLV

SEQ ID NO: 81262 - protein, 542 aa, Vibrio albensis VL426
MMPSHPNRQINKIVLKSESGSFAASAQLVQIYSEGMMGEPVDVEKVHYYRIKCAEQLTSANLRLASLKLIGYRGFESLDITFSQKSNITVLVGNNGSGKSSILDAIQKSLTHFVSRLSTRSYNGDQLDELDISNGATFVTVIPEFKVAETSFSFELSQSRPMIEPRKKSKFTELNEIGNLYRLANTEKKELSLPLLASYTVERANDVTTKDIEESDEILSSQIWDKSKAYSKSLTGKADFKLFFRWFKEQVESENDEVSDIKVIKAQIESKESEINSSLMKAILSNPETAETGEILIKQYKDQINDLQEQLNEKSNVGNKSLDSVRNAIYKFLPGFSDLKLKRAPLDMVVKKDGQEFSVLQLSQGEKSVLALIADIARRLTMLNPSLANPLEGSGLVLIDEVDLHLHPSWQQKIMQRLESTFPNLQFIVTTHSPQVCHTLDSDNIWLLKDGKKFNAPKGVRGAVSSWVLKNLFYVEERPPEDEITKLFNKYKELVYADKYDSEEALNARKVLIDNFGKDYDEIVELDLYIENKEWEKQFEED

SEQ ID NO: 81263 - protein, 257 aa, Vibrio albensis VL426
MRRINKSTDSNVLTEYAAKFPDSNWDDFRLHNNGESYATIKAKIFSEQYDICAYCEVGLKDEPNHNKRIEHFVSKSVISSSRNVHLDWFNLIGVCLGGTDYKNREKYELPENLSCDSHKAHIEELSSIADKDWNGKVLSPLSILQDHGLFDFDKVTGNLKPNLQACNEQVIEGNSHETTLLLVEETIRVFNLNCERLSAARLKLFRQLQNKIKTARKTGDRGIIERFVASWKRDFPLFFQTSRDVILRDNKITSSFL

SEQ ID NO: 81264 - protein, 435 aa, Actinobacillus minor NM305
MIDYLKLQNVGIKDLLELNIASRLNVLTGDNGLGKSFLLDILWFVLSGHFPQEINRSIQSGYVAKPLNISERAFISVQDTKGQTEIYSYKSEEYWSRHLDIDDMSRAKAEFSDIAIYVMADGSYALWDRNLNNFAKHNGMLRYDGSFTRNRQLAFVYTQEEIWQGVNDKENNQFFNGLLQDWQIWQTGKTKEFEQLKSVLAILSATNEELEIGELKPFSLGDSRLYPTIKMPYGREILLPHCSSAIKRMVTLAYFLVYAWKRHSESSELLGKTPAKSLTFLVDEVEAHLHPKWQRKVVPSLLNVIKSLSKEIDVQLVIATHSPLVMASLEPIFNEKQDKWIDFDLNNEGSIEVSERVFDKQGTVENWLESEAFNLPSSRAPEYEDLINQANTLMLNPKASIDEINHLRVELVQALDERDEFWTPWLIYCQKRGVL

SEQ ID NO: 81265 - protein, 195 aa, Actinobacillus minor NM305
MIPISLQPEPDNFDRNVRQKGAKWLQENTIFSELPSYWQKCLDDLYIAYDGVCAYYAIKVDEISGYRTVDHFKPKAKYPHLAYEWDNYRFACGSANSKKRDFEDVLDPFSLPDNLFYIHFGTGEVLINPQMDNEITQNAERTINRLSLNDNRLKNRRKKDFLRYYQEKSISLDELKQQNPFVWAEILRQDLVRND

SEQ ID NO: 81266 - protein, 455 aa, Acidovorax delafieldii 2AN
MAVIHSARFHTWDKQFRSVDLLLETDSPRANTFATTFITGRNGSHKSTLLKEIVSGLAVVGRIDRHEASSVQNPGRDQVLCVSGSVADRFPQKELPGGTRSPFDVPNYTYVGQRVISNLLSKKAPLETMLAFALDPTKAERCRWDFFGAAHRHAGIRPSGKYTLEAQRESAKKARAPMSDLLGIVQGVRPESDGNRKPAADRPHISYATAQWLLQEFSYDEFLALQFFVNKGKRRVAVTLDETGAHCQGIEPNVLRLGLLTDLVRLVDVTVKSAGGDADFSAMELSSGEYHMFSTILAIGFGLEDKAVLLIDEPENNLHPQWQRDLMATVFDVCAGAMKTEGHLIVCTHSPLIVGAAPEGSSIVDMSSDAPQTSVASYGASSDELLLSQFGIGSSRNKVVVDTLQRAVSLIERGDFENAEFQGLMPELRSIRDALTPHDPMVDVIDALLDEGPQR

SEQ ID NO: 81267 - protein, 244 aa, Acidovorax delafieldii 2AN
MNIGFEKIAPTPGYPAGTTAAALIGLTWESRANVAIAFRGGLKLALRTVQLGRCCFCRRHLYDDYATHLEHFVDKATFPRFAYEIRNLALSCGTCNIRKNAYFSTWDRRYRFMTRNFVGPVLIRCPVLSVALNSCDAFPAIPANFSWVNPHFHNYSQHILVARGWVFEGQSPEGRRTIRSLKLNEVGQIERRALAERLEARGGALSMLVGAISVLDQHRANDVKDAIIKVIRRRREAAKASGGN

SEQ ID NO: 81268 - protein, 456 aa, Zymomonas mobilis subsp. mobilis ATCC 10988
MNAYGEFCGNKKISIKNFRGIQNADFDFCNKVNLIVGINGAGKTSVLDSIALLLSWLINRTLNKNSSGQPINDLSIRNGCREAALSITVNYDNQDFNWMLVKTGRGLNARSQKSELSLLAALSKRFQIELDNKNDEASLPLFVYYPVDRAIVKVPIRRRRRQAFSQLSAYDEALNPNVNFKSFFEWFRFEQEKHNSSLANLLHSMDLSDTDSLLFKATKYRKTIKEILKELYNPLSSKGLKAVCQAIYEFMPGFSDLRVLYEPLRMVIEKEGVHLNLLQLSGGEKCMLALIGDIARRLVLANPSMDNPLKGKAIILIDEIDLHLHPRWQKNIIERLNSTFPNCQFIITTHSPHIITHVHSNCISIISTNENGAFNVSKARNSYGFSSEVLLSEIMGLDTTRPQKIQDKLDKIFQNISDNELDEAETKLQCLKTIMRDDPDVVKAEALIFRKKIINK

SEQ ID NO: 81269 - protein, 205 aa, Zymomonas mobilis subsp. mobilis ATCC 10988
MKQIKKTKEPQSFSEWKAKANSDWKPAWENLQNPEKVDILEKLIEDQHGICCYCEARISVESAHIEHIVPRSIDIRKRLSFSNLLASCQKETQKGDPLTCGKSRGDWYDKDFYLNPCDENSRKEIIYLLDGNVTVQNKNFKIFIEKINLNIESKKRARSNVIDIFTDLDTSDAQKILDVWLSEKVYHPYISAALTAAKELCGIEY

SEQ ID NO: 81270 - protein, 146 aa, Arthrospira platensis str. Paraca
ENPLQDGKAIVLIDELDLHLHPLWQRMVVHKLTEIFPNCQFIATTHSPQMIGEVEPENIIILDQDKQPYIPDQSLGMDSNWILRFLMETPERDINTQKTLEKIESLIKQRNFPEATEQINSLRELGNFPELVRLQTRIDRIRLLGK

SEQ ID NO: 81271 - protein, 244 aa, Arthrospira platensis str. Paraca
MKYIKKEQEPEKLRSWFNNQYDEEGNRLGCDYYDDVPSDVKRDVKEHLLKEQGFLCCYTGILIDTENSHIEHLKPYSICRNEKNYEDVNYFNLVTAYPGRNYKSQEDENDEYDELNQPSKKNKNSKKCPFGAHAKENWYERDNFVTPLQLDCEDRFKFDDFGKVQATNHQDTAAQITIEKLVLNHQRLIDLRKAAIDEAIFPIDIELDASDIQKIANGLYSQKNEEGKFRQFCLAIEQVARQLI

SEQ ID NO: 81272 - protein, 547 aa, Pantoea sp. At-9b
MQGKKRKPTRTVAEKIEGADKGHLGDMFEVAEWLETGRYSLDINEQKASEYYSRIDEALREKRPFFSTLELVNYKGIRKTVKKITFDPHLNIFVGVNGSGKTSIIESLVKASTWLVNGIRNRANGKGIDLIEINKAEDSKDCAITTTLSLDEKSTFTLELYKNKNSKGKSRGSLSEFKNLAEMYYSHNSNSQGLACLPLFCHYSVSRALEIKSDDQKNNSEIYAFSNLDGYNSSFEESKNFGQLLKWMLFCGAQNNGELDDIKNTLRSLEVKYNTTFDIYNFLAEETKENSQIAEKIRNELDSLRSEIKELQITLKTADSNIVTIVKEAIYKFMNIDNIRMKVDKTSVSILLDKNGITISATDLSQGEKALFSLVSDISRRLILLNPDKGIDALNGYGVVIIDEIDLHLHPKWQQEIVGNLRDTFPNVQFILTTHSPQVLSTVPNHCIKILRNDENGMLSIDEAEFSLGSESDMILEDIFLVKSRPENIEQVKMLNRYQELVVNELWDTDEAKELKTQLEEWAGKHDPVMKKIQMDVRLREFRRGKN

SEQ ID NO: 81273 - protein, 258 aa, Pantoea sp. At-9b
MKKIKKGSEPRLLSEYKLANPTSSWKTGFRQNAGPEAIKSVTDNLKNQQFGLCLYCEIDLKDAEGIGFDDFRVEHFFPENPKKNESRNDGINYALHWPNLFGCCTGGNTPYVVDKEERYSNPETHCDVPKSNNDWTAIILDPTVDIPAFPSLFQYTEGGTILVSSQCPVEKIDRANNTIEHLNLNSNKIKRFRSAIISKIRDELLLFTDNNLQDGLKELSNVYLLPDNEHRLSPFFSAIRWYLGPAAEGVLQETEYDG

SEQ ID NO: 81274 - protein, 442 aa, Mesorhizobium opportunistum WSM2075
MYVRSLKVSNLRSVAKGRLDLVYPGRACDGPFQKGFPNWPPKLPNVNVLLGINGAGKSTMLDAIALAAMSPVVSESSGFRPYALIRRVASGDAPKTASIDAEIVVHPQDIVDAPKKRTEVIREIGATVERRGDLEVLKAVQHPDPLWEGMFKDQSPAFLMVGYGATRRVETNAQVDEALRSRTRVLRYERIASLFEDHFTLRPLSSWLPEWQSKNPGRYKQVVTLINKLSLKHIKFTGRIERGEYLFKVGRNLVPFSAMSDGFKAFIGWIGDLLYHVCMGCPSGKRLVDNQGVVLVDEIDLHIHPEWQQTMIPVLALALPNLQFIFTSHSPLVVGSLERANIIHVETGANGTARMARPDEEIYGKTADQILRSDIFGLNSTRAPEFRAQLDKLAEAATDGDREAALDFMRKAARGSGATEAARSDEQREMPSWLKPSSMAGE

SEQ ID NO: 81275 - protein, 299 aa, Mesorhizobium opportunistum WSM2075
MIRYADATLEKVSAMVDAEKPTWRSNAETRTAAIVAAGAFSKGAPSWSDIKAIFMRFQSNKCAFCEFPLGGEFAGKATQDVEHFRPKNKVKAWPNKAKKPSYAFSTGGTGSGYYWLAYDLSNYAAACKACNTARKSNYFPIAGARGAAASTAAELNAIERPYLVFPLGETDEDPESLITFAGLVALPKQDADSHAHRRGRITIDFFALNQREELWEDRFRTIYALFDAVEIMKTSANGERLEIARRRIEDMTSTAGAQASCARSFLRLLETDPQKAWDYYVAAEEFITDNRKKRAPKLG

SEQ ID NO: 81276 - protein, 456 aa, Mesorhizobium opportunistum WSM2075
MSANDANFVYYCELRLSNVKAFTPGTVLDLRLDGRPAPWTLILGENGLGKTTLLQCLALMRPILNVEQSGKTDARPPDRVEPALPIYDDNLLVELARIGDELQVELEAEFSVGRELRSSELPKNHSKPVTTGATFRTKQRDLSEFEFTNVKRRDVVAPLLVAYSAARHPPYRRSEVVADHDDPAASLFNPEIELADAVQVLENLDHLTLRKDKQSKALYVNIKSALAEILPEIGDPKRIHVYGPPSPSQPDKPSGVWIETYSGEVPLQSLSVGYQTMFAWTVDLAWRMAQHHTTSEDPLREPAIVLIDELDLHLHPKWQRRIRRDLSKVFPRVQFIVTTHSPVLAQTYLDTNIAVVKRDGDHASIDNDPKTVSSWRLDQVSVSLLHDLDPYSPEIVEAFQTRRALLGKKRLNATEKARLNEANILVAAIPSELDPDDLKAAELIREAAHLLATRPK

SEQ ID NO: 81277 - protein, 261 aa, Mesorhizobium opportunistum WSM2075
MIGYTKSTTVPSSLKRGVRANTDNCDAYDADPTAYTKGVAKFDISNGIYGTDVVKRRLKADQHDKCGFCEAIFDANVAGDVEHYRPKGAIDTGGGKIYPGYYWVGYAWNNLSYACPDCNEYRKRDRFPLAVEGARARSHHDDLTKEEPLLIDPYGEADPRQHIVFRGEAPIGLTPQGTITIELLALDRTTLGRDRLLYLETLSVLYESVVLLENDVRPDAVDFVARVRAQLAAAVLPNAKFSAAAADHLTACAAGKTYLPT

SEQ ID NO: 81278 - protein, 553 aa, Vibrio metschnikovii CIP 69.14
MKVDKLHIRSRFKNLENVTVDFDEDHLMTVVVGRNGSGKSNVLEALVAIFRNLDLGEVPPFSYELVYRLGEPHKPKQPSERWLEITIDADPTRGTTAKQYQVHVRDLLADDTDDDMFGEKPSGSAIPFSKVKRDKEGKAPYLPNYVFAYYSGPSDRLENHFKKHRTDFYRRLLKDELDLKGDIRPLFYAKPHHSQFVLLAFFLSEQDSAEKAFLREHLDIEGLDSIHFVMRQPGWAKQKGELFWGARGVVRRFLDELIKYTLSPVKVTRQEDTSLTGSNIRNEFFHLFLSDVNALREFAKDLSPDELFKMLESTLLSEIISEVSIRVKVSSSKEPLTFRELSEGEQQLLTVLGLLKFTGGKDSLFLLDEPDTHLNPSWAVKYLKFLSEFVPNHETSHLLMVTHHPLAIAELKKEQVQVMWRDSSLQVYAQEPEESPRGMGYGGILTSDMFGLRTTLDNSTERLLRLRRRFTEKTELSPIQAGRLRKIDKAIEGLGFTTAHWDEEYAQYLRMRREVERESEVVTETPELKQIRKERAKAIVQRMLAAEEEEDSK

SEQ ID NO: 81279 - protein, 287 aa, Vibrio metschnikovii CIP 69.14
MRHLDIDFSQLELPQGWRDKAQQLSDSLRDAKNEKQRSDIINKNQDHWKVVKPLLASLFNYKCWYTEAPQQGTDVDVDHFRPKKRVQETLSTVTPHEGYWWLAFCLQNYRYSCIVANRRRTDVVTGVTGGKADHFPLCDESKRAQTPDCDLEDEQAVLLDPLKATDVQLLQFKPDGEAMPRFSKEKHARKFMRADQSIVFYNLNHSDFVRCRIELRNKIDKDVSAAKRYFNKLETGDADNDLAYEQAIYRLCKMRSKEAPFSSFCIAYMDEFMHKPEYEGVLDAVYL

SEQ ID NO: 81280 - protein, 254 aa, Neisseria polysaccharea ATCC 43768
MNKFIETKSQTDLFFTNAVPSIGKDALRKKINYLDIQLKTVKDAVQNFTNFENIRVQRKPKLRMIVKKNNLEFEVSQLSQGEKSLMALIGDIARRLAMLNPSLENPLNGHGIVIIDEADLHLHPQWQRQLIERLTKTFPNCQFVLSTHSPLVISDSKDIIVYSLENGEIQQVSSQYGQDANTVLLNVMETAIRNEEVTQKLNHLLDLIQDNQLDEAKIKLTTLRQDLPENNLELAKAQLLLKKQEIRYEKNSKS

SEQ ID NO: 81281 - protein, 143 aa, Neisseria polysaccharea ATCC 43768
MNEHIQPRHHYPNLSMDFNNIVASCNQTGHCDNSKDSKILPLTPLMDECETEFEFRINGAVSGKTERARSAIDILQLNHKKLCESRKQAINSMLINHGLGNPIEVEDDELLQSVCDDIMQPENGKLIAFTPAIVNAIKNWTNS

SEQ ID NO: 81282 - protein, 443 aa, Photobacterium damselae subsp. damselae CIP 102761
MKISKINVKNFKKIRNLDLDIPADNRVICFVGENGANKSSLLSALYANLRQTSGVTSPSDGQDRYVDNLNHVSTSVSADERFSLLSLSLSENDAVIKSDRAIVPSLEDLSEENKQLLRTTFNIFYSEDIKFLLGQSNFRNLDSYNPDLVRQNVVLFRPFNRTETPTWERESLSENQDVVATGHNIIGKRKFPMRVASGIEKTNSYFLDVVLDHLIDSSNNSDTTYSLFNNFREILSTIEPAANGTFVVQEFPNKCISFPNVPELASLSAGQSDWFVTAINILIQMKELARNIAPELIRNVGGIVFIDEMDMNYHPSFQERVLPWFLDFFPNIQFIITTHSPYLIRSLGENSLVVKLPSGEVLDDDFSYYDINEVALKVFGQDQGFSPIVKDKLVELKRALNESNNVVARAIYDQLITKSESLDRELNKIVMTVADEEFIGGLQ

SEQ ID NO: 81283 - protein, 276 aa, Photobacterium damselae subsp. damselae CIP 102761
MRYINRNSIQVPQKLATLYANQAEFDNAKQAIANGTDIRKGLYRHDSVKLALETLYKDVCFLCQKSVKDNYDVEHLLPWSKHFPERAYDWENLHQSCKECNQKKKRHTYKELDTTDHNKVIDILLLDPTRAQVDQFITFDPFTSESVVTERGNTVLKAQTTTHFLNSSDYVLARKAHWDAIRDIFTSEEWFDAYRKLRSEYRNHNVINLNFADELDSKVGSLCYRIATGFLGLNRPYNMFVARVMNQNIKVNPYAIKHFAQQHCVNVGSLLPALVV

SEQ ID NO: 81284 - protein, 403 aa, Arthrospira sp. PCC 8005
MQINHLTLTNFRGFEQAEFEFQPGMNLIVGINGVGKSSVLDALRIAFLRILPKLTACQKRRINFNIDDIMIGKTELTVEINVDISGIPFRCKVSQGKHHETELKPNGSQILEPLKRAQNQPLVVYCATRRSIVTEQDLNPNRSLGNQSAAFVDALIPRMLRLREFIDWWLVQEELLDEKPQLTQRRIDALNDAVTCFLYGCNNVRAVPASGTYKKPTLLLDKNGVTLNINQLSDGERGILALILDLVQRLLQANPELENPVQDGKAVVLIDELDLHLHPQWQRMVVHKLTEIFPNCQFIATTHSPQMIGEVKPENIIILDQDKQPYIPDQSLGMDSNWILRFLMETPERDMDTQKKLEDVESLIADKNFSEATEKINSLRQLGEFPELVRLQTRIDRISRLGK

SEQ ID NO: 81285 - protein, 239 aa, Arthrospira sp. PCC 8005; identical to SEQ ID NO: 81261

SEQ ID NO: 81286 - protein, 449 aa, Bacteroides xylanisolvens SD CC 1b; identical to SEQ ID NO: 81136

SEQ ID NO: 81287 - protein, 249 aa, Bacteroides xylanisolvens SD CC 1b; identical to SEQ ID NO: 81137

SEQ ID NO: 81288 - protein, 449 aa, Bacteroides xylanisolvens SD CC 2a; identical to SEQ ID NO: 81136

SEQ ID NO: 81289 - protein, 249 aa, Bacteroides xylanisolvens SD CC 2a; identical to SEQ ID NO: 81137

SEQ ID NO: 81290 - protein, 454 aa, Granulicella mallensis MP5ACTX8
MPTDTKAPDAMHFRSLCLENVRAFGRPQSLDLFDNDGNISRWNLILGENGVGKTTLLEALMVMRPVPASIEKSGAAGTPTLSIARISEFENREIMRFIRRGESNSTVMTAVLETADGATLEVRVEIKGSTNDLEDVRFPEAHYELRSDGPLVIRYVAGRHLGIRNLGRIADRDATDSPFSEVIELYDAEEILEKLDHAAKTHDDENDIEVRRFIKLKSVAASILPGLTAEDIEVRGPRLEGRDPDLSGVHVRTPSGVVPLEELSLGYRTMFALIVDLTWRLFNAFPDSLEPVNESAIVLIDEVDLHLHPRWQREIARRLMSQFQNIQFIATTHSPVTAQETLSEGGNVAVVRWENGEAHILNRPVPPGNWRFDQVLTDELFPGMASDRPQKVEPMLYERLELIRNSNRSVEQETRLRELDEFVASLPTARTPSEQSFEDLMVNLAKDFPSGVAR

SEQ ID NO: 81291 - protein, 259 aa, Granulicella mallensis MP5ACTX8
MIAIHKGAAPPALVRVGELHARELCDAYDADPETYRATKPMPVRKSIYTSDAVKAELETLHHGKCCYCETVIPKPYADSQVEHWRPKSSSRQNLDGERMRPGYYWLAYSWDNLLLSCSFCNKIKNDLFPLAEPATRARSHGMRIEDERPSILKPDGDNDPGDHISFWSEVPVGITQLGRKTIEVLGLDSLKHGPRLTHLAKIREARNLAIDLMGSTDPKARHHAALFRTFVEEAVQPEKPYSAMVIDYLRANPLPDLLA

SEQ ID NO: 81292 - protein, 786 aa, Ahrensia sp. R2A130
MRFIDRSRMSPPSLLSSKRADEARGEVERFISMTQQKGGTRRVPDCSWMLGDWNFRESVERSFHSVCAYCESSVTQSSKDISGVVSHHRPRSLAEDENGSTDLTAYSWLMYEWENLVWACDTCARLKGNKFFVENRRGEAYQSLSQLRETEQELLLDPTFHQPSEHLEFKLNGRVEWKTEKGHATVEVLDLNRAELQRDRAAGVGRLLNLLFTSTNPSSTSESSSGDSESAFFGNDRALIDGTSPAGNGAHSGSATLAILAYAREVGIEASDEVSFSDAFSAFDFQAKALFVENAFMETRKSEPDAPPPENLSGKPRFKFTKSRSTSSSAPPPERAPKKPSRIPNIHRLAAADSPVTAVNIRNFKALTSIAFDLPSVVEDAEQSPCMILLGENATGKSTVLEAMALAILGTDEAGELDDLLKDEDLSPDDLIHRPDTKAPEETAASMSVDLVFLDGLHRTSLYAEAGDKRFSGDERTSKIVLGYGPRRFFTKRKSRRLRAPAHRVRSLFDPMAMIANPIHWLADLDDQQFYAAARALREVLLLDNDDDFERDADDDDDEGRIYITHHGQRTALKDMSVGYKSVIAMACDIIRELLYHYDNLEFAHGVVFIDEIETHLHPRWKMQIMQLLRKAFPKVQFIVTTHDPLCLRGMYDGEVFVLQRTEAGDTVEKVTDLPSIRGMRAEQILTSEFFGLGSTDPKTDAILIRFNRLLERHESLNDDERKELEALGEQLDRDLVLGSSIAQQAHSAALKKRTRNTVSPTKASSPRRKDIEAAFPALFDMPGQE

SEQ ID NO: 81293 - protein, 304 aa, Ahrensia sp. R2A130
MISVKRTACPAALDPNDPTAAGPKELAKLKQKLVDGQKLKSDDFNAYSGKPVRNALEEMFHGKCAYCEGKVASTNDTDIEHYRPKKGVTEAGEHGFRHEGYWWLAMVWENLVLSCAHCNQIRAKHIIIPDHLVTVEELEAFLMDPQHSRAGKLNAFPTADNKWVISPEEDHNTEKPLIINPVDMDPDEHLDWVLHNGASLVRAKNGSAAGEATRTILGLNRRWLEEERRIMLMEMILDREEIIEGVNGWLEATNEEAKTLNMRQANHGIRRLQNRTLPHKQFAGLAKAFFISVRDEVASMQAAV

SEQ ID NO: 81294 - protein, 420 aa, Oscillatoria sp. PCC 6506
MKVKRLKINAFRGIDNLNLEFNPDEPIVIIGNNGVGKSSILDCIAILLSRFLYLIQFPNKNDSLNPSFFRVLDIKNGYKEIRNQIIIELSQSQEISWSVTKEDSGNEKLEGMEKLKEVAQNIHNQWKGSPLANIPLAVYYPTNRGVIERHLESQNGYSFKQTDAYNQALEQIQISFDSFFQWFADLEDLENEQIRDNHEHRNRNLETVRQSIYSLIPNFSNLRVRRSILRMTVKKQGQELIVNQLSDGEKCLLAMVGDLARRLAIANPGLENPLEGSAVVLIDEIELHLHPKWQREIIPALTRTFPNCQFIITTHSPQVISQIKPDGIYILEATPEGIVAKQPESSFGRDSNRILEDVMGVPERPQEIKDSLRQLFRLIDAGNLDAAKELRQQIEDEIGEDESEFVRADILMRRKEILNR

SEQ ID NO: 81295 - protein, 215 aa, Oscillatoria sp. PCC 6506
MKYIKKGEEPKDFTDWKALESDDWKPNWDNFQAPQKSNLHQSLLQEQGFICCYCGMEISKQKSHIEHLKPRKTYPEEALNYKNLLASCQREREPKEPQHCGVKKDEWYDENLMVSPLDPSCADFFRYSGSGEILPTNEPGKQDSALTTIDQLGLNIDKLKNMRSQAIDGILQAMDGLTIEEIQILAQSYVQPDAEGKYTPFCTVIAYYIKNYFKI

SEQ ID NO: 81296 - protein, 473 aa, Vibrio parahaemolyticus Peru-466
MTLMGFRVKKVRNHVLWDKENDDRNAFTVIIGNNGCGKTELLIDTCNKYHSYYTSALLDKDTHVASAVHYLREDFSPHNWKTVEREYGHRLPRKLIAASTSQFEKFKANWSVRNDLVPSGFYAYIGSKPYMPSLSPSTRIASKAIQQLLGAEYFEERKHKALVGFLSKFDFGQKLLLKFELTFPNEDLENIQNQSLTEPETQLILKNAYIEHDEMELVELLGYCERIIEAPAFALTVGNQNLNLIHLKGSEQKPFSKLIISRMLRAGLITLSSIQTMKDKSLINDQSTVNIESSAISSLSKRSSGEQCLFLLFMGIISSIEDNALICIDEPEISLHPQWQERFVDILSESFSSYRGCHFLIATHSPLIVSDISAKNCCVYDMATNTLVDAAPYGERSSDYQLATLFHNPGNNNEYLLSQVIEVLDDICQSKEIASETKTKAHWLLSYEPRLPDGDKVKRLLSILEQTLEAFSK

SEQ ID NO: 81297 - protein, 214 aa, Vibrio parahaemolyticus Peru-466
MIKPYELSEEESQIVKSVQCDDLSPQQKWDDCRVTTMKSNIKKHYIAEQDKTCAYCQVNMHTTHGMVWDTEHIIDKDSSPQWMFKPLNLCVSCKDCNGAKGTRAVTKSKSYKKFPSKSANYRIIHPHFDNYDEHIEVAVPGATYRYITEKGRYTIEVCGLLRYHQTVGRKKVDLGLQAVLLAAANNQSPEMLQYAMEEIARRQAAVSQSTGSST

SEQ ID NO: 81298 - protein, 409 aa, Vibrio parahaemolyticus Peru-466
MIESIDFKLIGTSDKRVITNLNGKNLIITGENGCGKTRFLRQLHQYLQQFFKRQIQSKESIQQQLNYHQTQLENTSVSHQTYNYFVEHVQSYTKQLERISNESMDISDSDALFELVNNNQFILRFFEANRLANNIAGNGQIESISNVKQAGKSQNFEQDSSNQFEKYLVSYYNYGSHVIARENNPEKEQQINAWFEKVQNDLRDLFEDHGLILQYNPEEQAFYIHQEGKDPYRFNNLSSGYSSILSIYADLLMKVELRDIPAEDITGFVLIDEIDAHLHVSIQRKIFSFFDKAFPKIQFIVTTHSPFVVQSVNDSIIYDLSKLEPLEDLSMYSYESILKGLLGVESTSDILNKRLDEMAEIINQEPVNTEKLQELIDSIEPYEGQLNARSRAFLLLGKNALLDSTDGEG

SEQ ID NO: 81299 - protein, 221 aa, Vibrio parahaemolyticus Peru-466; identical to SEQ ID NO: 81113

SEQ ID NO: 81300 - protein, 409 aa, Vibrio parahaemolyticus AN-5034; identical to SEQ ID NO: 81298

SEQ ID NO: 81301 - protein, 184 aa, Vibrio parahaemolyticus AN-5034
MFNVVRTYPEPPSIAKNEYNKDDVLKKLRPMFFDKCYLCERDDIQDVEVEHFIPHIKNTALKYNWENLYYSCSRCNGIKSSTHINLLDCANRFYDVGAMVKCLMPSTPDGDVEVSATSATPCIQTANTVTLLEACYNLDNTALREISRETLMEDMWDHYTELLNARQVLRKKRSGHTEKKMQKK

SEQ ID NO: 81302 - protein, 470 aa, Vibrio parahaemolyticus AN-5034
MGFRVKKVRNHVLWDKENDDRNAFTVIIGNNGCGKTELLIDTCNKYHSYYTSALLDKDTHVASAVHYLREDFSPHNWKTVEREYGHRLPRKLIAASTSQFEKFKANWSVRNDLVPSGFYAYIGSKPYMPSLSPSTRIASKAIQQLLGAEYFEERKHKALVGFLSKFDFGQKLLLKFELTFPNEDLENIQNQSLTEPETQLILKNAYIEHDEMELVELLGYCERIIEAPAFALTVGNQNLNLIHLKGSEQKPFSKLIISRMLRAGLITLSSIQTMKDKSLINDQSTVNIESSAISSLSKRSSGEQCLFLLFMGIISSIEDNALICIDEPEISLHPQWQERFVDILSESFSSYRGCHFLIATHSPLIVSDISAKNCCVYDMATNTLVDAAPYGERSSDYQLATLFHNPGNNNEYLLSQVIEVLDDICQSKEIASETKTKAHWLLSYEPRLPDGDKVKRLLSILEQTLEAFSK

SEQ ID NO: 81303 - protein, 214 aa, Vibrio parahaemolyticus AN-5034; identical to SEQ ID NO: 81297

SEQ ID NO: 81304 - protein, 470 aa, Vibrio parahaemolyticus K5030; identical to SEQ ID NO: 81302

SEQ ID NO: 81305 - protein, 214 aa, Vibrio parahaemolyticus K5030; identical to SEQ ID NO: 81297

SEQ ID NO: 81306 - protein, 409 aa, Vibrio parahaemolyticus K5030; identical to SEQ ID NO: 81298

SEQ ID NO: 81307 - protein, 221 aa, Vibrio parahaemolyticus K5030; identical to SEQ ID NO: 81113

SEQ ID NO: 81308 - protein, 550 aa, Escherichia coli 2362-75
MTKQYERKAKGGNLLSAFELYQRNTDNMPGLGEMLVDEWFETCRDYIQDGHVDESGTFRPDNAFYLRRLTLKDFRRFSLLEIKFEEDLTVIIGNNGKGKTSILYAIAKTLSWFVANILKEGGSGQRLSELTDIKNDAENRYADVSSTFFFGKGLKSVPIRLSRSALGTAERRDSEVKPARDLADIWRVINEAKTINLPTFALYNVERSQPFNRNTKDNAGRREERFDAYSQALGGAGRFDHFVEWYIYLHKRTISDISSSIKELEQQVNDLQRSVDGGMVSVKSLLEQMKLKLSEASERNDAAVSSKMVTESVQKSIVEKSICSVVPSISKIWVEMTTGSDLVKVTNDGHDVTIDQLSDGQRVFLSLVADLARRMVMLNPLLENPLEGRGIVLIDEIELHLHPKWQQEVILNLRSVFPNIQFIITTHSPIVLSTIEKRCIREFDPNDDGNQSFLDSPDMQTKGSENAQILEQVMNVHPTPPGIAESHWLGDFELLLLDNSGELDNQSQELYDKIKTHFGIDSAELKKADSLIRINKMKNKINKIRAEKGK

SEQ ID NO: 81309 - protein, 216 aa, Escherichia coli 2362-75
MKELARLESPEILDQYTAGQNDWMEIDQSAVWPKLTEMQGEFCAYCECRLNRRHIEHFRPRGKFPALTFIWSNLFGSCGDSKKSGGWSRCGIYKDNGAGAYNADDLIKPDEENPDDYLLFLTTGEVVPAIGLTGRALKKAQETIRVFNLNGDIKLLGSRRTAVQAIMPNVEYLYSLLEEFEEDDWNEMLRDELEKIESDEFKTALKHAWTSNQEFA

SEQ ID NO: 81310 - protein, 419 aa, Porphyromonas asaccharolytica PR426713P-I
MQRYIQSIHINKVRHLHNLDIYIPDDEHPHLLITGKNGSGKTSLLEAIRDHIALLQKGQSLDFLKYDEQIQYYAQQLSSCTDPLRKAELEQKLAFWQERLDELYGAVRVEFEDPTQIVFHSSDKLFICAMYAASREVRMLEPLNPTKPTFRDQWLINQGASDQFLNYLSDLKIQEALARNEHQTEDADRINDWFVSFEALLGEIFGDSGLKLSFNYKDYSFHIETEGKSFKFNELSDGFAAVIDIISDLILKMSSISDRTMQLYDIPGIVLIDEVETHLHLSLQRQVMPLLTKVFPNIQFIVTTHSPFVLNSIASASVYDLEHQKVLTNLSDYSYEALAEGYFEVSTRSSYLEQQLNRLIELLKQADLDIAERFEVKELIKDLDKVSESVSPKIAGEYEELKIKWADKLIEIRDDDSNL

SEQ ID NO: 81311 - protein, 217 aa, Porphyromonas asaccharolytica PR426713P-I
MIQIYKSSTSPKSLETGHQYDGQDVQEQLLIDQNSKCYICEKKVVTDYHIDHLLSQAQHSDKTTDWSNLLLTCSYCNQKKSNAYDQIINPLGHPIETFIKQKVDYQRNVAIFEGPDDREIVGIDETIKLLSSVFNGKTPARQVREEKFYEYFFHRITLFQKACNQFLANKTEQHKRIVCELLKADQEFLGFKYWIIQSNQTLQKTFLSFCQWNRDEI

SEQ ID NO: 81312 - protein, 414 aa, Lachnospiraceae bacterium 5_1_63FAA
MQEYFIREINIDKLYHLSNIKIELSSDKRQNLLLTGKNGSGKTSLLLKIEKFLKAINDERLSQIFEEYPMWIREAKKQALSASSENEKYKIDQDVKLWTGYLQRYSDGVQVNLNQYDGLEMLYDQGKFITAYFPSERKAQFMRPNGVENITLENTYGIDKSAGNILLKYMVHLKTQQAYARNEGDQTTADKIQQWFDRFDSALQILLDEESIHIEYDYKKYDFKIRQNGREPFSFNELSDGYSSVIYIVSDLILRMDKNWLLEDKISEYDYQGIVLIDELETHLHIELQKKIFPFLTKFFPRIQFIVTTHSPYILNSISNAKAYDLERQVELDNLSGFSSDDLAEGYFEADAYSDELKNSLNRYEELCLRNDLTEDERAERAEIRIKFKNISTELSGVAKERFEDIERRRKAND

SEQ ID NO: 81313 - protein, 227 aa, Lachnospiraceae bacterium 5_1_63FAA
MIKIERKETEKTKQAIADLQKASENESSYNIESVNQALKEIFHGKCYICENKAVTSYQIEHLVPHRGDKTLKYDWKNLFWSCAHCNNIKSDKYEPILDCTKEPVEKMIAFRKRGYFGTDEKLEFTSVGEEREDVKNTIALLEAAYYGTTPQKKIEAQIIRKTLRQNLSNFKEYVREYQETEDKEEKEDIGYLLKKELRDSAAFAAFKRWLIWDNEMFSEIEQFIPEN

SEQ ID NO: 81314 - protein, 451 aa, Pseudomonas savastanoi pv. glycinea str. B076
MQNYRCFGEFEIDFDPHLTILIASNGGGKTTILDAARVALWPFVKGFDLGGQTGKSATIQIEDVRLAQFGSGNMESQVPSVIEAKGVWWESAVESSWLQQRVSLKKSTNTIGDAGSKALTSYGKSLQECVRSDAHVTLPMVTYLGTSRLWFEGRFSSAAAQTTLDKSEYSRTSAYLNCLSYSSSFKTFTAWYIWMYRSYREAQLIALERDEEMSDAGQRFEKIISAVKEAIDRLIKAPTGWHRLEYSASHQQQLVMHHPDQGVLPVEMLSDGLRNTIAMVADLAFRACKLNPHLGERAPLQTPGIALIDEVDMFLHPFWQQTIVGSLRAAFPAMQFIVTTHSPQVLSTVRRENIRVIGKDAQGRLIASRPLAMTYGEPSNSVLRSVMQVDPQPPVDEKPGLLQLTEWVDKGRYDEPQAILLMQQITEALTEQHPQLQRLQRSIKRQKALRG

SEQ ID NO: 81315 - protein, 240 aa, Pseudomonas savastanoi pv. glycinea str. B076; identical to SEQ ID NO: 80903

SEQ ID NO: 81316 - protein, 452 aa, Pseudomonas savastanoi pv. glycinea str. B076; identical to SEQ ID NO: 80906

SEQ ID NO: 81317 - protein, 174 aa, Pseudomonas savastanoi pv. glycinea str. B076
MLEKWKRANKGKKYADLVGREDIKDAIRYACVTEQHGLCAYCCCRITAEKGSACNEHIEAQHLAPHRTLDFGNIVASCTNAKRCDKAHGRQLLPLTPLMIECEKELQFELSGLVAGTTLRACASINVLNLGDTHESNRGLVGERKQMIDALLFSCSIVSPEHKKTDTPMMFSIC

SEQ ID NO: 81318 - protein, 421 aa, Pseudomonas savastanoi pv. glycinea str. B076
MRLDHLHLQNFRCYEDAHFDFQPGFNLVVGVNGSGKTSLLLGVAGCVGNLLGSIGVHQPSIAESDVRFALVKFEDRIRFERSYPLVLTAQGGAFERQEWHVSLERSSLQTNFSALHSLVFSENLISIDVSTHGDLPVFAVYQANRRWLTMSVTAELAAQSKPSRLDAYTSWFDAASNLKNFETWFIGKTLERFQRLSRVGSSSVFNDELTWINSAIQCALPDAKGIEYDMELRALVVDMDDRKIPFNDLSDGQRGMVALFADIARRICLLNPHMGKDVLSKTNGIIVIDELDIHLHPGWQRTIAPALKKAFPSIQFIAASHSPQVIGSLQPGEVILLNNHDGSHPRATYGLDSSSILEEVMGVPQREPEIEALLDELFSTLENNELEKARLQLDALKQKAPDLPEFAGAEALLKRKELIGR

SEQ ID NO: 81319 - protein, 214 aa, Pseudomonas savastanoi pv. glycinea str. B076; identical to SEQ ID NO: 81051

SEQ ID NO: 81320 - protein, 421 aa, Pseudomonas savastanoi pv. glycinea str. race 4; identical to SEQ ID NO: 81318

SEQ ID NO: 81321 - protein, 214 aa, Pseudomonas savastanoi pv. glycinea str. race 4; identical to SEQ ID NO: 81051

SEQ ID NO: 81322 - protein, 451 aa, Pseudomonas savastanoi pv. glycinea str. race 4; identical to SEQ ID NO: 81314

SEQ ID NO: 81323 - protein, 139 aa, Pseudomonas savastanoi pv. glycinea str. race 4
MKIQGAEVFGGHASGKSKGVDMARFVSCHMPDCSRFFAYLSDGRVVPADGLSPEEVDRAEYTIGLLNLNSPYLQGLRQSWWDELEALFEEHVNQNMSLHCLAGIDLIPVGANLSQFFSITRNFFGGIAEEVLEQEAGRW

SEQ ID NO: 81324 - protein, 438 aa, Phascolarctobacterium succinatutens YIT 12067
MQIERLRLKNFRCYDELDIAFEPKLTVIVGENGKGKTAIFDALAIALEPYLRSFDASGRQITPQDVRRVPVYKKDMRHIDGMECHYPVEIKLEGEVYGKKLTCNRRLLEGNVPEDDADELCERGCALAHDAKENGNRLLPVLAYYGTQRIWVDSKLMTNFHKSLMERNVGYEECLEPSSSYSTFGKWFEYVTKCAQSEQQYSAEVKRNVMLKNAIQNAVDVCLESTGLRDLYYNYRLKCFVVSHPDMGEMVVDELSDGFRSIISMVADLAYRMARLNPQLREDAVTKTPGLVLIDEVEMHLHPLWQQTVLLDLQKTFPMVQFVVTTHSAQVLSSVPAESIRVLAWSKQFEGVRHVDFSLGANSYQLLQDIQNVSPRPQALPIVQDLKRYLQLVSEDAWDTPEALELRKKLDKWSNGKEPALLRADMDIRMRQFRRRRS

SEQ ID NO: 81325 - protein, 259 aa, Phascolarctobacterium succinatutens YIT 12067
MKRVYKSKEEPELLRQYRLHNPEETWEHFRRRCRRGYKQVREAILRDQHGLCAYCEVGIKLAEEEGEVDDFRVEHFYPKNATQEHGHNYHLDWRNLLGVCHGGSQPYVPDPEWRYSSQKRDRSCDVPKGGREITNYILNPLKIPGKIRLFRYAEHSGRMYVDEDTCPKDLQGKARSTIRELNLNAPRLMRMRREVIHTLEDQISDELSKGRELDEVLEMLATICLVPDYNGVTLPFFSVIRWYLGEAAEEVIRASGAKL

SEQ ID NO: 81326 - protein, 550 aa, Escherichia coli RN587/1
MTKQYERKAKGGNLLSAFELYQRNTDNMPGLGEMLVDEWFETCRDYIQDGHVDESGTFRPDNAFYLRRLTLKDFRRFSLLEIKFEEDLTVIIGNNGKGKTSILYAIAKTLSWFVANILKEGGSGQRLSELTDIKNDAENRYADVSSTFFFGKGLKSVPIRLSRSALGTAERRDSEVKPARDLADIWRVINEAKTINLPTFALYNVERSQPFNRNTKDNAGRREERFDAYSQALGGAGRFDHFVEWYIYLHKRTISDISSSIKELEQQVNDLQRSVDGGMVSVKSLLEQMKLKLSEASERNDAAVSSKMVTESVQKSIVEKSICSVVPSISKIWVEMTTGSDLVKVTNDGHDVTIDQLSDGQRVFLSLVADLARRMVMLNPLLENPLEGRGIVLIDEIELHLHPKWQQEVILNLRSVFPNIQFIITTHSPIVLSTIEKRCIREFDPNDDGNQSFLDSPDMQTKGSENAQILEQVMNVHPTPPGIAESHWLGDFELLLLDNSGELDNQSQELYDKIKTHFGIDSAELKKADSLIRINKMKNKINKIRTEKGK

SEQ ID NO: 81327 - protein, 216 aa, Escherichia coli RN587/1; identical to SEQ ID NO: 81309

SEQ ID NO: 81328 - protein, 542 aa, Vibrio sinaloensis DSM 21326
MVNKQKSQSRAIRAQIENAEKGILLSQFQLYENYLKGKHVEQNKELAQKYFEVLENSLADKKLRLNSLSLSNFRRFDDLCLDFDEKLTVIIGDNGAGKTSFADAMANIFSWFNNNLEKDSVNGNFVKLSDINIKATDYAELTCNFKLDQINRFEASLALPVQGYTGSKSNDVNVIKQFGAIYRSTAKNESITLPLLAYYSVERSDFELKTSVTEKASGDREGNRFSALKDSLKGNGKLDDFSKLYIELVNLAEGEETKEVKELNEQINTLQRTIDDVYQGEQPQENDPFTAKLNSLKGQLADLRKSTASAKYQRHLNFVNEAIETLVPDVKNLEVDRSTGKPRILVENFGNKVNIAQLSQGQKMLVALTGDLARRLVTLNPDSSNPLHGHGIVVIDEIELHLHPKWQQEIIIGLQITFPNIQFIVTTHSPQVLSTVDNKCIRKICLNKHGYPIIETPTFQTKGVTSASILARIMGTNSVPEKLEEASWLTDFSRYLKESNEELRESTFEKIKAHFGENHPVVVDCESQIRIHSMKARLRTKE

SEQ ID NO: 81329 - protein, 179 aa, Vibrio sinaloensis DSM 21326
MQNGFCVYCESVAIKGNGHIEHFFHKGQKTDGSTPYKHLTFNWTNLFGCCGLSSSNTCGHYKDREGKNGPGQYNANDIIKPDIDDPKLFLNFLDTGVIEVKTGLTPHEQKRAEETLRVLNLALLNGARKTQIDIFKQELKELEELSHSLNDDTLQREIDIIKEKVCTQEYQSAVLGALF

SEQ ID NO: 81330 - protein, 429 aa, Rubrivivax benzoatilyticus JA2 = ATCC BAA-35
MYIDRIQLRNVKGFEKLSFNLVRPGGSHAGWTVFTGDNGAGKSTLLKAIALGLVGREVARSLQPNLQRWVRDGFTEGDITLTLQPEQGIDEYMSGGRTSYKAFDAVLTLNEHAGRVVLDDGQAKAKKAAAAARGPWSGQASGWFSCGYGPFRRVFGASSEATELMVAPITERYVTMFQEAASLLAVDKWLRDLSHKKLEKREAETRLLDLILGVLRDELMPNQITVDTVDSDGLWLKDRNGLRLAWPDMSDGYRAALALLIDILRHLVKAYGFEGLTERDEHGRLTVVRSGVVMIDEIDAHLHPEWQQKIGFWLKQHFPRIQFLVTTHSPIICQAADPNGLFVLPEPGSQEPARALSEAEHQLIISARPDTILLSRAFGLQNTRSPRAVEARARYSALKAKLNAGVNFTPTEKSQFSQLKLFVQPEAEN

SEQ ID NO: 81331 - protein, 246 aa, Rubrivivax benzoatilyticus JA2 = ATCC BAA-35
MRKVQRPAASTSIQTYLTKKEAAVTVAHLRGQLDIEGIWKRARQTKVIGESALGLLQGAMGPRQRCMYCLDAHGTDIDHFWPKARYPQRAFKWDNWLLCCTECGRIKGSRFPLSRNGRPLLVNPCAEDPWLHLDFDVDTGNLMARFDATRHGPSTKGVKTVEALELDKREALAAGYRLTFKRLVEVIERALNAPQFPRGKLLADLQEADDHGLLPWCFHWAGRNEPAFIKLRRSQPTAWQACAAAV

SEQ ID NO: 81332 - protein, 441 aa, Bacteroides salanitronis DSM 18170
MRIKDITIRNFRGFTERSFIFDSRMNVVLGNNTTGKTTLLHAVQIALGAFLQELTLVTGCARNTKDSDVVRKYSELTKSFQKQQAKPVFEVNACFIDGNYNFTSKEYSCQEKDIKWLRLGPKNSRKNAGELKDMVANMEQKRRDADITKTTSVLPLMISFGASRLENNYNGAEKTKARASREEKAYKCVLDEKVDFKSAFDWIYRFDKELDKGREFAGSDIAFLNALSDAIPALKVIEIDRKNNEFTAEIQMAKDPQPYWLTYDMMSDGFKSMINIVAEIAYRCIELNGFLGVDAVKKTPGIVLIDEVDLYLHPHWQKHILLDLQTAFPMMQFIVTTHSPFIVQSVKSQNVITLDGVKGIDDPNKRSIEEIVINEMNMDTVRSAKYNEMVEKAEEYYRLVKEEKADTPDALKVKKELDEIESLFSDDPAYVALLRAERNVL

SEQ ID NO: 81333 - protein, 245 aa, Bacteroides salanitronis DSM 18170
MRPVEKWNPENEPRINDNYPNYKDAKHPLCMNLGTICSYCEKAYDDERDLQVEHIQPKKYKDADGNYIYAHLETAWSNFLLSCPTCNGADNKDTKNVVYGSCHLPHLNNTFLSLCYKAGGVVEVNPSLSGKSANNARALLELVGLNKGPKDSSAKDYRWRIRLEKWNLANIYLEKYIAGSIDVYTIVDLVKGHGCWSIWFTVFKGHDEVRKALIEEFPGTAASCFDAQNHFEPICRNPLDDEDPV

SEQ ID NO: 81334 - protein, 479 aa, Acinetobacter pittii PHEA-2
MSKINFLYFKSKKIELKERNLIITGKNGSGKTRFLRQLEDNLINNLNFKYQDLERENLLKEIKYGIDNFSKSLNFKNEEIKFYYDLKNKNFSEDEFKKNLFQLYSILLKKDAKFRIDTQNYITNTSEDIKNSHRKEINPNKISEEYYYYNNPEYIIDFMNRITISIDQYIKISKSFRISPNNFSKDKIFVFDASRVENNRFVKKVFRDYEYYKKDNNKNNMEEALEAYLILNKFKLISITEQQEAIEKVSKEIKKLGNWFNKVESDLKFILENPNIRISFNHQSDQVLLVDSQKNSFFSFDSLSSGFKAIFNIYANLLMRAQIQNLAPENLAGIAIIDEIDVHLHISLQKKVLPFLIKAFPKIQFIVSTHSPFVITSTDNDTVVYDISSDEFFEEDLSLYSHESIIKELFHVQDENENLVTLSNQLIGFIKSETQIYDLDSIQILLNEVNKSFDKLSVELQLQYMVAKNKLAKLKHEGN

SEQ ID NO: 81335 - protein, 223 aa, Acinetobacter pittii PHEA-2
MFSVTRPTTFPKSLTKSTKDYRAADVVEALQDIFFSKCYLCERQGFPDVNIEHRDPHLGNDIKKYDWHNLFYACVRCNSIKGDTHINILDCCQSIDVSQAIELHCPIVNNEAHKITVQLGNLPNSLEISSTIELLNKCFNETNTALRGISRHSLIKEIQKYQIQLSILKNKLLYPELPLTSKAKTEILEQLKAMCDKEFPFSAFWKWAITRDDDLSKIVGNVF

SEQ ID NO: 81336 - protein, 443 aa, Polymorphum gilvum SL003B-26A1
MIALSLDKLSLTNFRCFAHCEVEFHPRLTVLVAENGSGKTAVLDAAGAALSVFVNALYPPEKVRRIERSDVRLVPGQERRMSPCLPTEYGAQATVQGEAVTWKSAVRTYGDKVRPSTRHLSTMKAAAQPFLSDTAVLPLIAYYGTGRLWSEQRQTEYRRSSVTNVGERVAGYADCLTSSSSFKGISAWFEHRFRQTASPSFRESLQANLAMIEGVKAATDTVLQPTGWSSLRWDDELHTLTAQHESRGELPLSMLSDGVRTMLALVADVARRCASLNPQLSDRAAIETPGILIVDEVDMHLHPRWQQQVLGLLQAAFPALQIIVSTHSPHVLSTVDKSSIRVLHISNGDVVIETPLIQTRGVESADVLATVMDVDPVPQVEEAIDLSAYRKLIEAGEAEGPEATDLRQRLIAHYGESHQVMLEADRLIRFQRFRLAKNRPEGA

SEQ ID NO: 81337 - protein, 213 aa, Polymorphum gilvum SL003B-26A1
MRKLDRAICPAPACLGGYAHGVHTWDNVSSVHKEEIRTHLETMQGRRCAYCEGDIETLGQHIEHFRRKSVHPALIFDWENLFWSCDQTDSCGHFKDNGAGQYNVTDLINPCCDDPDGFFIFQADGTISVRHGLSEVDQRRATETLRVFSLDAKWGRLRAMRKAAVSGYVDDANTAFDEGWPSDDIRTLFHAELEIARNLPFYTAIRHVLTERQ

SEQ ID NO: 81338 - protein, 452 aa, Escherichia coli 97.0246
MMNIRTLKLTNLGRFEELEVHLAPVEEFKSNVTIFIGNNGAGKTSILKSLATSLSWFVARVRTEKGNGSPIPEDAILNGRSSATIELQVLNTHPATEAATPYRWLLARTASGKKSTTASSLQEASQLAAFYRDQYTQNSGASFPLIAFYPVERVVLDVPLKIKERHNFLQLDGYDNALNQGIDFRRFFEWFRNREDAENESGLPQDVLDKLSTRIDLDNTVLNALTAIMASSRDRQLTAVRTAISRFMPGFSNLRVRRKPRLHMSIDKNGQTLNVLQLSQGEKSLMALVGDIARRLAMMNPMLENPLNGEGIVLIDEVDMHLHPTWQRTIIQRLTTTFPHCQFVLTTHSPLVISDCKDVLVYSLDDGELTQLPSLYGQDANTVLLNVMDTDIRNATVAEKLNDLLDLIQKNDFINANALLNTLSLELPENHLELVKARMLLRKQEIKHARNN

SEQ ID NO: 81339 - protein, 220 aa, Escherichia coli 97.0246
MREITKGQPPASLQQWVRAKPRDKNANQWFQELYAQKKWDIVGDLSQQCAQEQFYLCAYCCDRVTGTNRDTVNEHVEARDLVPARSLEFTNIVASCKTKGQCDDSHKNQPLLLTPLMPECETEFIFKISGRIEGTTPRAIDAIKVLNLGDSERNNRALIEKRKQLSDSLLWANGIDPSEGLEDDDLLQAVIDELLTPVDGYRTFRSRGGEYSKKLDDRMT

SEQ ID NO: 81340 - protein, 763 aa, Escherichia coli 1.2264
MQYVDRSRVLPPPSLVTDNIVKENLYDIGAFLALESQRRAQTRPPRLASLSKVEGLKDSLYELFNGRCAFCECNHHSLSIQRFRPSSNATPMGKNADAPLYYLWLAWAWQNFYLVCAQCNELMMRNFLVTGKRMPVPSSQEYQDYLRSESSLWPQWPPKEESLLLDPCQIKSFASHFDVRPQGEFNYLSRRGMATINILNLNDADLISRRAQRYSEYMKRLSESIEARSIDLLSSVLNFSRQEFGGSWYLLLRRLASHIDGEKGKALSMGKIKSFFQLMFQNPEQGSDHLYQAFEDLYALPRDERIEEMPSPPKGDLRRVQFQNFKSLEAVELELPAMPELENGKKPEARALLLLGENAAGKSTILEGIALALVSAEGRKRLNLRLRDFILSPALLAGDPRLAPHMAEVVLTQDNDASLTLTLKKGGSIVVTLNGQFNVGPVFAYGAFRQYRQGRRLYTTDKTVRNLFDGSLLGNPQSWLLSLSNVDFDRVVAALREVLSIEGEFDVIKRSPERKVCSIITAINGIETHTPLNVASSGFRTVLAMVCDIMQGLMDERVAPQFEGFENARGIVLIDEVEAHLHPRWKMQIMGGLRRALPGVTFIVTTHDPLCLRGMYNGEVRVMQRILHNDLRSESRASQRVETLTELPDITKLRVDQLLTSDFFQLDSTDEPRLDRLIAQVADLLAKREQGEDLTAEESEVIGTFECDIASAMPVGTSEAHRLVQEAVAEYLQERRQATATKIQALQDGTRSRILNILREVMQ

SEQ ID NO: 81341 - protein, 308 aa, Escherichia coli 1.2264
MRHVPRGSAQPPLSLSALDSNGKSELQRAREHYAEPEQAKRFEFKAYSSDDVKWRLNTLFHFKCAYCETFFSASSPVDVEHYRPKSRVSEDAAHPGYWWLAMDWENLLPSCIDCNRKRRQHIVNQSSNLISLLENSRRAATSGGKKDSFPLANRGVRMQPESRDHFEEQALLLNPCEHQPESFLHFVSIGAPSLSLVVPTGDRESPHGATSIHVYGLNRLGLVQDRTRYLRRLEFLGDMMISLGELIDQVDRMALEEVQRDEIIRPLRLLLDKTGKEMTQMARPDQPYSVMAETWIAQFFQQIANRGV

SEQ ID NO: 81342 - protein, 465 aa, Burkholderia gladioli BSR3
MSSLNIRRLSLKGYRCFDAIDIDFDERLTVLIASNGAGKTSILDALAVAFGPYVGAFDEGMGRHFETSDIRQLRVRATATNEMEYTPGGIQLEATGWIPDSIMDRLGEPAVWRRSLAGPVRAKTTIRDAKELINYGKHLQEAVRTPKTDVVLPLVAYYGTGRLWQRKKLTDGKLIGTSRTSGYSDCLNSASSYKAFVAWFRYWSTNALKAELEAHKVRREPEKTEFHDYIESVSNAVDTCLKPSNWREIAYSLAREQLVAHHEQHGELPVELLSDGIRNMIGMVADIAFRATKLNPQLGGYAGRETPGIVLIDEVDMHLHPAWQQVVVQTLLTAFPAMQFIVTTHSPQVLSAVPAHSIRILSRHWDEESKKYHSVVEKPSVQTEGIPSADVLAFAMDTDPTPNVAPARQLSEYKALIQQDMEESPEALMLHRKLLDHFGAAHPVLLECDRLIRLQRFKRKLPRRD

SEQ ID NO: 81343 - protein, 209 aa, Burkholderia gladioli BSR3
MHKLQRGLAPTCLNNYQPPQLWSDVTSADKGQIWQELEAMQGQRCAYCEAQIENGRRHIEHFRQRGRFPQGTFDWLNLFGSCNRSDCCGKHKDQCGLYDPADLIKPDIEDPDHFYVFVSDGTIAVRQGLSDHDAHRARETLRILNLDAQYGPLRRMREQAVAGYIQTAEEWQQMSVEFEPHEWMPALQTELALILEMPFATAIRHILTP

SEQ ID NO: 81344 - protein, 445 aa, Bacteroides fluxus YIT 12057
MRIKEVNIVNFKGFQNETVTFNGNLTVVIGNNTAGKTTLLKALQVGLGAYLQSLKTLPGGTSYRRNFSSLDKFMRFDQELRDYVPNTEKPRITIHADFPITTSSDGHCPEVSFIPIRWYREYAGNYTTHTRVSAGELIDAVHHMEHLRNEEKENSIYPLVLSFGAKRTSDAQAKSKSTVKERASRIEKAYKFALHDKVDFEGAMEWLKHYDKNIKDRKEFEGTREAFFEALQQAIPALSEIDFDNGEIEAVVSVTGHTPSRHHFSYMSDGLQSMINIVAEIAHRCIELNGFLGQHAIKMTPGIVMIDEIDLYLHPHWQKHVLQDLTNAFPMIQFIVSTHSPFIVQSLQEGQLVSFDPNVLTSGEPFREGLEDITSERMGLQQDIRSRRFNEMVEVASRLFEATDKGSADRDELKARLNEIEAEFSDDPAYLALVKTELKARQKQL

SEQ ID NO: 81345 - protein, 245 aa, Bacteroides fluxus YIT 12057
MRPVEKKRPGELICYTDSNNQKVEHRIKEHYPDYGDAKFPLSANIGAFCSYCEGCEKIPTLDVEHLAAKSKGGAETAWDNFLLCCKVCNSNKGTKVDADCHWPHLNNTYYSLIYDETGRVHVNGNMSELSRKKAQNLLDLIQLQRYPGTDKSPSPKDFRWKYRFEAWNKASRYKELYLKGAIAEDDVIDYAHCNGQWSIWFTVFKGIDSIRHRLITDFPGTCAHCFDANNHYEPIERNPGSPDPV

SEQ ID NO: 81346 - protein, 413 aa, Vibrio parahaemolyticus RIMD 2210633
MVKSMIESIDFKLIGTSDKRVITNLNGKNLIITGENGCGKTRFLRQLHQYLQQFFKRQIQSKESIQQQLNYHQTQLENTSVSHQTYNYFVEHVQSYTKQLERISNESMDISDSDALFELVNNNQFILRFFEANRLANNIAGNGQIESISNVKQAGKSQNFEQDSSNQFEKYLVSYYNYGSHVIARENNPEKEQQINAWFEKVQNDLRDLFEDHGLILQYNPEEQAFYIHQEGKDPYRFNNLSSGYSSILSIYADLLMKVELRDIPAEDITGFVLIDEIDAHLHVSIQRKIFSFFDKAFPKIQFIVTTHSPFVVQSVNDSIIYDLSKLEPLEDLSMYSYESILKGLLGVESTSDILNKRLDEMAEIINQEPVNTEKLQELIDSIEPYEGQLNARSRAFLLLGKNALLDSTDGEG

SEQ ID NO: 81347 - protein, 221 aa, Vibrio parahaemolyticus RIMD 2210633; identical to SEQ ID NO: 81113

SEQ ID NO: 81348 - protein, 473 aa, Vibrio parahaemolyticus RIMD 2210633; identical to SEQ ID NO: 81296

SEQ ID NO: 81349 - protein, 214 aa, Vibrio parahaemolyticus RIMD 2210633; identical to SEQ ID NO: 81297

SEQ ID NO: 81350 - protein, 429 aa, Nitrosospira multiformis ATCC 25196
MFKKIVLHGWRQFRNVDIDFHPRLTVLTGANGAGKTTLLNLVSRHFGWDGSFISTPVPRRSNPSLMYSTDFWDIDDIQVDIIHSFEREQNRKKQAAAQGSQTTIGKIIYGDGTETLITVPNSEVGSRYDVSIPARQRIDGLHIPSHRAPSTYQQVQNIPTIPRRRQEVFNQYLSLVQSRYLGSYTQWSPQYYMKETLISLATFGYGNAVVDADPESARLFEGFQEILRKMLPPKLRFKRLQIRVPEVILETETGNFSIDALSGGAAAVIDLAWQVFMYEPSESEFVVTLDEPENHLHPELQQRVLADLLTAFPSVQFVVATHSPFIVGSVPHSHVYVLGYDDSRRVNSTLLDTVNKTGTANEILRDVLGLEFTIPVWVENRLENLIEKYSKKDFTEDNLMMLRQEMTSLGLGKHVPQTISMLAQKKDGQ

SEQ ID NO: 81351 - protein, 216 aa, Nitrosospira multiformis ATCC 25196
MIKLNKLTVPPEIAEKIRQRQQHYNELDAKGEQIPDSLASAYKAPEVKELLRCETAEKCAYCESKISHVDYGDVEHLLPKSKFPQLRYSYENLTYTCSVCNTKKGDFFDAQTPLLNPYKDKPEDHLMAVGSMIFFIPGSDRGLVTQKRLALNRSNLVERRGERLESVATLIDQIARTKTSAIREVLLHELKEECEASEEYAFVVRTYVEAVLPWIN

SEQ ID NO: 81352 - protein, 483 aa, Aeromonas salmonicida subsp. salmonicida A449
MKVNNLHIRSRFKNLENVKVDFDENHLMTVVVGRNGSGKSNVLEALVAIFRNLDLGDAPPFSYELIYRLGEPHKQNKPSERWLEITIDADPTRGTIAKQYQVQVRDLLADNELNNTSTNKPSGETIPFSKVKRDKEGKAPYLPNYVFAYYSGPSDRLENNFKKHRTNFYRRLLEDKLDLKGDIRPLFYAKPHHSQFVLLAFFLSEQDSVEKAFLREHLGIKDLDSIHFVMRQPGWAKQKGELFWGAKGVVRRFLDELIKHTLSPVKVTRPEDTSLTNSNISKEFFHLFLPDVKALREFAKDLNPDELFKMLESTLLSEIISGVSIRVKVSSSKEPLTFRELSEGEQQLLTVLGLLKFTGGKDSLFLLDEPDTHLNPSWAVKYLKFLREFVPNHETSHLLMVTHHPLAIAELKKEQVQVMWRDSNFQVHAQEPEESPRGMGYGGILTSDMFGLLTTLDNSTERLLRLRRRFTEKRSYRPYRVGV

SEQ ID NO: 81353 - protein, 287 aa, Aeromonas salmonicida subsp. salmonicida A449
MRHLDIDFTKLVLPQGWREKTKELSDSLIAAQDEKQRSEIINKNQDHWKAVKPILASLFNHKCWYTEAPQQGTDVDIDHFRPKKRVQETLSTAKQHDGYWWLAFNLQNYRYSCIVANRRRTDVETGVTGGKADHFPLCDESMRARTPSCDLEAEQPILLDPLKATDVQLLYFKPDGEAMPRFSEKNHARKFMRADQSIIFYSLNHSDFVRCRIELRDKIDSDVKAAKRYFNKLETGDADNDLAYEQAICRLRKMRSKEAPFSSFCIAYLDGFRHKPEYEGVLDAVFL

SEQ ID NO: 81354 - protein, 364 aa, Clostridium sticklandii
MRVLDVVFDNHPIFDSNTISFETEDKKILDTIILAGINGSGKTTLLSSIFKTFKKLEDNKFCLDEKDTVNLHLDINEDELEKAPKMIYLPSEVRFQSIHNSNQADEIPLAYCIDDKSTHDIISYIKQAFDKQIFSNPETTVGKSIDAVCDEINSIFSILDMDVYLVGIKDPKTKMPLFRNESGVEFDINGLSSGEKQLFIRLLSLKSLEPEGCVILIDEPEISLHPSWQQRIVEVYQNIGKDNQIIIATHSPHIISSVKRESLKILSKKERWVKVINGENLDETYGVTADMILLDIMGLSTTRHPHIQEKIDELKSMVRNELYETEEFKLLYEDITGVIGTIDQDILLVNIEIARRKGLKNAGH

SEQ ID NO: 81355 - protein, 200 aa, Clostridium sticklandii
MLDIKKADPPDFLLEFIEEKSNASYKNMRGDMRKDLRHYIAYNEQCKSSRCFCAYCEREIVVNSDNANGSHIEHIKPQSRFPEDDLDYDNMIVSCNAKESCGIRKGSHYFEGFIDPVNFSPDVFFIYDLMTGEIIPKEGIKDSNTPAYKSLDLLGLNSVRLTDARKRVIVEIDNLLKFMKKEDIRHFLKQFPSLLDYMLK

SEQ ID NO: 81356 - protein, 976 aa, Aliivibrio salmonicida LFI1238
MRSFKEIQEILGTQPDVKKIYLIGCTGAGKTSLVQHIIGSKKHGFPVTSHRRTTIAPTEYVIQKNIPFKTTIILKNKNDVVFAIEELIQGAILKAKQDKATTEDVVFELEQSPDDRFKLNQMVKGETFVKVANDIITNVLPPISGKDINDETLLSDSFIKDEIKKIVTEILAEIEANFNRACGNGHTLFTNKTLTIDGISDKDEFILKTKKLLSHDFGSISILAEYIRIEGDLLADWLDPNLEFLLIDGEGIGHSLGEKRDTLSSRHYNFFNYCNNIVLIDDANDPFAAGGHGAIEGIFLNGYQEKFKLVFSKTDKLEQTDLNAYFRRSLNNLRNALKKDEIEFNEENKDTYKLNALDDKNINDESRKTIQRLLTNISNSKKKHLTPLEYDFDLLLSKYNSETLVSTIVNRIEEEHWAVVKALSKRLQSADIEYRHLKPISWILIFLMHELNSFLKRDELTSEVFDSQNIIKQNVSHRLVQYIYTNFVKEKEHLWQQAYEKSGFGSHRERKDFIFNQIVRVFLPSKDKEDAFKSFKKDIKSLLLKSGALELKTAVKTEITHVSIKKIFGSKNVEWSLGDDVNVLIGKNGCGKSTLLKLIFACINNDEETLESFRSPYVELTILKTFDNGETQISKISQSKSPSKINAVMVNTFDIKLDRQNNDVVDLDSQLLKLTGELEGFQRGLLQSINKTVGEQIKQRDEAISKLTTATPDDFARLQELSIQINDATTKIYKPLIEFKSIIDEYFSGTNKSIIIDDEEFPLVVEVENNSHHIKVTDLSSGEKQLLIIFLTVILQKNKSFILLMDEPETSLHVEWQATFIDFIKKLNPNVQIIIATHNPLILLNRESDEIGIIEANNDEVQKRTSGTKYLDISSILLDHFKLPSLVGTQMQNDIQRFSALKMREPELNLEEKNQLSDLGELLENSLAGDMIYNKKYFDFLTFLKNNKHISYEQYEASSEQDMADFLSEFGGSFND

SEQ ID NO: 81357 - protein, 249 aa, Aliivibrio salmonicida LFI1238
MRTLYQHADYSVALQNFNSSSPKKWSKFQGVHLAVTNHRCPICECTLKNGQLLMRASSKPGKPPVQVKATVDHYRPQKYYPFLEFEDKNYILMCSECNNIYKGSEFPIFGVQVTRATSVAGLATEQPLIANPVSDNIFDLFKVVARRLTNGRKVLELTPKHTSGYLHEKALATIKLFGIGECEVNAHSNVNIKALRVNLLRSHFSMFEDFINAYENKDVPKMRSEITRKKLDSYGFLKIILANNVTNLT

SEQ ID NO: 81358 - protein, 414 aa, Aliivibrio salmonicida LFI1238
MDKYINRISGLLPNTEKPISIEANGRNIIVTGMNGCGKTLFLNALFDAIKRNVEPSNIQQKNNLQTNIEHYKVLLKRDGIDKVQREQYKDTLAQWETQLDNMFNVNTIELEWDNHDNALDKSLQKSLVVNFFEATRQYSNNRPHQQQQQNTLSKIRSYGKSQQLSQDFSTTFEAYLVALLEAGYLAYALRNDSEQKEKVDLWLGTITNDLQFLFEDESLQLIYNEKEKVFYINQNDKKPYLLSNLSSGYSSILKIYIDLLMKVELQEIQPKELSGIVIIDEIDAHLHVSLQKKILSFLDNSYPNVQFIISTHSPFVLQSVNNAVIYDLSKFEQLEDLSLYSYEAIIKGLLGVTTNSNNLIDIVNELASLTPNIKLNKDRVNELIGKLTLIEDKLDSKSKVVYLMAQQAIDDLGV

SEQ ID NO: 81359 - protein, 221 aa, Aliivibrio salmonicida LFI1238
MFNVTRLAEVPECLSRGNQYNHQQVVSSLKTMFFEKCYLCERNDIQDVEVEHFNPQQAGGGRTDWNNLYYSCSRCNSLKSNTHTKLLDCTDANIDIFRKIRLVMTVAPDDDVLVEATDKNPCEQTQNTVRLLNECYNSTNTALRGVSREALIEQIYEYMIAFMNARNLLKKPSTGRTIKQGAMETIEAMLNVTHPFSAFWRWQYLHDSFLTEHYSNLENGF

SEQ ID NO: 81360 - protein, 191 aa, Acinetobacter oleivorans DR1
MILLLERFFLEFLSSGFKSTLFILLGLIKEIDFRFDKNRIAAKDFEGIILIDEIELHLHPEWQGRIINILKELFPYAQFFIATHSPHVIQSAFAGEVIALERLNNEIVLRDIPNPEYGYQGWTIEEILEDVMGMADLRTKLYKSVKGRFDEALQERNRDKAYEAYCQLDKMLHPNYPLRPVFKLQLDSLGE

SEQ ID NO: 81361 - protein, 240 aa, Acinetobacter oleivorans DR1
MIKLERSKKPAYLTAEKVEELTNKFKATKASVWKHAEIGEALLDSSSFKCAYCECPLQIEDSYMQIEHFKDKDTYPDYVVDWENLLPSCQRCNRKKWTLDVVIEPIVNPYVDYPKNHFFLEEFRLYAKDLKGEITISKLDLNDDKRLVLPRFLASNEIASQLDSIFRNIINLDEARKSLSKLLNSCQADSPYAAFLSTCLHGKKEYQILKELLKSEEINLWDDEMEELDFRSKQLTLDRR

SEQ ID NO: 81362 - protein, 431 aa, Streptomyces coelicolor A3(2)
MVAGRNGAGKTSLLRCIALALAANPETGRALVPSYVMWRSPFDTRTVGKISADLFLDSGDLSDLNLEGLPEKPGTHARVGITLTPPEEIPKTGRKRSLNLGSEWTQVIECDDDDEEVDQAIFPTRNWFTAGYGPFRRLSSEIADPRSTRSQLVTPIDPSSVMDRFSTLFHEDATLGEGVSWLVGLHLRSLENEKGAGRLLQNVLEVLSDGLLPDGYSPVRVSSSGLWVRRQTGKAFPLKEMSDGFRTVTALVLDIIRQLHTFYGTLRMRRSKKGIAIYAPGVILIDEVDAHLHVGWQQRIGGWLKSHFPRIQFIVSTHSPYICQSADIGGLIRLPGLNENYPPQVVGEQLYKRIVYGSGDDAALSDLFGLDTPYGSEAEKLRSKLIEIEGRVLDGSASKAEVRQYREMSETLTSSLSARVDEVSGRLGRRN

SEQ ID NO: 81363 - protein, 249 aa, Streptomyces coelicolor A3(2)
MIPLKRPGISANLEKRLTGKTKTLTDNLADPKNAREAWKSARTIRRDLKVLLASMAAGFARCMYCGDSLGTDIDHFKPIARDPLSAFIWANHFLACSHCNSNKKRDQYPCSPSGECLLVNPSKEDPYEHMNLNLPTGKYQGQTQKGKETIRVFGLSRPDLELGRAHAYVRCESMLRDWSTRVGNGQEEAASAVLKSLMIQPFADVLYAMIKKSEAPGAPNLFEADVLTALRSVRERIETQDVAASFRNP

SEQ ID NO: 81364 - protein, 533 aa, Shewanella sp. ANA-3
MKVDKLHIRSRFKNLENVKVDFDEDHLMTVVVGRNGSGKSNVLEALVAIFRNLDLGEEPPFSYELIYRLGEPRKPNQPSERWLEITIDADPTRGTTAKQYQVQVRDLLEEDASEDMFGKTASGNIVPFSKVKRDKEGKAPYLPNYVFAYYSGPSDRLENHFKKHRTDFYRRLLKDELDLKGDIRPLFYAKPHHSQFVLLAFFLSEQDSAEKAFLREHLGIEGLDSIHFVMRQPGWAKQKGELFWGARGVVRRFLDELIKHTLSPVKVTRQEDTSLTGSNIRNEFFHLFLPDVNALREFAKDLSPDELFKMLESTLLSEIISEVSIRVNVTSSKDPLTFRELSEGEQQLLTVLGLLKFTGGKDSLFLLDEPDTHLNPSWAVKYLKFLRDFVPNHETSHLLMVTHHPLAIAELKKEQVQVMKRNGDQQIVAKMPAENPRGMGINLILRSDMFGLQTTLDDDTNQKLSNRNALAAKDSLSKEEVVRENGFPAENEEQYLARLNSELGQLGFNLATDDPDYLEFLRNKYHANQEAGH

SEQ ID NO: 81365 - protein, 269 aa, Shewanella sp. ANA-3
MRWICKDDIEECLTQAWRTMADQAKAELIAAQTQEERKNILKKVASSNVWRQFYDLLPEKLKKKCWYCEAEDIRADMPVDHFRPKNKVEEDKKHDGYWWLAFDWQNYRCACTFCNSRRVFDETEGGKACRFPLENPDERAIAPEDLDKLRKERPSFLDPFNSQDEKLLWFDNDGLPEPRPLATIEQKTKVENSIEIFHLHEARIVRERNKIRLNIEREVRDIREHRNVKDATDRLRKMVRDTEKLSRAAVVYLRAHRDLPEVKDILNLD

SEQ ID NO: 81366 - protein, 472 aa, Brevundimonas diminuta ATCC 11568
MFDEPIVEFVHDGQQQPDDCAYSVVIGNNGSGKSRLLGNIAGEFVRFHRGASGRGGRSRKIRVLDYAVDGRPSVNAFEDVWAPRPSVDLFPELPSRLIAVALTVVDKFPLEPSGSSDDVLERNLLSDGEDPQFYCYVGMRDRTNRASISALIYRALDGLDRARSGQDNERLSQVFDLLGYAPEIQVKLGLGITPDVAEFARGERDLEKVSDTDTRLLTRLRMASRSKRYSIDWLRRALYPFVSATKAKTISYNITFDGALRSSPFDKEALRLLRRLGALTLKSVIVRRHDGFEHDLRDASSGQITMLTVFLSVAANLQDGSLVLIDEPETSLHPDWQSRYINLMREVFSNFRGCHFVFSTHSPLIVADMPEGASVYSMDRRETVSSAELIGRSPDYVMARAFDVVEPSNLYLRDVLAEALRLVGERQIGSEAFEKQLTELVRLSETMDDGEQVKRIVKDLQDAKAELSPDGG

SEQ ID NO: 81367 - protein, 216 aa, Brevundimonas diminuta ATCC 11568
MAVKAIVFSDAQAGLIKTAFDEALEWGSEELTGLRGEIKRFYLTEQARRCCYCRKQIQTNHGRVWDVEHVIARVLRPDFTFEPENLAVACIDCNSAKSDQNILVVERRTFPRRSDAYSIIHPHYDEWEDHLFFGNALFAPKSEKGARTIVVCKLYRYYNLECGEALLTKDRRYADLAENMLLAKTALEAEPYSLAIGAMVKRAVADELKPNPAEED

SEQ ID NO: 81368 - protein, 456 aa, Parasutterella excrementihominis YIT 11859
MSLSELKAKIERSDNIGWELEIGGQKSLVHEIDEKAYFQSFFVSRLTLFNYKNFSSANGKPFSIHFSPKKNQSPNAILVGINGAGKTNLLTAIARGLSWLDAGISGEQSQGKRLTESDISYNQPSSFTELALSITLPNYSAETRTLILRTTKKGSTETVTNEVASFRSLGRTLRILANEYGHALPVLLYYPANRFVSKGIDSGNIRADENNFSTFPSINWLIKQFKVISNPSSEGYASSTLIIEEVKKLLSKIFETFKNIRLDQSSGEDEIILDWRNDLRTKFKDLSLGQKSFMILFLDILMNIFLKSKENISNQRGVLLIDEIENHLHPSWQRKIFPTLKKAFPNIQIIASTHSPFVIQTVPKSEIYVLDSQYPTDAGHPTSQTEGSQFDSVIANIFDLNERGDQEIVNLLSECEAHIRSNQIEIAKRELEKLKLHFGKDDPYVNFLDILLTSKQ

SEQ ID NO: 81369 - protein, 216 aa, Parasutterella excrementihominis YIT 11859
MRYFAKTQGELFDTLRKQTKKKILRLSWSDFVTKHYNLYSDIKRDLLSSQGEYCAYCEKRIDIENSHIDHYFSRSLFTNLTYDKSNLYLSCMSNGHCGIAKDNLTECKEIDIKETIKPDQLINGKYIENFLFYTREGEIKVLPLDELSPRDFIKLENTISKLNLNEPSLVNERKNLLSTLEKIYKAQGRPSNEMIQRIKNKYGIPTLIEQYLKEKI

SEQ ID NO: 81370 - protein, 429 aa, Selenomonas sputigena ATCC 35185; identical to SEQ ID NO: 81154

SEQ ID NO: 81371 - protein, 212 aa, Selenomonas sputigena ATCC 35185; identical to SEQ ID NO: 81155

SEQ ID NO: 81372 - protein, 457 aa, Eubacterium rectale DSM 17629
MCEFKIQELGLRNYRGFDNKKFVLNPRMNVFAGKNGSGKTSVLEAANVMLGAYLAAYKTYVPSRFVYNIKSTDARRKTLISDDSMILTTGSIAQYPCEVSCKAQWGGNNTENNIEFRRVILKEDARTKFGGSNPMQPAVIEWENKISNANHSDSKVVLPLVLYLSTARLFKDGNKKTNIKGVFSRTDAYNHCLDSQHGLEIAFRYIDTLKAVSLEENGGKLFPAYEAILKAVNDAFCDELKPGEEIISSTKYEDDIIALKTADGTILPFQLLSDGYRNVIKMVLDIATRMCILNPYLKGDALKMTPGIVIIDEIDLSLHPTWQKRIIGILKEQFPRIQFICATHSPFIIQSLDEGELITLDQPLDSEYSGEGLEDIAEDVMGVELPQYSERKRKIYEAASKYYTALKEAKTQDDIARLGKELADLEAEYSDNPAYMAWVHQKYTEQAWKVKKNETSR

SEQ ID NO: 81373 - protein, 235 aa, Eubacterium rectale DSM 17629
MRPVDKGESPYNTIKKYQDALPYLGEKIGYYCSYCEFPIKHVPEVEHVVSKSKGGDITDWKNLLLGCKYCNARKSANTTPENDDDFLWPDVNNTAIAYLYENGYPKVNEQLLMELDPTGELKEKATNTYELVKLGNVPDLSKGDKDRRLIERNTAYYKAKESLDGWLHMKDAPDSYREDLKKQIIMTALGDGFYSVWMTVFANEPQILLALIDGFVGTNKNCYDEEGNVKKNISV

SEQ ID NO: 81374 - protein, 457 aa, Eubacterium rectale M104/1; identical to SEQ ID NO: 81372

SEQ ID NO: 81375 - protein, 114 aa, Eubacterium rectale M104/1
MRPVDKGESPYNTIKKYQDALPYLGEKIGYYCSYCEFPIKHVPEVEHVVSKSKGGDITDWMNLLLGCKYCNARKSANTTPENDDDFLWPDVNNTAIAYTYENGYPKVNEQLLMD

SEQ ID NO: 81376 - protein, 411 aa, Bacteroides xylanisolvens XB1A
MGNFITSIKVNHIFHLENFCIPISENEKKHLIITGKNGSGKTILLNAIVEHLSKVCNDKMLSFLDFKKYLESNQAWLQQAETTGDSKSIASGQNNVEYYKNRIEEFYGKVELSFHDIYSIPKDFLSQDFIIAYYADERKSLFVEPKNPVKPDLKMKTDLKHNKVDQFLNFMVDCKVQEALARNEGKTEDADYIRQWFVGFRNILRQIFDDTTLELDFNYKDYSFLIQTRGKSFKFTELSAGYSAALDIVADLILKMQSQNNVVRAYEKEGIVLIDEIETHLHLELQRVILPILTTIFPNIQFVVTTHSPFILNSLENAIAFDLEHREPIEDLTDYSYEALAEGYFGVRTDSSEIQMRLQRMEELIRSDRLSISDKSELEMYLQDFDKIPEAVAPAVKAKYYDLKREWQNKN

SEQ ID NO: 81377 - protein, 213 aa, Bacteroides xylanisolvens XB1A
MIRICKNADKPQTLDKSYNTDEVCKQLLMDQNDKCYLCERRLTTDYQVEHFKSQANNGDLKQTWENLFVACGYCNNKKSNKYDDILDPTQYDIETIIEHSNDFVNQKAIFDSDNRTSEVLSTIKLLNLLFNGKLSYRNCREQRFYDEFIQKMNFFSYVVDEYMSGEKEYYYPVIKEQLDIRSEYLGFKYAIIHSNDLLKHDFGDMTIWNKKGE

SEQ ID NO: 81378 - protein, 139 aa, Arthrospira platensis NIES-39
MIDEVDLHLHPSWQRSFCDRLIDTFPNCQFVLTTHSPLIISDCQNILVYTLNNGELQQLPSQYGQDANTVLLDVMDTSIRNETIDTELNNLLDAIQNANLTEAEQLLSQLTEKLHANHLELMKAKLLINKQKSRHAKDS

SEQ ID NO: 81379 - protein, 209 aa, Arthrospira platensis NIES-39
MRKIHKGSEPPNLTAWKKKNPHRRYSQLPEDMRRVIREYALKEKFYICAYCCQRIEDINNCHNEHIEAQNLNPNRTLDFSNIVASCNTSNQCGKAHESKPLPLTPLMEECETELRFKISGRVEGLSDRAKDTIQVLNLGDDEKNNRALIEKRKQLSDTLLWKSGIDPNQGLEDEELLEMLIRDLSQPNEDKMDSFAPVLINILQNWLSS

SEQ ID NO: 81380 - protein, 261 aa, Coprococcus sp. ART55/1
MAAESNEKLMLNWFHTQTLKCLQERQRTGVIEKSLLLKTVETAICKCFERISGAKNASIIFDLDTHRLVLDFESADGILQKFAMDEMSDGYKNTLSMIGDIAYRMAVLNPMLGEKVLEETPGVILIDEIDLHLHPQWQQTIISDLISIFPKIQFIVSSHAPAVINSVSREQIRILDNGEIYIPAAQTYGRDANSILREVMKVSERPMRITELLKAFYVFMDNKQYDEADKVLSEIEDVVGTTDPDIAAARTALDLEKILGE

SEQ ID NO: 81381 - protein, 225 aa, Coprococcus sp. ART55/1
MIVVKRGKEPNSLLQFRKQYPEADYEVDMPTNVLQDVRTQLWEEQKHLCAYCMKKIASPNVERIEHCRPRHPHGEIEHDKKSTLDFKWMLGVCYGNSLTKGVKHDDTTCDAHRGNTELAVNPFDEQSIRKIKYRSDGSIYSDDEEINKDVTETLNLNCEAVSLPATRKKVLQEEQRRIMRKCKGKSQEVFIRELERTYESLVRERNLTPYCGIIISWLENKLKIS

SEQ ID NO: 81382 - protein, 307 aa, Photobacterium leiognathi subsp. mandapamensis svers.1.1.
MITNLDEFVVNYQELKALLTKFEAMRKSEITKPTSVTSINSLKEQDKQFIQQSHRKDNTSTLFELFLVTNKANQAFSESEKIKNDPIEAEKIEKWFSKLESDLRNLFEDKDLKLVFQSDSFTFEIHQPYKAPYTFQTLSSSFSSIMAIYADLITKVSLRSIAPDELTGIVLIDEIDAHLHVSLQKKILSFFTQAFPKVQFIVTTHSPFVVSSIDDAVIYDLSKQIQVTDLSMYSYESVLEGLFGVLPISNLLQEHIENIAKLLDKPSINTTEIQALLDKIPQDETSLDSESLYYVNSAKLAINKAKR

SEQ ID NO: 81383 - protein, 221 aa, Photobacterium leiognathi subsp. mandapamensis svers.1.1.
MFNVVRNEPAPASLTGKSKYDSKDVWSALEKVFHKKCYICETSSPLDINVEHFVPHEGNTELMFDWNNLYFSCGRCNNIKLAKYDNLLDCCDPNIDVVRAIKHKPPMTPFAKKLQITAQNNDNKTILTAELLDRVFNSEHTPNKAVTASYLRRNVFNQYNLLLTQLNKYYDPLTLPDEKNRAVERIKLLLVPSAPYSAFISWCIIEDEELAPILHDYIGLT

SEQ ID NO: 81384 - protein, 419 aa, Porphyromonas asaccharolytica DSM 20707
MQRYIQSIHINKVRHLHNLDIYIPDDEHPHLLITGKNGSGKTSLLEAIRDHIALLQKGQSLDFLKYDEQIQYYAQQLSSCTDPLRKAELEQKLAFWQERLDELYGAVRVEFEDPTQIVFHSSDKLFICAMYAASREVRMLEPLNPTKPTFRDQWLINQGASDQFLNYLSDLKIQEALARNEHQTEDADRINDWFVSFEALLGKIFGDSGLKLSFNYKDYSFHIETEGKSFKFNELSDGFAAVIDIISDLILKMSSISDRTMQLYDIPGIVLIDEVETHLHLSLQRQVMPLLTKVFPNIQFIVTTHSPFVLNSIASASVYDLEHQKVLTNLSDYSYEALAEGYFEVSTRSSYLEQQLNRLTELLEQADLDIAERFEVKELIKDLDKVSESVSPKIAGEYEELKIKWADKLIEIRDYDSNL

SEQ ID NO: 81385 - protein, 217 aa, Porphyromonas asaccharolytica DSM 20707
MIQIYKSSTSPKSLDTGTQYNGQDVQEQLLIDQNSKCYICEKKVVTDYHIDHLLSQAQHSDKTTDWSNLLLTCSYCNQKKSNAYDQIINPLGHPIETFIKQKVDYQRNVAIFEGPDDREIVGIDETIKLLSSVFNGKTPARQVREEKFYEYFFHRITLFQKACNQFLANKTEQHKRIVCELLKADQEFLGFKYWIIQSNQTLQKTFLSFCQWNRDEI

SEQ ID NO: 81386 - protein, 408 aa, Haliscomenobacter hydrossis DSM 1100
MEDVFVTELKLKKVRHLENLSISLSKETPKHLILTGKNGSGKTSVLNEIKAFFQQIDGKTITNLKSWKKYRSSLTDKQFYSNYDYSMESNKAFNEIKEIISSNNRSQSGIELIFNAKNFIGPFFHENFIFAFFEAKRLSDFRQPSGPKKLDIKDHYGIDEKANIEFVQHLINLRYNYLEAKESGRQKIANNINQWVEGFEASLKEIFSDESLKLVIDSKNFKYDIITKGREVFDLKTLSDGFSAIINIVTELIMRMEKKHSNVYDAQGLVLIDEIETHLHIDLQKKILPFLTSFFPKIQFIVTTHSPFVLTSLADAIIYDLESQEPIEDLSGYSVEAIIEGYFGSDKYSEALKDKVDEYEQLAKKDELSFSEEKRFKSLKKYFDDLSDVFAEELKLKIQQIRMLKPVK

SEQ ID NO: 81387 - protein, 219 aa, Haliscomenobacter hydrossis DSM 1100
MINVEKSQPAPECLALEKLKKDGDCGCKDVRLRLKHDFFNKCYICEEKAPSSIAIEHFIAHEGDLNLKFDWNNLFFACTHCNNIKHNSFNDILNCTDFSEIITECLEFHFTPFPEEKTAIIPIKSSPKILRTAEFLMKIYNGKTTNQIIEADNIRSKLRNEISHFLDAIEDYQHSLQEKYRLKIKQLLSPESAFTAFKIWIIKSRPDYMIQFGDLLPSF

SEQ ID NO: 81388 - protein, 432 aa, Haliscomenobacter hydrossis DSM 1100
MSILRITELEMHQIGPFGDLTLTFPEKPAGMEDKAEIHILTGENGTGKSTVLEAMAVLFSQEAGKYSNKFRKDNNVSLNLTLSEGDTHFLANLAESTIFLKDKGGQVLRKNQLIAKKYTLPYIDYKQEPFGIAFFAYSGHRRFDHASIIGIKEIDSHPFEHALDFRQSIQPENILQWIANNIAGQALAQVSGNLAETEQLRQIMAKLESTISQIIQKSIRFQVKTKPYNVTLAVDQEELDFNQLPDGLKSIISWIADLLMRMDRVKWENDTPVFDRNFILFLDEIEVHMHPAWQRKVLPVVQRLFPNAQIFISTHSPFVVGSVDGAWIHKLVKPNGDSKLAEGYPILSEDEKSYQYWLEEVFGIHEKYGLDAQDKYERRRELIRKSELNAVEQEELIQLDEEFGTLVPEDSSLGQRIVEHLKRLKKEEKTAF

SEQ ID NO: 81389 - protein, 248 aa, Haliscomenobacter hydrossis DSM 1100
MIKIDKSTISTPKILDQKNPQSKGSLATQALNADHEKGVRTFTFDSAIYGHASVKEALISVQNKKCCFCESFVRHIAHGDVEHFRPKGGYQIDPDASLITPGYYWLAYDFENLYFSCQICNQKYKRNFFPLTDDSKRIKSHHHFTNLHLEEPLIIDPANDNPEDHIYFDQEIPKAKDKKGELTILRLGLDRDDLNEYRLKWLQLIRDIARHAAKGDLISLNLLQEAAEPQSELSLMVRSNFPFLSKVE

SEQ ID NO: 81390 - protein, 420 aa, Haliscomenobacter hydrossis DSM 1100
MRIRELTISNFRGFGETVKFPFSEHFTVIAGVNGRGKTAILDGLVLLFSYLLPQISEAKKQTKKVSETDVHLSASEANISVKTNCAGIPLDYFVTIYGVDRKVVPQKLYAEVSKTIKNAYGDPSRADDQAPLVVYYTTDRAGYRFPKALPQIVTSGQAMAYNGALFNRMVDYKDFMSRYRVALTLTNDEKIKNSSFLGANAVKAINKAIEYFLDGFAELQVQENPLKLWVSKHGEKLDLRQLSDGERSLIALICDLSRRLALANPALKNPLEGAGVVLIDELELHLHPKWQREIRDKLRKTFPNIQFITTTHSPFIIQSLNEGELINLDPKELDEEYSDESIEDITEFVMGVKMPQKSKRYIEMMEAAEAYFTLLHNVGDKSTIEVEHAKQKLNELSIPFSDDPAFQAFLNIERKLKLEE

SEQ ID NO: 81391 - protein, 229 aa, Haliscomenobacter hydrossis DSM 1100
MRPVTKGNAPNIYANYQDAASDLQSCIGEFCSYCERHIETHLAVEHIQAKTHVPALRNSWINFLLACVNCNSKKGRKKIILDNYLWPDIDNTLMAFEYSTGGLVKVNTTVPASIQVLAMSTIKLVGLDNEPGNPDIKSRPTKKDRRWLRRQQVWQLAEECKNKLIANNTIEVRELIVSNAVGRGMFSIWWTVFNGDQDMRERLRVAFIGTAADCFDHNENLINRVGGKI

SEQ ID NO: 81392 - protein, 448 aa, Haliscomenobacter hydrossis DSM 1100
MEQVFSVEARQYRFLVDRIKLASFRGFQNEVEIHFEPDLTVFIAQNGGGKTTVLDALYEHLQLLEKNTFQPGKYTSILTGKDVNVNTDTFSELNADFILDFMDYELLEEPVSIEENDEDQGGALLEYRGIPIHTSFYLNKVAGIDGISIIDSEQSLSQIRAFNNLKRELCNFPVFKYYQPGERSGKNAKQDFKSITDWIERCQKMAYQAKEDSKFESRLKWLNEAISTILKDEEYEYSDFKVKYTERGDILELTKQQRFSPDKYTFSIDQLSSGERALIGIVADLAIELIEKNPNFSKNPIKEGFGVVLIDEVDVHLHPEWQLTVAQKLCAIFPNVQFVVTSHSPLVLSSLTTRQVRQITDYQIFGVDNVYGRDASYIIKVIMEVANGSLADEVKKIGDEIVQDRLSEAEQKLKALITDINSKGEDGENHPDVLRLSNLMTRKKILSR

SEQ ID NO: 81393 - protein, 229 aa, Haliscomenobacter hydrossis DSM 1100
MKYIQKNPTAPVYLTQWIQQNQKKLTGKGGDEQWKFFKGVVKKRLQKQLLKEQGHICAYCNQRIHVSHPEDDQQMRIDHLEPKSHPQSLDKVFAYSNLVGSCFGNEREPQPKSLHCDPRKANLLLHRDLFPTDPLCEDQIEVVLRPDGAQLFGKRGDVDDSVQNVLNLNHPKLQELRKNALEAYNSLENNITPSEALALIEAYRDKDEDENFRPFSGIIITYLIQEYIA

SEQ ID NO: 81394 - protein, 571 aa, Dysgonomonas gadei ATCC BAA-286
MLNVNIVHNEVYSLLMKHRTNNPNFFFTLRRSNRDGKLDKGYWFYGNEWYLAVSFWSGTDWKNKTPNISFVVSLDSGQTSLEINTSDSDIKRAFITAYLVDRLELKADGRRYKKLYKGGHLESLESFLKTDKIIIDNIIDGYSLSFFEKSDKGIYFIKPTDFMEQLEKIGKYKNEYIRGNNKPIKLNSVKIENYGPIRKIEIQDIPFSSQWIFLTGENGTGKTSILRAITASICNRKINIDESCYGDFRINLDLFTSSINKNAYNRIQNRISEQINIPLTSGFAGYGQSRLKTNNSGLSGDTLNSISVDDLTSSIFDENSYLMDLQYQFAIWKNDKINIDKYEKRIIYITEILIDILPNLYDINFNDMIGDIPATTYIERDHDGGEFRKVTFNKLASGLKSMIAMIGDILIRLYNQQSDIDDPSEFTGIVLIDEIDIHLHPKLQKQIIQQLTRTFPKIQFIATTHSPIPFLGAPKNSQIFRVERTSEEGVRIKRLDEKIELGDLLPNTILTSPIFGLDDIIPESHDQKSFVRTETIYEQIEFNDKLKIIIDNFITDAKEQELINLFKSRRK

SEQ ID NO: 81395 - protein, 307 aa, Dysgonomonas gadei ATCC BAA-286
MRFVIKKDEDKTAKLASNETLQVLEKIVKTKNRGLITDTIYRDSYDTEDGKCSHVEDKLAIAYKNKCAYCERICKADIEHYRPKKGVTEDNTHLGYYWLCYEWTNLIPSCITCNREGAKHNKFPILGKRVISPPLLPNGSLNLTLCKAGTTPLRDETPYLLHPEVDDPVDYFVFELDVEGKGIRIKGIDIQGRGAETIRICLLNRNELKLDRVKSVIDDFKESIHSLFVLLERGDIDAPELKKDVIHQLRLLKNHSLNDEKTYTLLRKYIVASSTNFEKIVIPFLDSKIRRIVLEAFKSIEPLKPIL

SEQ ID NO: 81396 - protein, 576 aa, Acidithiobacillus ferrivorans SS3
MRLNKLTIGSAKDSQTHQFKNLKNVTIDFDQDHWVTVVIGWNGTGKSNVLEALAIIFRDLITKKRTPAFAFQLLYRMGIGENLRHIHIDADPDREKEPYTIHVATDAQACGEGTLTPFIEGAELASAPRGKAIKLTAFLKADVEYLPRYVFSYYSGESPRMHEVFRPYLESYDSKLRNGEDPGLKRLFYAMPVHSQFVLLAFLIQQSDVVRAFLDDHLGLDPNEGIESVLFVLRQPPWKSKAADGDPRFWNARGVVQHFLSRLYDIALAPIEISRRVSTSIWNKETLQFKYLYVKDIAALRRLVGSQVPAQFFRDLESTYVSELVEEVRIRVRLKKNDGSVTFRELSEGEQQLLTVLGLLRFTAEDESLFLLDEPDTHLNPRWSVDYISYLKQFIASGTKQEETSHILLTTHNPLAIAELDRGQVQILRMIKQDGQRQIVACYPEMAPRGMGYAAIVTSDMFGIASSLDQPTQELLETQRAFAAKERLTPHEQCELDGINAQLDRLGFRFFHPDDEYSRYLRLRNDLLVQQFETAQPTELAKQVVQMPRTDREALAKRLIADLLAEKPNPPEGAAS

SEQ ID NO: 81397 - protein, 270 aa, Acidithiobacillus ferrivorans SS3
MRYVDRSKLVKPTDWARRAEAATQAVASGEDPNDHGGVWRELKDELAKLLHDKCWYCESPVDRSDNAVDHFRPKNRVSDAANPHTGYRWLAFDASNFRYACTYCNSRRKDIEGGTAGGKADCFPLVNEAQRVYAVGSVAAEQPLLLDPCEMSDWRLLGCHQENGQPCAAGTDDAAKRRADVSIEIYHLHYEPTCKRRHTAAVQLMADVDEGKRLFELVTHDPGREADFKSVAARLRRAIDRDSPYSGDMHFLLRGQRSDAHPWIQELLEA

SEQ ID NO: 81398 - protein, 584 aa, Vibrio anguillarum 775
MRLASFTIGSDREGERQRFKNLKNVTIDFEEQEWITLVIGWNGTGKSNVLEALAVLFRDLIMGKNDNGEKDKPSFSYTLRYFCHHKEIEISADPDRTKDAYLVGYRDLGEKLENTTLQVDFFSELTDDSTLVGLKFNEFKKRQDEFLPKYVFGYYSGHSDRLQSVFRPYLQQYDKKLRNSKSEDPGLRRLFYALPVHSQFVLLAFVLNQDDLVRHFLDTQLGLETDENAESIDSVLLELNEPSWNLNKGKDPKGTYGACKDKPDIFWGAEGVVRDFLNRVHKVATAPIKISRKDDATLWNKKGREYLYMFIKDVTRLTELVGDQEPREFFRDLESTYVSELISEVRIRVKLKKNDGSVTFRELSEGEQQLLTVLGLLRFTAEEESLFLLDEPDTHLNPKWSVDYIDYLNKFVNSGSKGENNSHIVLTTHNPIAIAELTRDQVQILSRDDETRTIESHKPHYDPQGMGYAGIITSDMFGLGSSLDKRTQKRLETYRALASIENKTKFEALRFQVISEWLDNDRFSMSQRDDDYERYIKIRNSLLKEQSGMDDYQQLVNFALSLSQEKRDEIAKQAITKLLQEDQR

SEQ ID NO: 81399 - protein, 291 aa, Vibrio anguillarum 775
MRFVDNAFIDLPDNWEDRAETATDALLAGEIVADDRSAIWKDLKESLETLSNGRCWYCETNIPRTDNAVDHYRPKGKVQGVALADEGKSLTRYDIVPEHSGYKWAAFKAENFRFSCQHCNEYRKDLQGTAGGKWNYFPLVNEPQRAYEELDEDNEVPALLDPCKRLDWRLLSYDKSGMPFSRFEEGSPEDTKVKLSIRLYHLDQKRLNEGRIAQWKLFKPWLDEAKKWYLKKLRQDQGADACFEKELRKIGQWFHPKSKNTYLGFLVYQLEQDKDKDVLHPWISELIRTVG

SEQ ID NO: 81400 - protein, 416 aa, Vibrio anguillarum 775
MENYNSIQLIDTIIPNSDKHVTISLEGKNLIITGGNGCGKTRLLKQIHENISAQVEQMNHKTADQIREDIRNREAWMKNSSPTNSDYHRYKQQISELELKLADIDKVKVILGKVETYCTEFNEKKALLRLFPAVREQSLAHTGSYDSLARLKKEDERNSLSQDSSSQFERYLVAFYNYGSHLLARVDDKAQGAKVDAWFDNVTSQLQYLFEDETLKLDYNAEEQAFYIKQDGKDPYKFDKLSSGYQSILSIYADLLMKVELKEVSAQELSGVVFIDEIDAHLHVSLQRKIFSFFDQAFPKVQFIVTTHSPFVVQSVNNSVIYDLSANEQLEDLSMYSYESILKGLLGVESKSSILDGLIEELATQIQVKKPDWDTIIDLIRRIKPNERNLDTHSSNVLKQAEIQLMDERNKNGTEE

SEQ ID NO: 81401 - protein, 229 aa, Vibrio anguillarum 775
MFKVIRPLEEPPELKTKGYNCDEVVHALWKICHRKCYLCETLNPDAPEIEHKEPHENKDEDLKVDWNNLFYSCRRCNSIKGTKHKNILDVAQVDPITKIIWNMAPSNYSDVTFEKVDKKCKDKAVDDTIKLLERCFNETGTAFRGITREALIEKVEIKLQHFLKQAYKIRHEDSDEDDIEKARKQLKVMLQNEYPYSAFWRWRFLRDPVLMRGHSDLLPEYVTLSPCKL

SEQ ID NO: 81402 - protein, 545 aa, Shewanella sp. HN-41
MQLRYLAIPQFRNLRNLEVSFASELEPVSGTPADATDSTPAKRIRSHALIGQNGTGKSNLIEALITLFRDVDLDREAAFDYTLEYEIRGHIVRIQADTAKQKRPYVWVDGKSESQGFLVKHAREYLPSHVFAYYSGKNERIEALFRTHQERYKQLLRQDDDDLMRRLFYCRGGHSQLVLLACLLSDDPVFKKLLSNLNIEAIESALFVLKKPYSARDLDEKDIELGDPRFWFRRGTVVNGFLDKLWQIAWAPVQETRLAAIDFRRRPEKQELLYLFVPDNKRLKKLGEEVGTPERFFRYVEAAYIGDLLEEVRITVKKSKGHGGDVEFKQLSEGELQMLTVLGLMRITREDHCLFLLDEPDTHLNPIWKLRYFDDIEGVLSSEKDSLVQGESQILITTHDPMMVGSLKREQVHILRKHGDRSVIESPDEHPQGMGVTGLLKSELFGLSSTLDIETERRLFRRNELFVKSPRTPEEDAELSRLSAELADLGFSTADFRDPDYALFVRKMAQHRKFRKPTLTPEEQAEQDRIADDIISEILREEAGE

SEQ ID NO: 81403 - protein, 283 aa, Shewanella sp. HN-41
MIFIDLENKLPTDTDLPANVRWTQADWDAWLAESARLVNELAKLDAAGSVKERNSLIDKHDNHWGKLKPWLLTLSGGKCWFTEARDLASHLTVEHFRPKKAARNVKGQERDGYWWLAFDYMNFRIAGTVPNCKKGVWFPLRYGSPVSTFTRRCEGDENQHFLDPTNAYDVTLLAFDEEGKAVPAPGIPRWEYVRVKRTVERLKLTEHQVLSEERRKVWQKTSKLINKYHNALAEARNSPAARERVRSTAREIACLTKPESELSAVAKWCIWLRNDPQLSRLVG

SEQ ID NO: 81404 - protein, 544 aa, Rheinheimera sp. A13L
MKLDKLWISEFKNLKNIEIDFDEDELVTVVIGWNGAGKSNVIEALVIIFRELDLHKSPTFSYRLEYLCRGNRITVEALATEIKKEQYNIKVVSKEGKLVTDKAGEFFDDEQRRFLPSNVFGYYSGPSDRLATHFYDHQRIFRDQLLYPNKYGLDEKTLPLRPLFYAQKVHSNFVLLAFFLSSDEKVTKFLKEKLFIEGIESVLFVLNKPDWTSKEGDSRFWNANGVVMPFLDRLFSASLAPMRKTIKVPHPMKKSPENVDALFLYLKDLSALKQVGKDTSDKDFFKLLESIYFSNLIFEVRIRVKIKNKNGSDDSLTFRELSEGEQQLLTVLGLLRFTRDDESLFLLDEPDTHLNPAWSMEYINFLQEVAGFNLNTEKGNKEGVDNSHIVLATHDPIVISTLKKGQIQIMKRDENDLKVFATPPLYEPKGMGFSGILMSDMFGLRSDLDPQTLESLDEHAILLAKIERSPAEETRYKELQTELDKAGFLEAYSDPYFSAFVKAWGRKHSDKLFTQTFLSDGDRQELSVMTDEILAELDAEEAGE

SEQ ID NO: 81405 - protein, 307 aa, Rheinheimera sp. A13L
MRYIDIDEVELELPDDWDDKVASAWAFVNRKVAEAEVATSAKGVQEGWDAQRLATELLNAAGTALKTAIASKSDVWGSLSEVLAKQSNGKCWYCETNELRSDNPIDHFRPKGRVAECSDHPGYWWLAFDWRNFRFACTYCNSRRVEVDTAGGKQDHFPVFTPPDWNKTPQDNNQERPKLLDPTDPDDCELLAFNINGLATPNCSDQTSDNYKKAIESIERFHLNHGPTKKARMAIRQKINQLVANTNDLLQQGVAAHSQQIKSNKKELMKLIRPSCTQTKFNTAARLYLNEFAALPWVKSMLDREPQ

SEQ ID NO: 81406 - protein, 411 aa, Bacteroides sp. 1_1_30; identical to SEQ ID NO: 81376

SEQ ID NO: 81407 - protein, 213 aa, Bacteroides sp. 1_1_30; identical to SEQ ID NO: 81377

SEQ ID NO: 81408 - protein, 413 aa, Fusobacterium nucleatum subsp. animalis 21_1A
MKIEKVHIKNIKGIKDLELSFKKNNKILDVIVLAGVNGSGKTTILEAIKDFFNNKNVNYDEPKKSNVNLNIFFEEFEKKKIKEAEKSSNNNKRPLWDFFSALQNYEIYIKRSDKHYHTHIAKKFDIPPKIIYVPAENKFEEIQTYSTTLSKEYEFINTINSNVIRDIPSYIATRRNYLATIEEDLTMKEVTNKVVNEINGIFSILELDVKLKGFSKDEKTLPIFENSAGEEFDINNLSSGEKQLFLRTLSIKMLEPKNSIILIDEPELSLHPKWQQRIIEVYKKIGENNQIIVATHSPHILGSVSNENIFILYRNENGKIEAKTGDELYSSYGQPVDRVLKDIMELKSLRTPKIEKDLEELRKLVDENKYETDEFIEKYNKLLKILGNTDEDLFLIDMDIKMKQKVNSNVESK

SEQ ID NO: 81409 - protein, 196 aa, Fusobacterium nucleatum subsp. animalis 21_1A
MLKVNKKKSEPEEFTKYKSKHKIINWDSFTPEIKQVLKQYLLEEQENSCCPYCEIEIHLEDSHIEHIMPKDKFPKLLAEYNNFIACCLEKKICGNSKASKWSELFINPVIEDPEDYFEYDIKTGKIIPIFKEGNRHEKAKYTIDLLNLNDNRLCEIRKKYIFEFLSYSKNNKYSLNNFPVKFPSLRRYLEGAVANL

SEQ ID NO: 81410 - protein, 414 aa, Fusobacterium nucleatum subsp. animalis 11_3_2
MKIEKVHIKNVKGIKNLELSFKKDNKILDLIVLAGVNGSGKTTILEAIKDFFNNKYLNFNKPEKSNVNLDIFFEDFEKKQIEEAEKSSIDNYEHKLQDFFSALQSYEYNRKNNGEYYSYLIAKFFENPPKIIYVPAENKFEEIQTYSTTLSKEYKFINTINSNVIRDIPSYIATRRNYLATIEEDLTMKEITNKVVNEINGIFDILELDVKLKGFSKNEKTMPVFENSAGEEFDINDLSSGEKQLFLRTLSIKMLEPKNSIILIDEPELSLHPKWQQRIIEVYKKIGENNQIIVATHSPHILGSVSNENIFILYRNENGKIEAKTGDELYSSYGQPVDRVLKDIMGLKSVRTPKIDRDIQELRKFVDENKYETDEFIEKYNKLLKILGNTDEDLFLIDMDIKMKQKVNSNVESK

SEQ ID NO: 81411 - protein, 196 aa, Fusobacterium nucleatum subsp. animalis 11_3_2
MLKVNKKKSEPEEFTKYKSKHKIINWDSFTPEIKQVLKQYLLEEQENSCCPYCEIEIHLEDSHIEHIMPKDKFPKLLADYNNFIACCLEKKICGDSKASKWSELFINPVIEDPEDYFEYDIKTGKIIPIFKEGNRREKAKYTIDLLNLNDNRLCEIRKKYIFEFLSYSKNNKYSLNNFPVKFPSLRRYLEGAVANL

SEQ ID NO: 81412 - protein, 454 aa, Runella slithyformis DSM 19594
MQASVVNCITLEKSANMEEIFVTKLRINKVRHLENLEIPLSETERKHLILTGKNGSGKTSVLEGINTFLNWILNSQTQETEVEENVQQYIFYKNEIKQREARMAKGYNESYGHYQWKGDAVNVQDMQSKIVRYQTFVESCTPVQLLSNVDLYSEGNFQKVNWRFGDFILKYFPSKRFFQPKESLGPQKIELKEQYNIKENASENFVRQLVNLRLDLLDAKDTGKTWEVEKVENWFKQFETTLRKIFDDESLELVFDRSSFNYNIVTKGKGLFNLNQLSDGYAAFLSIVSELMMRMDKKFEMIRPYDLQGIVLIDEVETHLHIDLQKKILPFLTSFFPKIQFIVTTHSPFVLSSIDNAVIYDLEKQERVEDLSAYSYTNIVKGYFGTDEYSNEIKEKVVDYERLLNRIKGSTANLSIEEKEQFYELKKYFEELPKSLSPELQLKIQQLELAQLAQ

SEQ ID NO: 81413 - protein, 141 aa, Runella slithyformis DSM 19594
MINILKSQPAPECLASESQKVSGDYKCGDVLHRIKQDFKNKCYICETKGPTTINVEHFLPHRGDVQRKFDWNNLFYVCGHCNNTKLAKSQYDNILDCTNSDNRVVDLIEHIFGPLKSDSLDFKAQIQSQIVLNTVALLEEV

SEQ ID NO: 81414 - protein, 456 aa, Runella slithyformis DSM 19594
MYIKKVIINNIRSISDFEMTFPEPAGWHVVIGDNGAGKSTVVKSIALALLDITDINAAGQDWEEWLKNNGVPTGSIELFINPYESNKIVQNKITFQQKVTFQEDGYIFDDINITIKEVIFRGRKTLDSVPSIPTTTFPHPTPSIRVEEIKQKREYWFSAGYGPFRRFTGGSQDKEKIYKTNPNLGSHLSIFGEDVALPEALNFLRDLYIEELEANKNERNGESGVKTKPKSTLENLMKFINEAGLLPHGAAIHGVALKEIYFKDGYGNIVTSLQMSDGYRSILSMTFELIRQLIRIYGNQLVFENINNGKNIIDLPGVVLIDEIDAHLHPTWQTRIGEWFTKYFPKIQFIVTTHSPLVCRACEKGSIWRLASPGSDTESGEVTGLERERLIYGNILDAYGTELFGQSPVRSDKSEEKLERLGHLNMLSAFGKITEEEDKERLELQKILSTDDPTGF

SEQ ID NO: 81415 - protein, 289 aa, Runella slithyformis DSM 19594
MIQLASNDLDKDVQQELDKLQNKVNKETTFAKKVKKARSLWNSKGGIKGKQAFNKITTQLYDLCVYEGICNYCEQSEANDIEHIYPKSFFPDKTFLWENYLLACKQCNSGFKLDKCHVLGGDNELIIVNRGTEPLSKIGAFINPRIENPNDFMILNLKTFKFETLPGLSKREINKAKSTLEILELNKRDTLIEARKSAGRHYYEMLERLVRILDAETKDELQDLLTPYDDRFDFSQSLEILKEEINTSYKKYIARYQHPSVWYSIKMIESKTNLRWRKIFDVIPDALTW

SEQ ID NO: 81416 - protein, 440 aa, Runella slithyformis DSM 19594
MDNFRIESLEINEIGPFKYLKIDFPVKIDPDKAEIHILTGENGTGKSTVLEALIYPVNSDITRQFIYPENMYNVQNGIVNKLWNQKIDSRIQIKFSTVNSFSAYWSEGKWMIDHLRAYAILEYLNKANRLNINELNIAFFAYSGYRKAEKTGITGIQEIEESPIANAHNFHLSISPQNLIQWLVNIQTRELIAKGKGDNQKAKQYRSTIEIIENALGEIIESEVKFDLEEDPLGVKINVDGQSLNFDQLPDGLKSMVSWMGDLLMRMDRLKWVNNTPVLERNFILLLDEIEVHLHPAWQRKILPVVQKLFKNAQIFISTHSPFVVGSVDGAWVHRFVKKDGYSVLAGEPILSEDAKSYDYILEEIFGIKERFGVEVERKLSEFQQLKKEILKGSETVDTAYFRKLIGELAGQSVELESIIGMEIRQLKRLTNQDFSLTEA

SEQ ID NO: 81417 - protein, 206 aa, Runella slithyformis DSM 19594
MRKFARTESPEVLTKVIGEKKVPRWQSYGERYAQNRENNPSFEFQWPQIEGKKLNQHLLPDLMAMTDDHCSYCDDYPLKRGDDTIDHFHPKTHSAFYTEVCKWENLYISCKHCQDSKGSQFEEQLLRPDEIEFHFNRYFIYDYIEHTISPNPLASIDEQYQAKRTIEVFDLKHKSLCIRRRHAFQRYNSDANPVLSDYNFRFMFDE

SEQ ID NO: 81418 - protein, 307 aa, Myxococcus fulvus HW-1
MLGSPVWECKPGWFSAAFGPFRRFTGGNEDYEKLFDAYPRLARHLSVFDESVALTEGLKWLQRLQFKKLEKDPDGALLEPLTRFINQPEFLPHQARLEKITSRQVLFVDGNGYRVPIEELSDGYRSTLSMTFELIRQLADCYGAKKVFDPKDPTCVNVPGVVLIDEVDAHLHPTWQRKVGHWFRKHFPKMQFIVTTHSPLVCQAADEGSVWRLPRPGTNEEARQVTGVELDRLIFGNVLDAYGTGVFGEGVTRSERAKERLQRLSELNVKELRKGLSAAERKEQSALRASQPTAAMTVHESEEWGAK

SEQ ID NO: 81419 - protein, 268 aa, Myxococcus fulvus HW-1
MIQLPDRPLSRRATQQLARWQAEVDALASHAERSAAAKRLFKQRNTARNQTFVEIRRQLTTMCSGAQRCGYCEDSAADEVEHIWPKDLYPEWVFAWRNYLYACGPCNGPKSSKFAIFPHRSRSPVEVSRAHRGAPKAPPKGMPALIDPRTEDPMAFLILDLQGTFFFEPLGRTGTRDFARADYTRSLLRLNRELLSLARAEAFSAYRARLREYITLRDEGASSLALRLHVTAIQRAAHPTVWREMQRQQRRLPALRALFRKAPEAMGW

SEQ ID NO: 81420 - protein, 423 aa, Myxococcus fulvus HW-1
MFDRLELHHVGPAPELVFDFAHRLNLITGDNGVGKTFILDVAWWALTRTWAGHPAAPHRGAGLKPRIAFEFEGKRRPVRYSSEYDFKSQSWTLKGGRPPNPGMVLYARVDGSFSVWDPARNYWRNAPSLGVDAPDRPPAYLFSSQEVWDGLKPDGKYLCNGLIADWASWQGSNKEPYRQLRQALHALSPSDAELLVPGELTRISLEDVRDMPTLRTGYGQEVPVVYASAGVRRVITLAYLLVWTWQEHLQASRLMNQDATRSIIFLIDEVEAHLHPRWQRTVLRSLLKVMEALTGAGDVQVQILAVTHSPLLLASLEPLFDANEDALWHLNLQNREVVLHKEEWHRRGDANSWLVSEIFDLKEPRSLEAEQAIKRAEGLMERRHGVSSDEFTETRDALRASLPEIDPFWLRWRFWAREAGFMQ

SEQ ID NO: 81421 - protein, 213 aa, Myxococcus fulvus HW-1
MTGQPPLFRRRGPRIAKRADRIEDLDASVLRSYAYWTRALPVLHDSYGGICAYACFYIEPLCGPTVDHFVAMVSAEHRQAYEWGNYRLACSQMNARKREFADVLDPFVVEDGWFVLNLGTFKVEPAVGLAPEVDAKVRETIERLGLDSREYQHMCRRYFDSYWSPKVADQPVPLWSLERDAPFLVREMRRQGRIREADVAPRGPVAAARQTPP

SEQ ID NO: 81422 - protein, 412 aa, Myxococcus fulvus HW-1
MLRIEKLQAENFRCFDTVSMTFEPDVTLLFAENGGGKTALLTALAMGLGLLQPRHPKELTLNAERDARRIAGKNGGPREAAGPCKISWSATIGERAGVGWSAATSPTARKASTQVRAAADAIEQVRKQGARWPLMGHYGTGRFATERKATRKSRDLPDRWDGYEGCLEPSPTDAPLLEWLRDEAFGDLARHRRGEPERRFDLTVFNTLKRVTPGVADIWYDPAAGSPMVRFEAGNEVAWEELSDGFHMFLALVGDIARRAVILNSQDGLEAPLLVEGVVLIDELDLHLHPRWQRDVLKGLRTAFPKLQFIITTHSPQVLSSAENRQVRQFVDWDVKEGGIFVEGRDTNAILVELMGTDNRDETGRSKLDALYEAIDDGRISDAQRLLTELRTRWGQVDPELIRAEGLLDLEE

SEQ ID NO: 81423 - protein, 263 aa, Myxococcus fulvus HW-1
MRRIAKRWPPSNVSPDDQPPRSLRQAEKEHQAALSTIPQGKEQTRNARASFDALDKKKLREALLLEQGGLCVYCQQPLTDQGRRDSVPHVEHWRSLRDNPDQALHWNNLYLSCPTPTTCDGAKGKRRLAWSETDPELPWPTEVPYHDWIGFTSGGEAYVRTDARLDTATRRTLTLALNDCLESGQTRLSLLNLNARALVEARKAAIDSERKRLERDFPKSTVPMEERRARAKALLKKSSPLPSFISVRIAWLTRQTGKNKGPA

SEQ ID NO: 81424 - protein, 483 aa, Myxococcus fulvus HW-1
MYIRHLAVDNLKRLGRFELDFTHRGEPRMWTVLIGENGTAKTSLLQAIALAAAGYKEVSGLAGSAVKHLCDRRKEESMSIEVEFMFGPGSVAGGSKIHPLASPKARHRPAGLELRSRVRLPFGTTSLDADAHYLGVPSKSDTRDPLAEARATNAPLWFVAGYGISRALPDANETPTLTRPSIERLEPLFRQKQLASIGFANHFLEKDQRENRKLGETSRRFSRMLNQAVKLGGSDLFPGLARLELRGQGGTRSSMSLIESDRFYQVMARNQDPVAIAGVALSHGYQSTFAWIADLIGHVLLESKTELDTTDMEGLVLIDEIDLYLHPTWQARFIPALRRVFPRMQFVATTHSPVVLSSLAPHEVVRLVVDEETGDIVQGGWDRQGGQFRPGVQDAEHQPDPRLMTGGELYRTWFGLEGMTPNPLGEKLRRLQVLAAHPKPTGAQSRELKELLGQMRRELIQRLGRAEGTKAFEDLSANRGSAQ

SEQ ID NO: 81425 - protein, 292 aa, Myxococcus fulvus HW-1
MIRIARGAAPIGLEKSAPRYQAAAAKVFNRHRGMSDALQEILSKGYNSRATKQALYLAQHEKCAWCERQMDFSSSPVEHYRPKDGAWRHLPGQKPRIDKGHYWWLAWSWSNLLFSCSRCNDRGHKANYFPLRRKTRKARAPKAPVSRSRPDSISDVSKERPLLLDPAGAEDPLDHIEWYPTNTSFNRRDWLWTPLGLTDEGRATIEILQLSELAGRAQGHVRSLLPIIEEVEQHLAAGRIPEAHKRWNQLIADSFTPEAQWSAFAWHALRHLVPPSYRAQHQLADPRRPGAP

SEQ ID NO: 81426 - protein, 449 aa, Prevotella dentalis DSM 3688
MQDITIHNFRCYEDKQMTFRRGVNLLIGDNSAGKTSLLRACNFVMNSFFSGYSDENTVWKSVEDDDFMLQVSEQGSILPERPIAISFHAGEWDFPPVAVMAGGKMETVAGVGPDEELRIEKTSKKNSRNLVTGLRVLKDYAALLQQHSHVMAGGRVCQNNVLPVYAYFSTEDIHSSRKINRERFKEYNHKTSFGYYECYDCKGLFDYWVDRLLVLEEAEVGQLEIQTVRKAIAEALGAKGCGIVEELIIRPRRGKVFFRYTDHRMVEANLLSDGYRRLINIVMDIAFRCALLNKEKFGDECYKHTHGTVIIDEIDEHLHPALQVRVLKALQTTFPMIQFIVSTHAPMVMSSVDRCPENVVYKLEYHQESGRYTHRELNTYGLDASTILGSSMGQVPRDLDVAKDLERLFQQIDEQKLPEAKETLHRLYEVMENGDPELARAEAMISFME

SEQ ID NO: 81427 - protein, 223 aa, Prevotella dentalis DSM 3688
MIKITKTKEPLQWTQYRKTPGAHYQAQDYLTEALMREQGYICGYCMRRIPRKDKLSGAATQEDHRIEHVKCRTFYPELELDYSNMIACCPGHIGDEDHCDRSKKDLAISFSPMEEAAIESIRYSSSGKIFSANRQWNKEMDEVLNLNTSMLVLNRRSMLDEVIKRINQQCRKKNGWDKALLNKFLQKYSQMHKSNDKEENRMEYYPFCGIVIWFLKDKLRKLG

SEQ ID NO: 81428 - protein, 312 aa, Fusobacterium nucleatum subsp. animalis ATCC 51191
MRDYEYNRKNNGEYYSNLIANFFENPPKIIYVPAENKFEEIQTYSTTLSKKYEFINIINSNVIKDIPSYIATRRNYLATIEEDLTMKEVTNKVVNEINGIFDILELDVKLKGFSKDEKTMPIFENSAGEEFDINDLSSGEKQLFLRTLSIKMLEPKNSIILIDEPELSLHPKWQQRIIEVYKKIGENNQIIVATHSPHILGSVSNENIFILYRNENGKIEAKTGNELYSSYGQPVDRVLKDIMGLKSVRTPKIDRDIQELRKLVDEDKYDTEEFKKKYNNLLEILGNTDEDLFLIDMDIKMKQKVNSNVESK

SEQ ID NO: 81429 - protein, 150 aa, Fusobacterium nucleatum subsp. animalis ATCC 51191
MLKVNKKKSEPEEFTKYKSKHKIINWDSFTPEIKQVLKQYLLEEQENNCCPYCEIEIHLEDSHIEHIKPKDKFPKLLADYNNFIACCLEKKICGDSKASKWSELFINPVIEDPEDYFEYDIKTGKIIPIFKEGNRHEKAKYTIDLLNLND

SEQ ID NO: 81430 - protein, 417 aa, Vibrio tubiashii ATCC 19109
MFKNIKINYWRQFENVDIDFGSNVTILTGSNGAGKTTILSILSEHFGWSARLLSTPEKEGETGLTRFVTGAWSYLFDNKKADDYWVDIGSIEYSEMDGGKVQVPKEAGSSYSFNILNRVEIKGMHIPSHRPVYSYKEVDSIPTRPKSKEDYFNEYNSNILDKFNNTSNYLENISPSYLLKQSLIGLATFGYGNSHVVPNSEYAALFEGFQDVLKILLPETIGFERLEIRIPEVVLVTKSGDFSIDAASGGVASIIGIAWQIYMFAQNKASYVITIDEPENHLHPSMQRELIPNLIKAFPEAQFIIATHSPFVIGSSKESSVYALTYNDDNRVCSRKLDLIDKSGSATKVLREVLGVPVTIPVWVEQNLNEIIHKYSNKGITEDLFKDMRVEMESKGLAEFMPKAVSVVVEQINDKNI

SEQ ID NO: 81431 - protein, 219 aa, Vibrio tubiashii ATCC 19109
MIKISKTQKPQILQDNADTWKKELMEYVSKGEKVPKSLSNKYNDCTVKDALKTESSAKCMYCESVVKHVAHEHIEHIKPKSVKKYPSLTFEWSNLGLACPICNMNKSDIYDDQIPFINPYIDNPSDFFVAAGPCVFSKPGERRAELTEKIIKLNRAELIEQRLERIDYLRELVDKYNKEANSTLKSMLLNEINIELGSNKPYTFVSNALVKIVDSALVV

SEQ ID NO: 81432 - protein, 423 aa, Ketogulonicigenium vulgare WSH-001
MKIRRLSVAGLRGFDQATFEFDPHFTLLVGVNGVGKSSVLEALRVSLSRVLPKFTASRSTPLAFAADDIRQVSASLTVDLDLEFPEGQRNLLLHKPRERFVPDEEGSVRNATLDTPEREELSPPHWPKADPSGNQPIAIYFGTRRSHPTDEQIKIGRSRGGQAAAFADALSDVRPLHLRDMASWMVAQEALAEELPRARFHLEALKSAAARFLPTCKGLRATNGADKPRLLISKDGIELDVRYLSEGERGVLALALDLARRLSQANPALDDPIGDGVGVVLIDEIDMHMHPLWQRQIVSLLTETFCSCQFIATTHSPQVIGETQPSQVVLLKQSAGRVVPQRCGQAYGLDTSFVLEQIMGTPSRPTFVKAAIDEVENALEDADLDLAREKLAILRKLQHGDDPTTVGFEAEINNLEALADEED

SEQ ID NO: 81433 - protein, 228 aa, Ketogulonicigenium vulgare WSH-001
MRKINKAAPPAALTEWIAVNRNGQNCSYNSVGGELRRIIRAALVSEQGGLCAYTGRKIDADTCHIEHLKPQAHCGDLEDVTYLNLVAAVPQPNTPKLPYGAHLKDNWPSLAESSLFVSPLSAGCSARFSFSFTGRISPRNSTDTAADETIKRLGLNHDILIAFRQAAIKGTIQSRGRQMDAKLARRRLQGLQQKELTSRDLEQFSFALIDALEKHIIRLQKISGKKKK

SEQ ID NO: 81434 - protein, 351 aa, Desulfosporosinus sp. OT
MTHVFLCAILAGTDSFEKRHLLKNCNFSAVENVDVEVDLRKIKEFFPANDMDTVQMPKELVLAIDFIDLHFVDVFSRGFQYSTGDKAFFSLTKLEELGLDSISIYNFFEKLASLFSAKYKVYVKHGESRVSVDEMSEGQRQLIKVLGMLGVCKDEDCLVLMDEPDAHMNPKWKYELKATIDGSLDAAINTQVLIATHDPLVINGVDKRFIRIFAYNVALIEDNGFFFTKVYEPTEETKGMGIDGLLQSEYYGLQTSYDQETSQKYIERQQLYIRLINKEITEEEKTHLRELTAELGSLPISYNTIDFLYDDFIKEFRNSEFYSKEYLSFDEIEQRREKIKEIIQALYEDRE

SEQ ID NO: 81435 - protein, 243 aa, Desulfosporosinus sp. OT
MRYLDTTELLQKRSSWGDRTELWKNEQLREDFKELFYGKCWYTEIKLLGQDVHIDHFRPKAEVRRFQDNPYNEPLQHTGYSWLANDEANYRACCIYANRVTGEGGKGCYFPLQEGSPYLTRGGSEDEQPLLLDPCKQDDVNVLTFFGGDVLCASNEPIDIKRVEISKTLYNLSEQSIKSARARLWEDISRTLAEYSTGDISRKACLRRLSDAISPEAQFSACAMACVNSLAQDELKADLDLEL

SEQ ID NO: 81436 - protein, 404 aa, Escherichia coli O7:K1 str. CE10
MMNIRTLKLTNLGRFEELDVHLAPVEEFKSNVTVFIGNNGAGKTSILKSLATSLSWFVARVRTEKGNGSPIPEDAILNGRSSATIELQVLNTHPATEVATPYRWLLARTASGKKSTTASSLQEASQLAAFYRDQYTQNSGASFPLIAFYPVERVVLDVPLKIKERHNFLQLDGYDNALNQGIDFRRFFEWFRNREDAENESGLPQDVLDKLSTRIDLDNAVLNALTALMASSRDRQLTAVRTAISRFMPGFSNLRVRRKPRLHMSIDKNGQTLNVLQLSQGEKSLMALVGDIARRLAMMNPMLENPLNGEGIVLIDEVDMHLHPTWQRTIIQRLTTTFPHCQFVLTTHSPLVISDCKDVLVYSLDDGELTQLPSLYGQDANTVLLNVMDTDIRNATVGESKTTG

SEQ ID NO: 81437 - protein, 207 aa, Escherichia coli O7:K1 str. CE10; identical to SEQ ID NO: 81029

SEQ ID NO: 81438 - protein, 494 aa, Rhodanobacter denitrificans
MKLRRLWIASFKNLRNCEIAFEQPHLLNAVIGGNGSGKSNLVEAILHILLDTYLNKTPPFDFHFEYEAQGRHIKLSAADGRLRSIVDEQEMLISHFTRRLRDGEAQVFYPESTFAYYSGDCDRVRRLLKRYNVSFRRFVQQSEHDNLRPLFVLSTNQQARNILLALIAHRHVEFLNRLGISGARKIKIVLQSPAGFDPEKDEPVLWGTLGKVGKTIAALAETADAEESRKEELPKRRDSEITGYAFSETRTYTFEEIMNPEQRLWKLAARLERGRDNLYLALEHLAVRGILRSVEYELIGDGDQQPFNFDQLSEGEKQLIAVIGAIRLTNQRDNLILLDEPDTHLNPQWSWEYPEMLDEAFDSTQKDRSTVLMATHDPVVISGLVREQVFLANGNGHDRSNFEHPVRHPRGQGVANLLCSSEFFGLPSSLDKKTQVLMDERLKLSLKETLTEADKQHLKDLNQKLEILQSGISERDPDYVEFLRQKYQPEGIGN

SEQ ID NO: 81439 - protein, 269 aa, Rhodanobacter denitrificans
MRFIDIKLLTKVIEADADGAKICSTLHRAHKSTAVKYAGDRQGYIDRNGSAKWRPLKARFTAITGRKCWYTEAELTGGDLVIDHYRPKAAYWFLAFDEYNYRVACPYANSPHHNEEYGCAGGKGDEFPLLDPRAKAKGRNGIKLERPMLLDPCNEADCKLVVFQTDGRPVLHPDHLNDAIAKRRVEKSKILLNLDHPDFNSKREQLRRDIDRDVRSHENSAGDPAHQQDLRTKLTARISRTAPFSTAARQYLGAHKHFEWVAKLLGQNM

SEQ ID NO: 81440 - protein, 412 aa, Yersinia enterocolitica subsp. palearctica PhRBD_Ye1
MEKFLTKINYSLGIEETRHDINVNSRILIVTGGNGCGKTSLLNQINSKIKTLCVEKKHSQISDIQRDIKYWEEQLNSFPRGNAQHQNAKNQLKYQRESLNSLEKGVTLEFKDINEISALLDEKKAIFNYFQADRKATILESIGATKVSLQEKLDKNYAYNNMNLGNEFENHLVNLKTRQSFAKTFDNNESLYESMETWFINLEKSISFLMEDESFKLIFDPDKFKFHLQQDSKPPYTFQTLSSGYSSIFNILSELIMMTEANHISPSDLQGIVLIDEIDAHLHVSLQRKILPFLTRTYPRIQFIVTTHSPFVIGSLDNAIIYDLSSQQEFSDLSNYSYETIIEGLLGVPVVSISLEKDTKRLSALLVEENVDNAAITELVEKLSPHQENLDDESAVFLLKARRVLREDKETK

SEQ ID NO: 81441 - protein, 218 aa, Yersinia enterocolitica subsp. palearctica PhRBD_Ye1
MFPVNKSQEAPASLAARRSYSEKDVIEALSRDFHNKCYICEVKDPLVLNVEHFRPHGDNLDKMYDWRNLFFACGRCNNIKRAKFDDMLDCTNQGINILMSVKHVFPTLAYSNHVDIIPMNDSEETKQTAELIYSVFNDDHTGNKDLTRIFLLKRLMKIYRKLLELTLDYDDEDTLEEEKEHIAKKIKNMLKVEYEFSAFIRWSIIDATKLHHLKEGIF

SEQ ID NO: 81442 - protein, 384 aa, Paenibacillus lactis 154
MKVEKLIIQNIGGIKNLTLEFIDGLNLICGINGVGKSTILDCIVSSFSLYPAEGLRRNSNSEYGEWTISVDGTIFKNSLRIFRPEEQIVNHNPLGPSIKNIIYVKEQRPLKYSRLQSISRDNDFDQSQYSARITNGLNGDSIKNWFINRLAFERQGNFTSQEKHNLQTARNSFSLLDPNVEYSHVLHDSLDIMLKTTRGEIYFEYLSTGFKSCLFIILGIIKEIEFNFKDPKIKVNEFDGVILIDEVDAHLHPYWQGRFLKVLKEVFPSSQIIATTHSPHMIQEADAKEIIALTIDENSNVSRLELDQLEFGFKGWTIEEILEDVMGLKETQSNRYLEVKNEFERAIEHEDIIKAEYTYEILNKMLHPRSPMRKIYQLQLGSIR

SEQ ID NO: 81443 - protein, 254 aa, Paenibacillus lactis 154
MIKVERTKCPSELTEDIKQALTQEYKTSKKNVWNVDYIKNALLEMSNNKCIFCECKLGEESKYIEVEHFYPKSLYPDEVIEWTNLLPICKRCNVKKLDHDTKKEPIINPTVNDPKNHLRMINYRFVGKDQIGKDTVSILALNDSKRLILPRATIGNEIAELLEDLSDLVNEYSQKENLSRKEINKITGKLENLLDSCQCYSEYSATCAYALFGDDNYYLVKEFFISKGLWDPNLQNLEKTAIVNWLEGTVEKVQ

SEQ ID NO: 81444 - protein, 128 aa, Salmonella enterica
  subsp. enterica serovar Hvittingfoss str. A4-620
MRSAFPQIQFIVTTHSPQVLSTVKRESIRLLEQDENGNGKALMPLGATYGEPSNDVLQSVMGVDPQPPVKEKADLQKLTAWVDQGKYDEPETQQLMAALQVALGDQHPQLQRLQRSIARQNLLKGKAQ

SEQ ID NO: 81445 - protein, 198 aa, Salmonella enterica
  subsp. enterica serovar Hvittingfoss str. A4-620
MTLLLNEQYHLCCYSEIRADLRGLGYHIEHVENKSQQPARTFDYQNLAASALDSENGLPQLGINAFGGHAQGKNKSVDMAKFIHCHLPDCSRYFAYLSNGHVVPSIDLTEQEAEYAQYTIDHLNLNSGFLQTERRNHWEELEQLFEEHIEKGWDLHQLLQLDLVPTPDHKLHEFFSFTRQFFQQEAKQVLQDYAPELM

SEQ ID NO: 81446 - protein, 465 aa, Escherichia coli str. 'clone D i2'; identical to SEQ ID NO: 81190

SEQ ID NO: 81447 - protein, 243 aa, Escherichia coli str. 'clone D i2'; identical to SEQ ID NO: 81097

SEQ ID NO: 81448 - protein, 465 aa, Escherichia coli str. 'clone D i14'; identical to SEQ ID NO: 81190

SEQ ID NO: 81449 - protein, 243 aa, Escherichia coli str. 'clone D i14'; identical to SEQ ID NO: 81097

SEQ ID NO: 81450 - protein, 553 aa, Aeromonas salmonicida subsp. salmonicida 01-B526
MKVNNLHIRSRFKNLENVKVDFDENHLMTVVVGRNGSGKSNVLEALVAIFRNLDLGDAPPFSYELIYRLGEPHKQNKPSERWLEITIDADPTRGTIAKQYQVQVRDLLADNELNNTSTNKPSGETIPFSKVKRDKEGKAPYLPNYVFAYYSGPSDRLENNFKKHRTNFYRRLLEDKLDLKGDIRPLFYAKPHHSQFVLLAFFLSEQDSVEKAFLREHLGIKDLDSIHFVMRQPGWAKQKGELFWGAKGVVRRFLDELIKHTLSPVKVTRPEDTSLTNSNISKEFFHLFLPDVKALREFAKDLNPDELFKMLESTLLSEIISGVSIRVKVSSSKEPLTFRELSEGEQQLLTVLGLLKFTGGKDSLFLLDEPDTHLNPSWAVKYLKFLREFVPNHETSHLLMVTHHPLAIAELKKEQVQVMWRDSNFQVHAQEPEESPRGMGYGGILTSDMFGLLTTLDNSTERLLRLRRRFTEKTELSPIQSRRLRKIDKAIEGLGFTTAHWDEEYAQYLRMRREVEKETEAVTVTPELKHVRKERAKEIVQRMLAAEQGEDNK

SEQ ID NO: 81451 - protein, 287 aa, Aeromonas salmonicida subsp. salmonicida 01-B526; identical to SEQ ID NO: 81353

SEQ ID NO: 81452 - protein, 413 aa, Hungatella hathewayi WAL-18680
MIEQIQIKDWRQFDSLTINFDTRLTILTGTNGSGKTTILNILSKAFGESIKFVSNVNETSNGSVNYSSSVLGNLEDKRDDNYNSSIIGSITYNSITSPILVPEEVSTTYNIDFKDTQPCDGLYINSHRSLFQYKRVDTIPTHALKRDEIFSTYHKYKTLPLSDIYYNPNEQGATKHIKEAIISLATFGPGNSYVKSNQEALNIFEGFQSILNKILPPKIGFQKLSIEIPEVILETTSGAFPIDAVSGGIASIIELAWMIYMYATSEKSFTVLFDEPENHLHPELQQTLLPNLLDAFPNVQFIVATHNPFIISSVESSVIYVLDYNEKKKVIASVLENITKAASSNEILREVLGITSTFPLWASAKIKLLINETISKGISENSLSDFREQLKYLGFENVIPVALNQLFEGEIND

SEQ ID NO: 81453 - protein, 218 aa, Hungatella hathewayi WAL-18680
MIKIKKRAKPQILRDNAQQWTSEYLTALQQKNPVPNHIKYRYQNSEIKDALEEETSGKCAYCESKFKHIAFGDIEHILPKNKNARPELYVEWTNLTLSCEVCNRINKNDYYNPFDPLINPIEDEPDKYLMALGPFIYQVPGERKGEISIAILDLNRSDLIERRKEKIENLLPLVDKWKKETNETYKKLLHSQIKKEADSDKEFSFVISSYLKLINFYN

SEQ ID NO: 81454 - protein, 402 aa, Halomonas sp. HAL1
HPPTHQERYKQLLRQDDDDLMRRLFYCRGGHSQLVLLACLLSEDPVFKKLLGNLNIEAIESALFVLKKPYSAKNLDESDIELGDSRFWYRRGTVVNGFLEKLWQVAWAPVQETKQIAVDFRRRPEKQELLYLFVPNNQSLKKLGEEVGTPERFFRYAEAAYIGDLLEEVRITVKKSKGHGGDVEFKQLSEGELQMLTVLGLMRITREDHCLFLLDEPDTHLNPIWKLRYFDDIEGVLSSEKDSLVQGESQILITTHDPMMVGSLKREQVHILRKHGDCSIVESPDVHPQGMGVTGLLKSELFGLSSTLDIETERRLFRRNELFVKSPRTADDDAELSRLSAELADLGFSTADFRDPDYALFVRKMAQHRKFRKPVLTPEEQAEQDRIAGEIISEILREEDGE

SEQ ID NO: 81455 - protein, 285 aa, Halomonas sp. HAL1
MIFIDLEHKKPTDTDIPNWVPWTQAQWEAWLAKSNQLVNDMAALEAAGKYNERNALIDENRAHWGALKEWLLALSGRKCWFSEVRELYSHYDVEHFRPKKEAKALDGTNRDGYWWLAFDYMNFRACGNVGNRKKGGWFPLQQGSLISTYSAPCEESEARYLIDPIDDYDVSLIAFDEEGKVVPAPGTSAWEQQRVEQTVKRLKLNEHVTLAEERRKVWQKVDGLIEDFQRAKTRCATGNNPAAKEKLKAVRYGIREMTSPTAELSSVARWCVLMRSDPQLSMLVG

SEQ ID NO: 81456 - protein, 439 aa, Actinoplanes sp. SE50/110
MYLHRLRISDVRGFHGSHEVDLGFELSADGEPTDRYPGLVVIAGRNGSGKTTLLRAAATALAGPEVTNSLTEGVRDWVTHEAATAVVHADIRLAGDEIFPPERFLEARLRWPRTEGARARPESGLDSRSEQHARISLWRSNPESWFAAGYGPFRRLAGSSSEVARLTAGDWTVARFATLFREEASLAETVHWLQQVNYRARSGQQRYADMEGFLLALLNDGLFPDGHAVDRVDPDGLWIARQSGPPMLIEEMSDGYRSVTALITDIVRQISDCFRLGVPWTGEYPPRVLTSGIVLIDEVDAHLHVSWQKRIAPWLREHFPNIQFIVTTHSPYICQSASPGGLIQLPGPDDDFAPRVVDDELYRRVVNGSADDAVLTELFGLESPYSQRVDELRAELTRLERLAIRGHAQAGDLEKLAELSEELSPSPSSRARDVLGGEA

SEQ ID NO: 81457 - protein, 243 aa, Actinoplanes sp. SE50/110
MIPFARRPLPGSLSTSLAARTRQLSGSTSPYQDARKAWKTATTTRRGLKTHLCVSCARPAFCMYCHESRGTDVDHYEPIRRAPLRTFVWDNHLLACAYCNQQAKQEVFPLDGNGQPLLLDPSVDDSADHMTLLSTGVFEGLTTRGAETIEVLGLNKRPELVRARTVSWRGVVRVFDQAALHGGVLTPNDLEDLRFLPVVDAFHHFAHDVVAGRLGFKGVRPHVVTSADANLAVIRGLFPACRL

SEQ ID NO: 81458 - protein, 459 aa, Azospirillum brasilense Sp245
MKLSRIEITNFRCFESLTVSLQPDVNVLVGVNAAGKTTILDAIAIALYDVVAANGGGGKRQRQAQQTALRPSDIHIAPGASDQMSGRKDHVLFRAWATDFYPVTGFMTAERLEGHPALVWQDYIRYAPPNDFNYSSGGSDDLNSYFKALWDAARKEAKALIAFPVVAYYRATRRISEMPPLGDIFKLRLERQLAFKDAMDAGASYQSMCQWFYLRENQELREKLRTQEVQDFQYPDLKAIRQAISKTLENVKRVFFGENPPSLMVEFENGSGAPRSMALTQLSDGYRNLLGVVLDFSRRLALAHPNWDNPLEAPGILLIDEIDLHLHPKWQQRIIPSLQDVFPNTQIIVTTHSPQVLTTVRRRNITIIKDQQLHMPHGSTYGAESQQVMRQVMGADGRPPDNPNAEAIYELFALINRGELEAAGEKCQELMSLIGPDDPALIEAETTIKNRLWEKELGL

SEQ ID NO: 81459 - protein, 256 aa, Azospirillum brasilense Sp245
MKHCRKSTPEPPKLTEFRAANPQAKWDELRDHACYGDVRDATRRDQGGLCAYCELSLTDDNEQIAHFHPKSDHAGTVNWALTWENLWLACKGGTQTHHNDPACYRPPLPDNRSCDENKKDDIVDGHVLSPEEVPLFPRIFRFEQSPNEIRIVPDENGCEQAGIPIEKVQRTIDVFNLNCQRLAEARLSVYRPIESTLKKLRESSFSTEQKVEKQRQFAARHLTIDAGHRWPRFFTLLRWQFGMVAETHLNSLPYQG

SEQ ID NO: 81460 - protein, 550 aa, Pseudoalteromonas arctica A 37-1-2
MSSDFNHDKTINKLAKKAKSGNFFSAIELSNYYNIGRFVSKNKEKSDYYNGLAYSYFNTQSVKLKKIKINNFRLFEKGIGIEGFDEHLNIFVGNNGAGKTSILDAISLSLSWLSISINKNGGSGEYVDMGDINNYSDIPYASVASVIELNKSISASLELSQAREGTTKIKNKLHEFKIVGDFYKIANGFNSDFNMPLLAYYNVMRSYDVNPKDFKGLDDLYESTVTDKFDAYQKSLTGKTDFKAFIKWYKKSDDILNRRKVNNNRSAVLSELGITEETVDFLKSISLGNANAKKSLGEINTALTKNEPVLSDDDNLKRNKEIIDKVINIFMDGYTDIEVQLEPMIDLIIKKNDKKISVMKLSQGEKTLLSLVLDIARRLIILNPSLDNPLRGSGIVLIDEFDLHLHPLWQRHMAKNLINTFPNCQFFLTTHSPIVLSEVDRKHVYILSNTESGHTVIDRPSQTFGLTANEILNELMTPDDISQLVRSQYVEKELEEIFDLLDQESATALNSAKGKINNLEQLLHGDIPELVKAKTQMELIKDWLEDCEKD

SEQ ID NO: 81461 - protein, 215 aa, Pseudoalteromonas arctica A 37-1-2
MKKIEKLGEPRQLTEYRSKPGAIYDGPNFTSVKNDIKKQLLKEQGHLCAYCMARVKISEMKVEHFLCQTENDKEQLNYKNLLGCCKGGEGNKPRNQTCDTRKGSKSILFSPANQAYNIESKIKYSTTSGKISSSDTIFNRQINDVLNLNFSRLITNRIKALEGVENFLNKKAGRRNKAEIQKVIETYKSKNANDKFKEYNAYILHYLNIKLARLK

SEQ ID NO: 81462 - protein, 414 aa, Pseudoalteromonas arctica A 37-1-2
MKRHIDRIKGVVPNTHKEIDIALNGRNLIITGSNGSGKTCLLKELDRKVDLLIGKKQLADKSTIERYVQMFKEDVHSSQNGTTKNDRAKNNLESQIAQLEKINSGLDIAFIDHLDFSSKLDNGTAVLSFFEAHRRSNITSANTAKGIEIERTSILNNTPNDTRRNQIGNNLEQHLVNLRNRRSLAITEDNDQLLASNIEHWFSAFEESLKYLLEDETAKLSFNSDTLKFTIIQANKPAYTFQSISSGYQAIFDIYADLLMRTEYFEITAEELTGLVLIDEIDAHLHVSLQRLVLPFFTRSFPNLQFIVTTHSPFVLMSATDTVIFDLTHNEQIEEDISLYSHTAVMEGLLGTKATSTHLDNYINEVASIINMNKVDYERLELLVGKLKNVENSLDSKSKAFFLKGLNILAEKEL

SEQ ID NO: 81463 - protein, 214 aa, Pseudoalteromonas arctica A 37-1-2
MFKVERIGEAPASLARKVYNSPEVVERLNKMFHGKCYLCEQADLDAPEIEHFEPHLENEVLKFDWNNLFYSCARCNSIKGTRHKNLVDCCSDDINLVHAIKHMPPIMPDNDVGITAIVDNPKVINTVELLSRCFNEDNTALRGITRANLMEKLFKHYTKLLNHRLTIVSRESTDRDIQDAVERIEVMIRDNYEFSAFWRSYVKDDKKLQGMMKI

SEQ ID NO: 81464 - protein, 427 aa, Synergistes sp. 3_1_syn1
MLKKLLIRNVGPAPLMEMEPGPRLNLITGDNGLGKSFLLDTAWWAMTRKWPAEVNSKLTTGRMALPNSNKKAVIEFVIKGKTRDYEREVPFSRASQSWNLEKGRPGSPGIVIYAMSDESYALWDPLRNYGNSQNTDENVAAYVFSPNEIWDGLELPNEKGWLCNGLIRDWALWQTEGGRRFDLLKKVLAALSPSEEEKLAPGNLTRISIKDVRDVPTIKMPYKQEVPVINASSAIKRILALAYLLVWAWEEHLQAAKISRKKITNQIILLVDEIEAHLHPTWQRRIIPALITAMDSLSQQKADVQFVFTTHAPLVMASLETVFDGTKDKWFDIDLRGDEVSMASREFQKQTDAAAWLTSEAFNMKSARSLEAENLTRRASALLDSEEDVDKNAVRAIHEELIKKLTPYDPFLTTWRYICSKKGWLDR

SEQ ID NO: 81465 - protein, 199 aa, Synergistes sp. 3_1_syn1
MIPVQQQPEPKSFGKNVRTPGARWLSGLAMPPQSQKEWKGHEYWHKCLNDLYACYNGICAYYAIYIDMTSGYATVDHFVPKSADPKQAYEWNNYRLSSFRPNSAKRDAVSIMDPFALRKWTFFINFSNGEVRPNDRLPVDEKIKVDETIKILKLNASEITRKRAEDFSAYIAGMVTLEYLVKYSPFVAEEITRQHLELA

SEQ ID NO: 81466 - protein, 443 aa, Cardiobacterium valvarum F0432
MPDIAAVSGSRMHIHQLTLTGFRGAKNLTLHLHPGLNVFVGRNGAGKSTLLDAGAILLSWLANRIKTAGASGRQIAESDITNGQSVAKLALELSYRGEQTGWHLVKTRRGLQAVNKAGSSSLADLSKLAAAIQEEGIEEQALVRLPLFAYYPVNRAVLDIPLRNRERHDFNPLAAYESALTGAANFRTFFEWFREREDLENEIRRDLDRDSLGFFATEQTASFPDPQLQAVREALSKLMPEFKHLTVRRSPLRMEVEKNGSTLTINQLSDGEKCLMAMVGDMARRMAVANPHSSTPLTGDGIILIDEIDLHLHPAWQKMIVPKLTAVFPNCQFLISSHSPHVITQVRPESLFLLTMQDNELNYELAAESYGKTAERVLEDLMGLTTTRPEAVAQTLTEIYQDIDHGEYARAMQNIDNLGKEIGNDPDLFKAKMLIKRKELIGR

SEQ ID NO: 81467 - protein, 205 aa, Cardiobacterium valvarum F0432
MKYIVKQCEPVFFTTWKAQANANWQPEYSNMPTDIKQQLKDALLDEQGWICCYCEQEITPDDSHIEHFRPQSDPNCDPLDYSNLLGSCQKQRRKGEPLHCGSLKADWFDRNLLISPLNPSCESRFVFLGNGEIQAKDANDQAAKETIQRLGLNIPKLIEMRKKVIEVFLDELLTDVEVANLVSTYLVKKAKKYSPFWSTIHYLFS

SEQ ID NO: 81468 - protein, 841 aa, Pseudoalteromonas sp. BSi20311
MQTHNEINSLARKQAKEIWRLLEYIRGSAPIASYRSLAYMVLFIRYMQDNSGQHFNVPRFYSFDAIGQYIDELVLTCTELGLFQRELGYIASEFTIDILRKNNRIEGDLVKLLAQSNGVNRDKYIVKQTLDELNRLFAENEMRSGSEFYTPKDINKLVTTLGMQYSPRSVCDPFAGAGSTAFSFYEATNGKVQIDTQEVSTDIYFQLVVTRILKGIYGTDFLEDSISHPKYKSELYDLIVSFPPFGLKIPSSTREAIYKGGSNEWLFLTEELPMTRSDWLTTLSMFPSLGSKTKLIIGMSLSSLTRVGSEARIREFLIDKNVVDTIILLPKAIHYSTNIPTVLLIFDMAPQKNTKSVRFVDASLFYEPHRGRNLLSDENIAKIFDATVSDGRFSNTVTREKLARNNFNLNPSLYVDKTIKVSKVKLTNFRGYKDFTVPLHGALTVLVGENGAGKTSILEAIACGLGPFLTAMPEAKGRLIRKSDIHVGIDGVADFSRISIDTNSSLSWDLVTRGTEKSTQAKIGTQALSDFAKQIVNTDTEYPLIAYYGTNRTLSNTGNKVSISPFEELQRSEGYDSALEAKINYGSLKNWFTKIEVDELKLRDKKKNHDIIHPAKVLVARAVREIVNRVQNVTFDKSINDVVVTWENESGENISLGLEQLSEGYRNMVALTIDLVRRAYLLNPNSKAPLSVVGVVLIDEIELHLHPRWQQVVLEDITKLFPNIQFVVTTHSPQVLTTVRGESIRVVSNSSSFAETVNSPFGGENSRVMKQILHVNSRPVTDVSRKLKEYFDLIELGKGEDREALVLREELSKLTDGTEPMLVEADLAIKRVNWMKSRKSQ

SEQ ID NO: 81469 - protein, 251 aa, Pseudoalteromonas sp. BSi20311
MSIKNIPEPERLKEFRLANPNATWNQLKSDSDVNNALKVTAIKKTAGLCVYCEHKLIAKTDYQIEHFHPKKGNNNSDFGAGKPNWAINWDNLYPGCLGGTAQVVHFTEQYDIDFRTGANRRNKGRLTCGQKKGEIDPEGLIIKPTELNNRDPIFLFNGADGSISLNAEACRRQNISTELGESQIVRLNLNSQRLKDARLELASSLRTQFDKAFQFDGDAIEELVEDWLALNENEMYELPFISMISSKYERS

SEQ ID NO: 81470 - protein, 501 aa, Pseudoalteromonas sp. BSi20311
MEVILSFCIHCLNSSRILSNLLYLRINLGWGNRMSFRLKKFKLDDKNLQLPLVKLTNGNDSEDNYFTVVIGNNGTGKSRFLRGIVDSYRKRNVGHENFSLQDKINNPQKLIAITTSLSDKFPSDSSFSRQANPNIIREQYCYLGPRGRVGGSSNRALMDKAISFLMSGFEEKSNFYQYNEIFNYLKYEPVLKLAYKVRVPVELKDSIESIDGENLKSFIAMRSENRSGIRQGTYSRFLSSPEYYWDELADAYRYAFEQQNFNRGGEFNFVINFSEENISRSDHVISHREISRYRVFDDLRKLDLIKSMQVKLYKKHGGEFNYTDASSGEASILSTLIGLVPNLKNDSLILIDEPEISLHPSWQYRYIELIDKLLQSVKGCHIIVATHSHFLISDLPNGRSNIVHFKSSKGNRIDVDYYDENTNGMSAEDVLLNIFDMPSTRNYYLSAIVTELLQLLADGQKHSDRYHDLCLKVKKVLPNLKPVDPLYDVISKLTKLRLRND

SEQ ID NO: 81471 - protein, 208 aa, Pseudoalteromonas sp. BSi20311
MTDRILSPYSFKAQELQLISDRFVTHTDWSKSCFDGIKLAVKNDLRPKQGNLCCYCKWELGFDIKEVDIEHIVPKSEYSEYTFHPNNLSLSCPGCNTNKWTKPVLSVPITAYPTDGINVSIVHAHFDDYSQHIERHADAIYEGLSPKGRRTIKLCKLDRLKDVLKKMKAAKSKDTQIAQLVAELRQTNDTQRSEEIKLELSQLTEQFL

SEQ ID NO: 81472 - protein, 426 aa, Flavobacterium columnare ATCC 49512
MKLSKLHIDQYRHLENLDFDFTYPMDFHDETMRGKPLNKICFIGQSGTGKTKLLELIHKDISNLLNTELDEDSKIWINFNKYDSTIGLQINENNFSFKEGNYYLNGNIIQRSSNKSTFTSTLIKEAKSLFYFTAELLSTKNLEFFEKEPILLIEKSRTFSFIDQFIVNENQNIIFNDNIEEEIWIRLLNSSINYLQNFLQFATELINSGNVLDNSSQNKIDAWKSENINPLIDFSEKFNIILEKIQLEVDLTNAKNIIPLKNKNTGENVDIKNISTGTKQLLINSLPLYKLETKESIILIDEPERSLYPDMQMDLMDYYQNLAPEAQFIIATHSPFIAASFEPCERFILYFDEDGKVAVRQGTSPIGDDPNDLLSNDFKIDYINKFGHQKFQEYIDLKQKVYFEKDEKRKEEYLEKLEKLGDQYNF

SEQ ID NO: 81473 - protein, 191 aa, Flavobacterium columnare ATCC 49512
MKRIIKSQDSNVLQENLIYKKGNNQKLGKILLQEQKNFCAYTEEYININDAVDIEHFNPNLKYTDKDSYYNWFMVKHKPNNKKRTKWMEQILHPTNEDFEKRIIYFEGFFIHNPNDIEAKNLISLLNLNHESFVKNRKNYIKRRKERIQESNKSSFDYFKEKIEKEIDSIKYLRAIQEEFNIDIWKMIPQP

SEQ ID NO: 81474 - protein, 539 aa, Klebsiella oxytoca KCTC 1686
MRIDWLWIGEYKNLKNLTIDFAQGHLITVLIGRNGTGKSNVLEAATVLFRDLIMGEDGKGNKNKPSFAYRICYQIKDKWVRIDADPAGKEPYRIKLAPYDPDAEPPSAVITFEETPGEAMALSKLRDPDDGYLPRFVFGYYSGQSERMEKVFLKYLERYDRDLRAGKNPGLKRLFYALPVHSNFVLLSFIVNNAELTDKFLQEQLGLEEGGIESVLFVLRQPSWTSNDGDPRFWNARGVVSDFLATLYDISLAPLRITRKEKVSLWNWRKLEFLYLFVKDLGALRKLAGGKSTAQFFQDLESTYVSELIDEVRIRIKLRKNDGSVTFRELSEGEQQLLTVLGLLRFTAEEESLFLLDEPDTHLNPRWSVEYLQHIRNFLNVNGTEKQSSHVLLATHNPVAVAELEKEQVQILTRDKDTQAISAAEPDTHPRGMGYAGVMTSEMFGLSAALDTHTQDLLARKRHLSGQDVLSEDDRKTLKEINEELQTYGFRYEVRDPELKEALRRLDQEAMPISERKELPDEAEKARRLIQNALNKKGD

SEQ ID NO: 81475 - protein, 260 aa, Klebsiella oxytoca KCTC 1686
MRYINLDQLELPDSWQVRADAAIADEPGKIKDHSDVWRDLKRPLMKLSHDKCYYCEIVQERSDGAVDHFRPKSKYPWSAFSPSNYRFACTFCNSVRSDKESEKTGGKGENFPLHDEKKRATCCADEANESPILLDPCKPDEPGLIDFDETGMPIPTYSKEKHVGRNRRAAESIRLYHLDHSDLVDKRKTLAVSITRKIDAADRLFPLTESGNVDIDNSFSEHVRALADYISESAELSAFARRIVAGHRDVLWVENLLRSA

SEQ ID NO: 81476 - protein, 548 aa, Pseudoalteromonas sp. BSi20495
MNNNNPDNSFVPPARLTKDLIEKADNGDYLASIEMANKYEKGIHVKQDAIKAKYYFDQVYASVEHFKLVMKKLNLSQFRQFEKISVEFEPQVTILVGDNGSGKSTIIDAIAKSLKYLAATIIKENASRSSLDDRDINVDELADIATAINLLAVEDGQYFEHTLSKGKRSKGESNHAPITILGDIYRNFDRVNNQSNLPVIAYYSIDRANEIAVDISKTAEKKAEKLSWSKFDGYADALKNSQNFTNFLAWFILCDKMAKQAEVPLARITQLHDELKTINEDILKADGNLLTYLEKDRQKKQKELSELELSVVNSEAGLCLNMTNQVISAICTFIPEINSISIVHANGGIDMKIEKSGAMISVFQLSQGEKSLLALVGDLAKRMIMLNPSRDNPFDGNGIVLIDEIDLHLHPRWQQQVVSKLLTTFKNIQFILTTHSPQVLSTVHKHNIRVLGNNIYGDAVAAIPIADSYGHPNSDVMHTIMGVEPTPIIAESDILIKYRKLIEQGDLKSEEVANKINKLQLQLNGVLGEQHPDMVRLAMAKRRRERLE

SEQ ID NO: 81477 - protein, 246 aa, Pseudoalteromonas sp. BSi20495
MRRIKKGVANRHLESRHMEPPQTHEQATKAWDRFQGERKRATKNLCYEEQFGLCGYSEISLDNIFPIIDDSNYEISRNLGIHIEHVEPKNINPQRTFDHTNLIASAIKDIKANNLIKKDVFGGHAKLKWFNEISFISPLLENCCDYFHYETTGKVVPKESLPTRREKAKARLTIHKLNLNAPILVNWRNVWLKALEEIIDESDEASLSLIAETELLPINGLLRPFHSAQRGLFGKIGERICHDNGL

SEQ ID NO: 81478 - protein, 316 aa, Acinetobacter sp. NBRC 100985
MNSNENIDLVVTGIGNLSENIQASKVTFNFFPAHRQSQITASTNTTDLNQYINTAKHEYYSKLGQFLEQYLLNIKIEKSLALSEEQDTNHAYQIDQWFKKFDEDLKFLFEDSTTRLKFDYKLRKFSLLQSYREFTFQSLSSGFTAIFDIYSDLLMRSRLLNILPNELNGVVLIDEIDAHLHISLQKKILPFLSQSFPEIQFIVSTHSPFVITSTNNDTVVYDLSTGEFFEEDLSHYSYEAVIKGLFHVDTQSDHLKTEIQTIATILNSDPNNYEKLRETLKNIIPYAKQLDVESKSFYFKALNHLLDNQELGELDV

SEQ ID NO: 81479 - protein, 139 aa, Acinetobacter sp. NBRC 100985
MFKVTRSAKPKEWTNSDYTDPAVVKQLKLDFLSKCYLCEQTDFGNVNVEHFVPHLNKSKELRTDWNNLYYSCSHCNGIKGSRHKELFDCCNENHHVDVAIALQAPSVPNGKIVLTNTLNNGFIRAMLQQCEQWQSTSES

SEQ ID NO: 81480 - protein, 390 aa, Acinetobacter sp. NBRC 100985
MKINSIELTDVGGIPHLNLEFLNTQMNIICGENGVGKTTLLDSIGHIFTNQYSHILKKNINSNRATINGNVTDDRGNKLNPILLFNQSRPDQGSPMNGLGHLSFKLISLKVDRTFSYQKLDAITKDQTKQEDHASHQSINGIDYRDIKSWFLHRHLYSAHPEALKKEQLENFALAKRCFSILNPAFNFSRVDANDNEIMLNTPSGEIYYEYLSSGFKSTISIVFGIIKEIELRFKSPYMLAHEFDGIILVDEIELHLHPEWQGRICSVLKEVFPRAQFFISTHSPHVVQTALRGEVIALERNETGVSKRELPTSEYGYQGWTIEEILEDIMGMPDLRTQKYNEIKKRFEDALDEMNKVEAQNAYNELNKMLHPDYPLRPVFQMQLDSLGE

SEQ ID NO: 81481 - protein, 243 aa, Acinetobacter sp. NBRC 100985
MIKLERKEKPEYLSNEKVAELTERFKINKKDTVWKHTDIHSALLLSSSSKCAFCEAQLQTGTAYMEIEHFKDKDTYPEHVVDWENLLPSCKRCNTTKGTHDVVTEPIINPFDTDPKEHLTQAVCRIYFKTQLGESTRDVLNLNDDRLLRLRFETWNYVINQVESIYYDMERKTTLNRRERNKLANLLTSCQSDRAFSGFASTALHQSVEYTKIIALLKNHNLWDDHLELLHTSSLNLILDCRT

SEQ ID NO: 81482 - protein, 415 aa, Comamonas testosteroni ATCC 11996
MDFEQLKLHSWQQFAEIDISFHPRATILTGANGSGKTTILSLLARHRGWHQQSLATPKNDFITKALKYFSLFRSSSQKTSSDRSIGALRYSNGSTATLIVPEAQTAQYQVAISNQQPARFFYIPSHRQTFSYRRVGQINTIRKERQTAFDEIQHNQMSKHAGHHNDMPSSFLMKNTLLGWMINGYGVRSPTKTIMPPDPLQIRNFEGFRDALRLILPQSLGFEDLEVRDYEIVFICNGGADEFLLETASGGISALIDIAWQIFMFDTDEKAPFTVVIDEVENHLHPSMQRTLLPSLLSAFPHAKFIVTTHSPLIVTSVEDANVYALRYDHSKKVRSYLLDFKTEVMNAIDVLDEVLGVSTTLPPWAVDKLSSILERHSVLDPTSESMTALRIELGNAGLSRLFPEAVGRIAEARK

SEQ ID NO: 81483 - protein, 196 aa, Comamonas testosteroni ATCC 11996
MRRLYRPACPNPEALKTNYKHPDNKEALLRASHGKCMYCESQVSHVYFGDVEHIRPKAADKYPELEFEWSNLGYCCARCNNAKKDQFDATCPMVDPYSEDPNAHLIAFGPSVWHKAGSERGAITIATADLNRPELIEKRAVRLSHLQNALDACYRTTNETIRATLLAALDAEGAVDKEFSMFATALIAANRESTSN

SEQ ID NO: 81484 - protein, 498 aa, Rahnella aquatilis CIP 78.65 = ATCC 33071
MELTPFYIVSYTSDRIMLPLHDVADGKSGPKVSVIIGPNGSGKSSAIASLVDELEVMYLLLTSSKDNFKKLRHPKQAEIEFRYGGDIFKIMRDGLVLTALKNEVTIDIDRDSFPKHALAVAHLPTDKFRFSRNDDNLFYRYLGLRQATNMVTTGALEAKVISSLLNQSQCSSYHQALEEWLKVLNVGGDFEIEFRGLNTDVFHMGEIKDLNSISRRIQYRSVEDYINHLQETVDASITESSITMFLSIFGKICKELGEENLDSKGKRKNYILPLNLLIDDSKIDSISWDLGVEIIRKLRISDEIRLIVSKNGEKKAFSDLSSGERCVIGTVARLFEFATERCVIAIDEPEVSLHPSWQIKYIPTLMKAMKHLKSAHVLIATHSHFLVSDVDESSSLIIASNNDVGQIQFDRFDGDVYGRTPDNILYRVFGVGAATNFYVEHDLSEALQILSEPENMNFVKLKEIRRRLNRVSADDNPAFNEILNIIDKSLEGVNDAKN

SEQ ID NO: 81485 - protein, 206 aa, Rahnella aquatilis CIP 78.65 = ATCC 33071
MMLKINNPATIDPAVQRKLDDIPEVERPIKWDTSRTNAIKNFRNEIMTHGLKEQDNRCAWCTLPVGATGRRTAHRDHIAPKKLYPKWTFHAKNLVVVCEYCNGFAVKCDLDTVKTEKAAYDDMEFFIVHPYLHDTEKHIRFREKEGNEPGVVVEGITPEGIWTVNQLKLYEDGLTVLRAQELVYYRKINKLPHHFQILLNKATGRE

SEQ ID NO: 81486 - protein, 452 aa, Escherichia coli B093
MMNIRTLKLTNLGRFEELDVHLAPVEEFKSNVTVFIGNNGAGKTSILKSLATSLSWFVARVRTEKGNGSPIPEDAILNGRSSATIELQVLNTHPATEAATPYRWLLAKTASGKKSTTASSLQEASQLAAFYRDQYTQNSGASFPLIAFYPVERVVLDVPLKIKERHNFLQLDGYDNALNQGIDFRRFFEWFRNREDAENESGLPQDVLDKLSTRIDLDNAVLNALTAIMASSRDRQLTAVRTAISRFMPGFSNLRVRRKPRLHMSIDKNGQTLNVLQLSQGEKSLMALVGDIARRLAMMNPMLENPLNGEGIVLIDEVDMHLHPTWQRTIIQRLTTTFPHCQFVLTTHSPLVISDCKDVLVYSLDDGELTQLPSLYGQDANTVLLNVMDTDIRNATVAEKLNDLLDLIQKNDFINANALLNTLSLELPENHLELVKARMLLRKQEIKHARNN

SEQ ID NO: 81487 - protein, 219 aa, Escherichia coli B093
MREITKGQPPASLQQWVRAKPRDKNANQWFQELYAQKKWDIVGDLSQQCAQEQFYLCAYCCDRVTGTNRDTVNEHVEARDLAPARSLEFTNIVASCKTKGQCDDSHKNQPLLLTPLMPECETEFIFKISGRIEGTTPRAIDAIKVLNPGDSERNNRALIEKRKQLSDSLLWANGIDPSEGLEDDDLLQAVIDELLTPVDGYLAPFAPVVANILKNWMTA

SEQ ID NO: 81488 - protein, 427 aa, Pseudomonas extremaustralis 14-3 substr. 14-3b
MQIKRFTLVNFRGIEKMELDFEGKKTVALVGVNGVGKSSILDALAITLSSLTARMVGQPSKSRSIAKDDIKVGADYTRLHVETKLFENYNVDWAIALNRKAGKGGKHPSERSSDLSRLNEAADSVEHGIGQYEVIGGKSIELPLAVYYDVHRAVLDVPLRVREHLVNAIAEGYDDALGHGGADFKRFFIWFRNQEDLENENSRDIPGYRDPELSAVRRAIETFTGFKDVRVRRKPALRMTVLKGELEFNVLQLSDGEKCLLAMVGDLARRLTLLNREVPDPLQGKGVVLIDELDLHLHPGWQRTVVANLENTFPNCQFIITTHSPQILGELPAESVMLLKDGQYLGHPERSLGLRSGEVIEELMGGLSQNQNVSQQLRKIYRNLDDDDLESAQIHLAQLREKVGKIPDVLEVQASIDSLRSLEEGEA

SEQ ID NO: 81489 - protein, 239 aa, Pseudomonas extremaustralis 14-3 substr. 14-3b
MRSIKKGAEPRALIDWRRENRETPQNLFYGKGSSFPSEAVRQALLKEQFHLCAYTLRRLPTAAECQVKNQGTQFSCHIEHILPQHPYKADSIVYTNIVACYPSSQTKTVCGYGAVEKKDYDPAKKPFISPLTAKVERYFRFTRDGYVEGLTPEAIATVEVLNLNHPTLVNDRSAVIKGRLQPRGSYISAAMARRLIEEVDIPDAYQCLPEYCQAIKQQAELHAQRLEKRAVRVRGQVRG

SEQ ID NO: 81490 - protein, 429 aa, Pseudomonas extremaustralis 14-3 substr. 14-3b
MLKLLSLKGVGPAEKFGPVEFAPRLNFITGDNGLGKSFLLDAAWWALTRTWARGSEAIPRESSRSASIEFAFSKVTTGDKAGEVHFKDGFWRQPKARPSIPGIVIYAGVDGSFSAWDPARNYWTDQQAGTEEKIRAFNFSPDEVWNGAVSEKGTNICNGLIHDWVRWQRTASDSSFKELTVALDALSPSGIEKLSPGEPCHIGPLDETEYPTLRMPYGLDVPLVHASAGMRRIAALAYMIVWTWNGHKRACKQRKVNPAKEIIFLIDEVECHLHPQWQRRIVPALLKVVEEMTQEKVAVQLIVATHSPLVLASAEPEFIEEKDAVFNIHLDRGQAKITKEVWSKQGDVVNWLVSDVFGLQQARSVAAEEAIEAAEAWMRDDKDALPENLATQSAIHQELVRVLPGLDDFWPRWIVSQGKPEKESKGKRS

SEQ ID NO: 81491 - protein, 201 aa, Pseudomonas extremaustralis 14-3 substr. 14-3b
MTPVLNPIPEPEKFDEKCRKPGGLWLRAHPTAERPRDLWSPFRHALADGFDDRCGYAAMYIPSGTVDHGISFNEDPLLAYEWSNYRFIDGWINSSKSKQVAADLLDPFEVQEGWFEISLPSLQLVLTDAVPAEFRARAENTLKKLPLRDDERILRPRRKWLSLYEKTGNLEMLREMAPLIATAVEKKLALEAAHAPAPGNQ

SEQ ID NO: 81492 - protein, 521 aa, Myroides odoratimimus CIP 101113
MLNTDLTSLIVGQNGLGKSNLLEALSLIFIAIDSNSNDDEVTLSSFENKYFNFDLKYKLKGKSINICYGVNKAYYFKIDDFTYQFLDYNKVRDQLKKDLLPDYVVAYYSGQNKRLEKIYNNFEYKYINGLKKNQDNEKLTDLRKFIYLKKSHGPLLLLTFSIFSEFQSNGRYIYKEYFDKLLSYLKIEKIDNFAIKICSPYWVKYINDEDEEQKKSKGHVSYIHETLEDITKYPNPFWNLKSSLNLFFRALAYTEDIVPYTNEEEDDFKRSNFREYIDIHNVKINEISVELFKNFKSPLELFYTLEALYFLEMVDEEGIKFSVTKNTHLDINYDMLSEGENQLFIVLSSVLMTGNEETLFLLDEPDTYLNPRWQREYVNLLEDFNLEDDDSHIFVTTHSPLLVQNIEGENKYKYDLLLLYQDLDGNVCIDSKNGIIENWRLDQVLLSKYFNIESTRPLRIDEFMKERINVIQGKFSKEEAQRRLKEFDKKTIGYLPSGESMIEIESLKFLYELAQSKNDKT

SEQ ID NO: 81493 - protein, 260 aa, Myroides odoratimimus CIP 101113
MIKLERVDNSCPICLSGNGEAKKEELKVSFVADKEGFLKKTSKELFDSSIYAHNDVKKKLIEFQKNKCCFCESEVRSVSHGDVEHYRPKGGWCNNEGTEIQKPGYFMLAYDWTNLMFSCQICNQRYKKNFFPLSNSECRIVIDDNYDFSEELPVLLNPYEDNPEEFIEFIGEIPRAIDNNVRGVGTIKYLGLNREDLNTTRRELLSPYLHFVSLLENDNIGDDVKSLILIELNKLYEAKINNKGIFMQMIKDNIGEYFKK

SEQ ID NO: 81494 - protein, 393 aa, Haemophilus sp. oral taxon 851 str. F0397
MKIESLAIQDVGGISSLKLENLNPYLNIICGVNGIGKTNIIESIAACFTTYSQNELKKKADSNSGLIKLNMTDINEEFKKIEYIVDAFYPRESNYNNKNYSTLYRFWENYLNFLMYFKVDRFFSYQRIDSLKIHDDINEHTKSNLNGVSRNNLKDWFIRNELLSKQEYATDVNKKNIEYAKEFITLLNSNYSFSSLKQDMEIYINSPTGEIPYEYLSSGFKSCLFIMWGVIREIQIRFPDIEAKNFNGVIIIDEIELHLHPEWQNKICNVLKRAFPNTQFIVTTHSPHVIQTAEHNQVIALEGINGILNKKDLESARNGFSGWSIEEILTDVMGMSDLRTDWFKSTLSKFNSALDEENFENAKIIFEELERKLHPQSTELALFRFQLKALTGE

SEQ ID NO: 81495 - protein, 238 aa, Haemophilus sp. oral taxon 851 str. F0397
MIPLQQLPKPDYLTDKKVQELTNKYQLDTKKAVWNKAEIKEPLLKSSNKKCAYCECILQETDSYSQIEHFHPKSLYPLEVVVWENLLPACVRCNTHKGNHDTVNIPIINPYNDLPKEHLSTQGLRLYPKTEMGKITIKRLNLNDNDRLCIPRFKLCNEVHEKLGYIKDTTDLLDQRNRLHSLLTACSKSGEFSAFCSHALHSNIDYTNIKNLLSENEYWDDELAKLDEETKSIALESR

SEQ ID NO: 81496 - protein, 449 aa, Prevotella dentalis DSM 3688; identical to SEQ ID NO: 81426

SEQ ID NO: 81497 - protein, 223 aa, Prevotella dentalis DSM 3688; identical to SEQ ID NO: 81427

SEQ ID NO: 81498 - protein, 414 aa, Fusobacterium nucleatum subsp. animalis F0419; identical to SEQ ID NO: 81168

SEQ ID NO: 81499 - protein, 188 aa, Fusobacterium nucleatum subsp. animalis F0419; identical to SEQ ID NO: 81169

SEQ ID NO: 81500 - protein, 436 aa, Methanoplanus limicola DSM 2279
MIIKKLKVHNYKGIKDLEIQFTENITIFAGVNGSGKTTVLDAAAVLLSWFIARTESIKKNGQIIPETDINNDESESSLEIYTELKEAFEPGTNNTVINWKQAKTRKGRVKKDESDYSNLNKAVKKIQNHIESGNNIPLIVYYPINRSVIDIPLRIRKKHQFDGSVTAYENSLTGKTNFRTFFEWFREREDFENEKKASEFDENINIQNKISEYSDYSGDIQLNAVRSAIRTFTGFEDLRVRRNPLRMLVNKGNNILTVGQLSDGEKCLLAMVGDLARRLSIANPKMDNPLNGSGIILIDEIDLHLHPKWQRMIIPKLKETFPACQFILTTHSPQIISHVRPEEIILLYPDEKSGISVKMPLDSYGMNSDRILEEILEVPSRPIEIENKISELFMLIDKNKTEEAKKVHSELKDLIGADPELSKAEIIIRKLVMLNK

SEQ ID NO: 81501 - protein, 193 aa, Methanoplanus limicola DSM 2279
MKYIKKTIPSEYYAWAKKWPSDYPLHWDDLDSDSQIKSRMKEGLLKEQGFICCYCEIRINDNNSHIEHFRPRSLFPEDSADYNNLLCSCQKNPPKGEPKHCGNKKGNWYEKDLIISPLEKNCEERFRYTFDGRINPADENDDAARETIERLGLNVKKLTDSRKMILEPFIEELNIKSYADIVSEINRLIEIDS

SEQ ID NO: 81502 - protein, 426 aa, Leptospira weilii serovar Topaz str. LT2116
MRIDILRIKNFRNFASETFKFHPNFNLVVGENGAGKTSLLDAIAIAAGSWFLGIQGYDSRSIKSDEVRVQRNESERVINYEGQYPVSIEAEGIIQSENLKWTRTLNGPGGRTTRIGAQKAKDISEQAARSVAQGEKNVLLPLIAHYGSGRLWVQPRDMTDFYNQEQPQSSRLDGYHYSLDPRIDFSELFRWIRNEKYISLEDGKDRKQYVAVKNAIIGCLDQGKSIDYNVKAQDLMVEINRQGTLPFRLLSDGQRNMVALAADIGFKAAQLNPQLGDKVLQETPGVVLIDEIDLLLHPKWQRRVVHDLKKTFPKIQFFASTHSPQVIGETPNNEIILLTANGPIHPDISYGVDSNWILKYVMDSQDRSAETRDLINKIELELSKNDPVRAKELLNELREKLNGEDGEFARLQAKIERISILSKTEL

SEQ ID NO: 81503 - protein, 227 aa, Leptospira weilii serovar Topaz str. LT2116
MRYIQKGSPPYSLLHWKTQRNPPSEGLIDNYEELRRDQNVLNELKTSLLREQGYLCAYTGRKISDSDFHIEHIIAQSHCANGEDTDYHNLLVCFPKPNTSCEYGAIEKKDWPSPSQRNLFISPIMSICKDSFDFQTDGEIIPIGQYQDAAKETISRLNLNHPKLKDFRKEQIDSFLFDDPLSKEDLRNLLKGLQDAEAKIYDGATDQLTPFCFVFSKIIEKLLSLSQ

SEQ ID NO: 81504 - protein, 986 aa, Burkholderiales bacterium JOSHI_001
MRKALLGGSICTNGCKRRAVAAILAAAVALPCSGASLNPISPGVPASGAAADKVAAAAGFDTLVLDGKINSVSPANLSAGAPMMVTVHLLLARPTPAVVLERNLRLFLDSVPLVSAGAEPTAAASSAGAAAPPSAESNFQAQSPASTAFTRTITLMASAPRTLATGSSFNLSVYSIPDRRQIAAMDIQSLPPQGFVQELLAGQPKAVLPALGIAILVLGALAWFLYRQQMLNTRRETLMRQEVELERQRTQNLGRAVVSAADDANAEPTPPYPPQLPPELLTALEQRDLVIVTGVGVSAQSGLPGASKLWLNVIDRHAERISATRLDSLRALVMTGDTDAAVEAIVSLVGRDEVLATLKSDLIDSQPKPSHLHRLLAALPAAGLVDMTWDDLMPRAVVGPDMQVFGPMQTEGITSLLRGGQLALIKPLGDLRHPASVALTQREYRVVLSRAPELERAIAALFSTRTLLFLGFSLEGLEQFLSSLPAHLDSSDRRHCAVVPEGADRADLWQAGQGRRFGVKLVEYRPSADFRELVQAAEVLTERAARIGKASRADATGMSLAATRLSYLQLESIGIFRSLRVEFTPGWTLLLGNNGGGKSTILRAVTLALAGNDPRATAAGARLLRSGENLGTIELGMGNIRVSTSLVRDGTQVLIRSPQTTALQAGQVLVLAFPALRGVLAAQIKGPTSVPAANPSVDDVAPLLSGQVDSRLDNLQQWVVNAALRAETAPKGREMQMLQTFQQLISDMVPGGGLKFARIDRRTWQVILQADYGEVPFDGVSQGMSAILNWVGILLQRLYDVYPQSEHPERESAIALVDEIDAHLHPDWQRRLVTLTRKHFPSVQVIASSHSPLLAGAVEHTELRVVARDEASSQIRADMPREDLSGQKAEDILVSSLFSLQTTRSVEAEETIRRYFELFQRASLSDPEKLELDELARRLKALNFGPTLAMRTQIDQASSAADVALAKVSPADVQALQEKLRTIQQA

SEQ ID NO: 81505 - protein, 283 aa, Burkholderiales bacterium JOSHI_001
MIPIPRPDLADDQWKHWHDSAQQAMDQLVSQYKPGQEVALQDVVYQEAKPYLMKLSHGKCAYCETLLAANQPGDVEHYRPKGRIRDETGKVVKVKLQNDEIEHPGYWWLAYDWRNLLPSCTDCNRRRHHGLEGVAAGKGDYFAVRGHRAALPSDDLDQEQALLLDPSKPGFDPKQHFEFLPNGTLKPLTEEARHSCELLGLNLREALVSERELSYLQAKQAFASMFAQLLSDAPASTLARVRQQINDMWQGRSAYSAFARQALESVVANLQRTTGTHFELPLP

SEQ ID NO: 81506 - protein, 950 aa, Beggiatoa alba B18LD
MNFNKRLRLASEKAEAGEHALNTANYQQAVDNFLEASELFKGIKGQEQNYASCLVNTANVLNNLGNYTKAETLLNKAIPIQKKILGSEHPDMATSLGNLANIYQAQGDYAKAIEFNEKALAIEEKHFGSQHPDVASSLGNLATIYQAQGDYAKAIEFNEKALAIFKKHFGSQHPNVATSLGNLATIYQAQGDYAKAIELNEKALVIREQHFGLQHPNVAMSFNNLANIYADQGDYAKAEEFYEKALAIWRNKFGNDHVAIADGLNNLAESYRKEGKHAEAKQLHQQALAIRESKLGFEHPKTTQSLRNLAETISQVVSSLIRLSSISQLHNTVLQFLLQKREKNPQLFFTLRTHRNDEQGRLSRGYWFLEEEEFLYFSFWKGIDSTNQMPTIAIEINLEQQLTITFNGNDSREKAEFLQDITQLLDGFIQSTDGKQWKKTYPQDWQSALDAFLIDKTQIDDYLAFKGNQIADFSFIPEAEFLQALKFTTLLRQKLESAEIKILTEIGKPLKLHSLQLENIGHFESLGIDLSRQVTIFIGENGSGKSTILKAIALALSGVPRTLDTELIQNYLRILNTDFDGTKHFCNNGSIHLNLQINAIQSQIIEFNDTELGGIGVETFVDNEDEWLLSSENRFIDLVLGFPQGKKRAQKNVGKIAEPNLNDVIDLIEDRDIANWKNDLVEWIVALYREPDAKIRTENLVQINWVFDIFSKIISDTDATAIRLKSAVHDPATGKKDIIICTPDMPDGISLDLLSQGYTNIFIWVGRLVMRLYSALKAHQTIAKDDKNLFLRNPNTRGKRYEANTIEELHGIVLIDEIDTYLHPTRQRNILRVLVEKFPHLQFIVTSHSPMVLAYLTQWKNTTVYKLENNIATSVQHFYGRNEIDLFFEFYGIEARPPEIQEKIDALYNFFDQEQLEPAKQLLNELREILGDNDPIINELSTSIDLMENL

SEQ ID NO: 81507 - protein, 265 aa, Beggiatoa alba B18LD
MRRIYKTPCPALSDFIKQEKDKKIDPVYKNGLDSKEEYKQHFFNLRKQLLEEQGYICCYCQSRINLVENEMPKMKVEHFKPKSKYKDLELDYRNLLASCLGNSNSETHCDSKKLGKELEEVPNPESKEFEQFKIKYIAYKITANTQGKESDKYISVMPLWNEKIKQAKAENKEEDKIGLEKNDPLTGIEEGCLNLNHQTLMSRRFGAWQGVSNIFYKKIGKNWHIEKGKKLATDLIEYYNKTNDRGELKEFCQVIIDLLKKEFKV

SEQ ID NO: 81508 - protein, 427 aa, Beggiatoa alba B18LD
MSLLPPFKINMLQLQNFRGIKSLNIEFNEQVTIFAGKNGAGKSSILDALAMSLSWIIARVRHAGTSGRLIQENDIYNTEAYALIKVEGKTDLPIVWQLFKGKKGKPKSIESSVLHDVSNYAKNLQVQLTEHNILPLFVYYPVNRAVLDIPLRIRKKHKFEILEAYEVALTSAADFRQFFEWFRNREDLENEEKAFYQQKLNKDDVQLSAVRKALEIFLSELTQFRVRRNPLCLTAIKQGIEIQVNQLSDGEKCLIALIGDLARRLAIANPSLLNPLEGAGIVLIDELELHLHPAWQRQIIRQLTQTFPNCQFVLTTHSPQILGEVEGKNIRLLHRDNDTKEIVCYTPKQALGLDSAEVTSELMQAEKRDIETTNALKTIFDLIDKEDFSQAKVAIDNLKHRLNGDIPDIVQAEALITMLAMDNEHHD

SEQ ID NO: 81509 - protein, 213 aa, Beggiatoa alba B18LD
MIKIVKHIEPNSLIQHRCQDNATYNDLSKEAKDELRHQLLIEQGYLCAYCMQRIEKENSKIEHWHCQSRYPKEQLDYKNMLAVCQGNEGQDEKQQHCDTKKGNTDITCHPADSASQYLLETLKYLGDGRIQSTESELNKQIETILNLNISRLMDNRKNIVIAVKKVLNSKKGSRTQSEIQQYLNRWKSRDVGGKYQAYCGVAIDYLEKKLKRF

SEQ ID NO: 81510 - protein, 443 aa, Beggiatoa alba B18LD
MFIKTLRLKNFRQFQNFEITFNQQLTVITARNGQGKTSILDAVTIALGTFVGAFDFGKACHLAQSDARYTKNGFSSDFSSDFYAERTQQYPVHVYAEFDEPLLKGFRELTGKKNKTTIKDASEISSYGKELQQKVREGQTEPLPVIAYYGSGRLWKTHKNMAREHVLSESRTIGYEDCLSPVSNFVQVQQWMAKATYAELQQQARAEKETSIAIRLKTVENAVNQVLKKEGWDNFHYDLELEELAMTGLHSETGDLPISLLSDGLRAMIALVADLAFRCVRLNGFWGEEATLKTQGIVLVDEIDLHLHPEWQQYVIDNLRKVFPLIQFIVTTHSPQVLSTVKQEQIRVIGENVNRELIASIPLGMTYGEPSQSVLQGVMFVDPQPPVKEKVDLQRLTELVDQGCYETSEAKELQQKLETLLGKTHPQLQRLQRSIERQQRLKK

SEQ ID NO: 81511 - protein, 226 aa, Beggiatoa alba B18LD
MRYILKRQFGEYHLNEANKNPPSDKDSATSRWSSFGYKDVVCQCLLDEQNFLCCYSEVKLEHCSSDAYDYHIEHVQPKSLYPTRTFDYQNLAVSAFSAEDLKSYQREELFGGHYKLGHYDPDLFISCHQVDCANYFCYTSDGRVVPALQLSDVEKAKAIYTIDILNLNSHLLVNLRQQYWDELEKIWKEHEQKNWSIEDLKKIQLEPISNRLYPFFSLSRQFFGDS

SEQ ID NO: 81512 - protein, 441 aa, Niastella koreensis GR20-10
MWVEELSVDNIKCFDKINLKLGSKTEPYKWVTLLGENGGGKSTILQALGLLLAGPEGATQLLRPTGWLRNEDQYGRISTKIHKGANDPGKFGEQKARTSFGYSFLITGSKKITIRKKLYTEPSIVENKDKILTWLRQNALTSNGQGWFASGYGAFRRLTRSGRVIVPSLAPQERFNNFSSQFKEDEALSAFEQWMVYLDYRIAKGDSGSSKQAEKQRDLGVYAINQILPPGVKFDSVTDDARILFDIKGMKVATLNLSDGYRSVLALAGDLIWRLLDQFPESDDPLKEEGVVIIDELDIHLHPLWQRSIPDLLRSQFPNIQFIVATHSPLIAAGAGEDAITYRFTFNNGSTDVHQIRNIAYWNVDRILQSEAFGLVSPFSPQVEANIEKYYILKKKAKLTQAEKNELQTTLPFVENSIGYGDKEKSETEKKLDEYLKNHWK

SEQ ID NO: 81513 - protein, 228 aa, Niastella koreensis GR20-10
MIRIIRPVEPVVLTNNKKEWTRVYLTAREVYNVTPTPNNKRAKASAESKYNHISVKEALLMACNSKCVYCESHITHIAYPHIEHFKPKAKFPKLCFEWKNLFLGCTICNGPTYKSDKWPTSSKGGPFINPETENPNTFFNFIFDEKTGVSLVHPKGKRARTTEKELGLNRIELLKHRNPVVKKLAYIALQASKGDKAALAELKFCMEPDQEYSAFARSFFRKFKLKMK

SEQ ID NO: 81514 - protein, 485 aa, Klebsiella oxytoca 10-5245
MSFYIESALVDNKRIELVPQSIHNIGNIYTVLIGKNGTGKSIFLSKLANSLCSIQVENKYLKRDFDSNEKNNAKMSFNIVNDGVGNEIRLEGRKFIDGDSKYLLPSVLTCISTSPFDKFSSERRFYNSKHDINTFYHYFGLKDLGRKNAIHAFIEKILYSRINSSLKNDRESFEKILGFLNYQPKIKIEFRTRVRLKKLFELDDEELIRQIEKPIFTPTGIYKWSKNQSNYDVPRIRSSLFLINDYILASSDRRSNSGSEARYFDVEINALNENMINISEHVMHEMLYLMELNLLSIRDIYLYKKSGDEVILYEASSGEQCLLINTFGIANSIADNALILIDEPEVSLHPEWQEVYIELLMDVFSHKKGCHFIIATHSPQIISNLKKDNCFITTLENGKTYHAKDFINKSADFQLATLMETPGHENEYLKRLAVNILSKISANEELSDQDINDVLWLKDISKNLEPNDTVMFLIGLIVKSKVSLK

SEQ ID NO: 81515 - protein, 212 aa, Klebsiella oxytoca 10-5245
MISNAYLYNNDFQERINAKISSEGFCSDSWSDNDISDIKESIKQFYIPEQNHICPYCQQRFLTNNGRQWDIEHIIPRQTQLGFMFTPQNLCVCCPDCNSHKGYKKTTTSVAKKTLPTKSHLYLIVHPHFDKYDDHIEVIEPGYLYRAKSKKGENTMYVCSLNRFYQFSGYNSAVATDHRLMMLANGLSSAQSEEEKRQIRREMISISLRANI

SEQ ID NO: 81516 - protein, 408 aa, Raoultella ornithinolytica 10-5246
MLCSISKINIPIPYSRKKVNIQLDGRSLIITGGNGCGKTSFITAIYNYLKKGIDSPNNNNVEYLSRQINNHTRLMEEAGRDGRAYNSYKNEVEKNKARLEEINNFNIEIESIDNKDIRSLLRFHSATRQSAISSPNQAPKHSVLIEENKHFSNDKDGSQFFESYLLSLKKNQSYAIAFDKDENEAKRISLWFDKIQLDLRSLFEDPDLVLEFDTKDEKFYLHQDGKDRYTFQTLSAGYSSILSIYTDLIMRVEMWGVSPDNIQGIIFIDEIDAHLHVSLQKQILRFFIKSFPKIQFIVTTHSPFVVTSVTDSVIYDLTANEQIIDVSSYSYGVVMEEIFGVLPDSHALTDKLTHIENLVQNITPENIGELEKVISSFASEKENMSNDTQAFLDTAQLKLIKTKKRISE

SEQ ID NO: 81517 - protein, 217 aa, Raoultella ornithinolytica 10-5246
MFNVVRSMPAPGSLLTHKKYDGDDVHSALQECFHEKCYLCETKKPLDINIEHFDPHMGDIIKKFSWDNLYLVCSRCNNIKLAKYNNLLDCCVISVWDRVKLTPGFSPKTKKFIITPQFSDDKTLETAQLLNDIYNNDNTINKRLTARSLRTQVVQTTHKLTQHMIVYYSEDSTNEEKENSLNKIKVMIKKSYPYSAFCRWMIKDDEELDKLLTPVMD

SEQ ID NO: 81518 - protein, 550 aa, Escherichia coli DEC1A; identical to SEQ ID NO: 81308

SEQ ID NO: 81519 - protein, 216 aa, Escherichia coli DEC1A; identical to SEQ ID NO: 81309

SEQ ID NO: 81520 - protein, 550 aa, Escherichia coli DEC1B; identical to SEQ ID NO: 81308

SEQ ID NO: 81521 - protein, 216 aa, Escherichia coli DEC1B; identical to SEQ ID NO: 81309

SEQ ID NO: 81522 - protein, 550 aa, Escherichia coli DEC1C; identical to SEQ ID NO: 81308

SEQ ID NO: 81523 - protein, 216 aa, Escherichia coli DEC1C; identical to SEQ ID NO: 81309

SEQ ID NO: 81524 - protein, 550 aa, Escherichia coli DEC1D; identical to SEQ ID NO: 81308

SEQ ID NO: 81525 - protein, 216 aa, Escherichia coli DEC1D; identical to SEQ ID NO: 81309

SEQ ID NO: 81526 - protein, 550 aa, Escherichia coli DEC1E
MTKQYERKAKGGNLLSAFELYQRNTDNMPSLGEMLVDEWFETCRDYIQDGHVDESGTFRPDNAFYLRRLTLKDFRRFSLLEIKFEEDLTVIIGNNGKGKTSILYAIAKTLSWFVANILKEGGSGQRLSELTDIKNDAENRYADVSSTFFFGKGLKSVPIRLSRSALGTAERRDSEVKPARDLADIWRVINEAKTINLPTFALYNVERSQPFNRNTKDNAGRREERFDAYSQALGGAGRFDHFVEWYIYLHKRTISDISSSIKELEQQVNDLQRSVDGGMVSVKSLLEQMKLKLSEASERNDAAVSSKMVTESVQKSIVEKSICSVVPSISKIWVEMTTGSDLVKVTNDGHDVTIDQLSDGQRVFLSLVADLARRMVMLNPLLENPLEGRGIVLIDEIELHLHPKWQQEVILNLRSVFPNIQFIITTHSPIVLSTIEKRCIREFDPNDDGNQSFLDSPDMQTKGSENAQILEQVMNVHPTPPGIAESHWLGDFELLLLDNSGELDNQSQELYDKIKTHFGIDSAELKKADSLIRINKMKNKINKIRAEKGK

SEQ ID NO: 81527 - protein, 216 aa, Escherichia coli DEC1E; identical to SEQ ID NO: 81309

SEQ ID NO: 81528 - protein, 550 aa, Escherichia coli DEC2B; identical to SEQ ID NO: 81308

SEQ ID NO: 81529 - protein, 216 aa, Escherichia coli DEC2B; identical to SEQ ID NO: 81309

SEQ ID NO: 81530 - protein, 550 aa, Escherichia coli DEC2C; identical to SEQ ID NO: 81308

SEQ ID NO: 81531 - protein, 216 aa, Escherichia coli DEC2C; identical to SEQ ID NO: 81309

SEQ ID NO: 81532 - protein, 550 aa, Escherichia coli DEC2D; identical to SEQ ID NO: 81308

SEQ ID NO: 81533 - protein, 216 aa, Escherichia coli DEC2D; identical to SEQ ID NO: 81309

SEQ ID NO: 81534 - protein, 550 aa, Escherichia coli DEC2E; identical to SEQ ID NO: 81308

SEQ ID NO: 81535 - protein, 216 aa, Escherichia coli DEC2E; identical to SEQ ID NO: 81309

SEQ ID NO: 81536 - protein, 465 aa, Escherichia coli DEC14A; identical to SEQ ID NO: 81096

SEQ ID NO: 81537 - protein, 201 aa, Escherichia coli DEC14A
MVQLINEQYHLCCYSEIRSDLRGLGYHIEHVENKSQHPERTFDYQNLAASALDSGENGGLSSLKGKNAFGGHAQGKQDVVDMAKFIHCHIRDCSRYFAYLSDGRIVPADELNAQETENAQYTIDLLNLNSGFLQTERRNHWEELEQLFDEHIEKDWDLQQLLQLDLVPTPDHKLHEFFSITRQFFQQEAEQVLQSHAPALI

SEQ ID NO: 81538 - protein, 532 aa, Saprospira grandis str. Lewin
MIYPKSFPASENTSYLDEQIYLRLKELVDQGEELSVSFHHEVYVKTTEAFEKERGIVDIIAVLDFLIFIPTKGLLLLQEDAHELIPAVLKQLYNSLREKWPSIPIYTAYSSAFSNSSLNFKDWLMQQFAGETISLTTEEQEHIEHHLKENNLYYTPSGRLSAFTFENFQGIKSSGLENLPTSANWIFLTGENGYGKTSLLRAIATALYAEIPMAEENKGFSSLDQKDKKTKLGLLLQSPDDDEKNYYVYPRERLKTVYRNVVAYGPARLETYEQDEPSKTVVKNPILSIYRSSIPLRSIEYYLKLWKLHSDETIQEKFKQTIALLEQLLGAMGMQIEVTKSQRVFYLEEGKSAIQFNQLASGYRSLIAMVGDLIIRMFEAQPDVLNPVEFEGIVIIDELDLHWHPKWQQKIPQLLTDLFPKIQFIASTHSPIPLLGAPEGSVFLKVNRTAEKGIWVERLSQLEKEIHKLTPNIVLDSDIFDFDFFEGKSNEELEQIYVEDDYETVQKNKEIEERLKNVSVDIFPKDLFSNED

SEQ ID NO: 81539 - protein, 287 aa, Saprospira grandis str. Lewin
MVHRNKKFDAEPVLLVDPKWNDLKAKLLIEKHNHEVKSSCYRDTTIEALHTIYAGKCAICERKRGLELQVDHYRPKKTRNNKSEREYNQPGYYWLAYSWSNLIPLCSKCNNAKRNKFPLKGWTEISRVDSHTNTKGLDPFEPYNLIWLQQQEQPLLINPEVETEPERHFKFLKNGSIVGRTEEGKETIKICNLNRTDLRRERIEIREKYASKISAAIHDYISSRDQAELKGALKSIFKEIRENTHKNKAHSLYHIYIYHYFDLFIAPYLPNSVRARISHFFQEFKRL

SEQ ID NO: 81540 - protein, 399 aa, Saprospira grandis str. Lewin
MQITQLTIEGFRGFREKKDILFPEDGSPLVIVSANGAGKTSILEAIRIPLAIIADKQYDRRQSYRQVIGQRDLNRKSSTLKIEAFFKNKEGLSFSYTITCDGKKTEITPKHSSTPAIQPLVYFSTDRIFRETPTKNYLNQGAKDAHVDALNELANFSLFYSWISQSEKSIRQPARDSKTKLSIVNQAIKNLFCRNDYEIFIRKNEDSSDLFFRKGDDEFSIFQLSAGEKNIVSIASDLAMRLFMAYPNSNAPLNEKGIVLIDELELHLHPKWQEQLRHQLIETFPGIQFIITTHSPIIIRSLESESLINLDSESVIGLEEDPFRYSVEEVLSREMGVKDVQRSQQFKEMEAAATAFFKLAQQKDNPEAIAEAKKKYQELSKQYSKDPAYVALLAAKLNL

SEQ ID NO: 81541 - protein, 217 aa, Saprospira grandis str. Lewin
MRPLNKPTTAPNYTDDSPYGEAKADLIQALGEYCSYCERHINDKKALQVEHIQPKSLVPNLECVWDNFLLACASCNIHKGIKNPITLGIRLPHTNNLMLDLEVDPDSSLISANNPEGQAFIELVRLSDVAGTATLGDDRYEKRFETAGIAQNILEDYENGEIASKWVVRVAQTHGFFSLWYTIFQGHPEVIEELISNFQGTHPAAFDSTNNYSLVAI

SEQ ID NO: 81542 - protein, 620 aa, Saprospira grandis str. Lewin
MSSNFEFLREAMPKAYYCFYRAEQALLTHPFVGMMYMRKGRGQVNITLFTALEKSGNTKRWIDLYKKYKTASLSSDSLNILIKDSVYWTTEGNASLVNQSSWEEEVKLFLSNFFESLKKTLGHIEYVQGQKLLKDGHLIEEIEFDASIKRAVNADFLREDEALFEFWASAYLLLMEKEKLAQEKPAILKAFEEEDLAFFVKESKAFSAVYLNEKVEAGSLAYFESVLGDLDVFLGQVVLPRAKLNSLVFSDVYSLKKVDLDFEESPSWIFLTGENGYGKTLVLQAIAADLYGEDEVTYEFLKEGLGGGSESLLYLRFGYSFLSRMATAVNGHYDPHRNVIAYGSSRLVPRQVVKQAGEYNMVRSLFESDAPLRDIEDEYINWFARKEIHPRSKARYQQVKALFEEVVPDLELEIDEENFDRLYYRFKGDWAETTERLPFNRLSAGYRNILAILGDLVLNLYELQPTVTDIKALGGIVLIDELELHLHPKWQHKLPKLLSDAFPNVQFIASTHSPIPLLGAPEGAVFLKVDRDQERGIFVERLEGLEKEIEDLLPNTVLSSPLFGLKDLRSIKHKEENPVKVEDDYAEIERKAALEDALNKRLAEFDFSEDLKKEQDEKGE

SEQ ID NO: 81543 - protein, 319 aa, Saprospira grandis str. Lewin
MRKVNKDFSAAPQKLVDQFADEEASLIRAKEDHSFNPRIYNTAIKSELEALYHHKCAYCESPMGTEQFTVEHYRPKKGRNGYWWLGYEWSNLLPVCKDCNGPKADVFKVKGKDLHNCSERMKALKISQGGPFRSLKPPYTDTTKTALDRAQMRADSPYLLAEGPYLLHPEIDEPRDYIEVRKNGEIYSIEKGNQRAEETIKLVNLNRFNLYMSRLGIIDAAKFAIVEAISSSFILLDELDIPIPEGKQKEVLLTIAKRLIASEIKKLEKKLAPNAPYTLTTYSLLKNDCALLEKALDDQQRDIFKLALIYYKKNKALTP

SEQ ID NO: 81544 - protein, 441 aa, Saprospira grandis str. Lewin
MELKRLVLEGYKGFKNRQEIVFPEDRKPLVFVGMNGAGKTALLEAIRLGCDAFAAALFDSESEGLTINQLSYIAQEVQSSIHIDKEEASIKLSWSYPIEEPSTLFFVQTDLRNGPTLSEGYRRSQLAGNFWELPKRILTNLNERRKDYSLSLAVYYPSERLIGKGDDYDFELDYFNRNQLMAFKGALERSINFQQFLDWFKEQEDLENELRISSKDDYRDRALEAVRQAIASVLDDFSSVRIQRHPYVDMVVKKGEQKLSLKQLSSGEKALLTLAGDLAMRLSLANPGLKQPLEGRGVVMIDEIDLHLHPRWQVDVIGRLRKTFPNIQFIFTTHSPLIINRLPPESLYYLDNNECYPATSMEEITYGADIDRILAWQGVKDVLPRDIVDKMDEISLLIKDNALEKAHIELQQLKQRMNSAHPTLADLEMDLEFKQSENEMD

SEQ ID NO: 81545 - protein, 316 aa, Saprospira grandis str. Lewin
MKWIDKSKPTPADLKEWHDYQLSLGKLAADYADSNVKGADIYKYLDHSRERYLGDTEGYTKEALRKTLVEEQAYLCCYCGKQIELNHKTIIEHLYPKSKDKSKTFEYANLLASCDGGQHYKPFYTLKAADIKASYEETLNTLEEQLSLERDSLLALYVEIPVEEHEKWLKQLCDIENLKSGDQLFIARPSSVQPHCDDKKGGHIIPLDPTMKTIATYFEYLPSGKIQAANLADPIKEEAVKKTIDRLGLDAPLLEDGRERAFKEGKKWKRKLGLEYGRATPDYEKAVAFYVKKWNQPDAAGKLAPFVFVKIAALCS

SEQ ID NO: 81546 - protein, 751 aa, Saprospira grandis str. Lewin
MRFWSVKVGDELLDLFIEAEFIVYPQKLNELVSKEDFWILIGDYGEAMALAQITGDFIQEFEEAEYFDKLPKLNKYLSTPTRIKIFNPEELFRYKSRYTFEEVSDDSTIKKILELGRESVSISRSALSTLNFLRKEQPSLYFRLRARNTANMLKKGYFFLGDKDNCIISFWMGDDLLAKRPNIYLEITFMGDIKLILSASDNMNKAAFFKKLAVKLGGMQYNSKEGGKGGYWEKEYEVGNFSVWLQSFVDGDKETIDAFLLLEQHKKSPLGNLGFIPQEFFERQLAKVMPYRKSLRYNSFNELIPDSTPSSAPSLPPRKEQHFRLQRLVLENIGHFERLELDLSSRIICLLGHNGSGKSTVLRALALGLVGIDDNPALDLREKEIQRLLRIDTETGTYRLEHPYRGKITVDYELEQDYRNKVEFSKEAGMFFVGAHNSMQIERDSFGLAAGLSQYKHLLLGFPQLQAGSSKDDHEPKKVLAPNFNDVSSLIYNRDQNRYAALGEWIKDLEADSHKNNGHNEGAVLTFIFSLLSKILEQQVELLQVEHQENLIWLQLEGRKVPFHLLSQGFRNVFAWVGRLIRRLYESADYDAEFYEYPAIVLIDEIDTYLHPKWQRKILDALAEEFPRAQFIVSTHSPLVASYLEAHGETAKVYILDSPIGGQEAAKAPREINFTYGRDIADIFLEWMGVKQRDEEVTQEIDAIFALIEEENAESLAEARQRIEALKLPARDADMFKLNFALKLAEEELEN

SEQ ID NO: 81547 - protein, 235 aa, Saprospira grandis str. Lewin
MKQINKRPSAEVIEGYKELRRKTASPDFEDLKKEVGAVLKDSLLAEQGYLCCYCMNSIEERVYEDGSTDLKMKIEHFESQDGYPDKVTDYNNLFAACKGGEDLDGKDRFCDSAKGNTELKYIPNPASIRKKDEERRFNIRYNYRGAISSKDPNIDKELKETLKLNAQTLVRLRKQAWDVLSRKIDRYDQRNKSWETAEDYARDLLAKLEQPKNGRYTAFQGMLIFFLKKRFKELR

SEQ ID NO: 81548 - protein, 540 aa, Vibrio cholerae IEC224; identical to SEQ ID NO: 80874

SEQ ID NO: 81549 - protein, 205 aa, Vibrio cholerae IEC224; identical to SEQ ID NO: 80875

SEQ ID NO: 81550 - protein, 404 aa, Escherichia coli SCI-07
MLLPDTNKNININVDGKNVIITGGNGCGKTRFLKLLYEQVSAQIEQYEYKTYDQIKQEISNRQNWMQHTPPTDRNYFSWKQEIADYEKQLKKMRDIRIELADLNKYCIDFNERKSLLRYFGAVRENNISHSGTIDSLKTLKDEEISVSLSQDTSNKFERYLVSFYNYGSHLIARENDKVKGDKVDSWFYFLQKQFRYLFEDDSLKLNYDAEEQTFYILQDNKSPYRFNQLSSGYQSILSIYADLLMKVELKGITSDELSGVVFIDEIDAHLHVSLQRKIFSFFVSAFPNIQFIVTTHSPFVVQSVNDAIIYDLSTNEQLEDLSMYSYEAIVKGLLGVDTQSDLLNKQLDKLALLINDDIIDTDKLQEVVNSIQPYENQLDMRSRTFLLMGRNALLDAKDATEGE

SEQ ID NO: 81551 - protein, 221 aa, Escherichia coli SCI-07; identical to SEQ ID NO: 81197

SEQ ID NO: 81552 - protein, 392 aa, Flavobacterium branchiophilum FL-15
MLKIKNIKITGIGPIKNLELTFDNHFNIICGQNGIGKTTILDCLAQSFGLNDTSVKRTAGLEKGNWNINVSINNVSQSKSFDIVAFHPQERTNQTQGFYLNSNDIIVFKTHRDIPYQHLSSLSIDPQKNIHQFAIETMHGSLPHDLKNWFVLGHLWSAHENHLDEQQIKNITLAKECFNILNSQISFSKVNPNSNDILLNTPNGEIYFEYLSSGYKSCMAVLIGLIKEIELRYKNPSKFIKDFDGIVFIDEIDLHLHPEWQAKIYEALKIILPNAQVFTSTHSPHIIQVAKAKEIIPLTLDETNEVKLNQIINQEYGFQGWTVEEILSDVMGMTETRTSTYLDAISNFNVAIDSENFEAANAQFIILDAMLHPENSLKKILKIQLTGISTND

SEQ ID NO: 81553 - protein, 250 aa, Flavobacterium branchiophilum FL-15
MIKLDRTPKPVELTAELQVALTDEFKLTGKSVWNIDFIKKGLSGFSNDKCCYCEANINEESKYLEVEHFHHKDKYKDEVLEWDNLLPSCKKCNGTKNNHDTKLEPIIDPSQIDPKVHLKYWRYRIKGSDDFGKLTVSVLNLNDQDRLVKKRFEIGNAIQVKLEQLNELTDDYINGVQTSTLRKNRIINGIKDLMKEGLPNSIYSATSATVILTDTEYDALKIKLTSLSFWDAELSQLEIDLTKTALKLEK

SEQ ID NO: 81554 - protein, 435 aa, Desulfosporosinus acidiphilus SJ4
MRIEKLYLKNFRGFEERGFEFKKNFSVISGENGSGKTSILEGLCVALGGWLYAFNGVDSKDKRNIASSDRRVIVGKVNSAPLQQIPVQVKCWAEIAGQNIEWERAITSRNGRTTHGGLWYINRLSKEYNEKIYSGNDEDIILPIVAYYSSARLWNEPIQRERRIKKEKVRLEGYNKSISFSNSIKDAMNIIDRIAHLAYREDDPTSLHEINSILNAIQKSINHSMPNVKVTYNTKIAEICVTDGTGLSILYSKLSDGYRCMISLIVDICRRMITLNPQLGESAIDKTPGVVLIDEIDLHLHPKWQKSVVTDLKTIFPKIQFIATTHSPFIIQSLKEDELILLSDADDEVEYVGESIEDISENVMGVSNPQYSKEKEEMYTVAQQFYKDLDAVKTPEEMAQVEETLKRLTAKYSGDVAYYAFLEQKFLEKKLTMEG

SEQ ID NO: 81555 - protein, 232 aa, Desulfosporosinus acidiphilus SJ4
MRPVDKGASPYQQIREYSQALPFLEERIGCYCSYCEMNIGHVPEVEHNIAKDRGGSRTDWENLLLGCKYCNARKGTIIGDHPKDRWIWPDEDNTFLAFTYDGGIPKINEEYLCKNGQTIYAQAKQMLEDLKLDNIPCSASDKDRRYKSRINAYNRAKETLSGWDRAKGTIYEDHFKRIICIAAKAMGFFSVWMNVYKNEPIIRVALIHEFEGTALDCFDANGLAIPRLNGRI

SEQ ID NO: 81556 - protein, 436 aa, Corallococcus coralloides DSM 2259
MYVKEVYLSNIRSIESLVWALPDQPGPGWHVIIGDNGAGKSSFLRAIALAMVGPTEAIALRQDWSEWLRGNESLGTVAVMIKPTLGYDLLFRFPHVPTEAPVAEYSLELMFNRGPDNRVLPLDFRSNIPNSMQSIWGVGPGWFSASYGPFRRFTGGDQEREKLFQSSPKLARHLSVFGESVALSECLEWLKLLQFKKLEKDPEGNLLESLKQFINQPDFLPNEARLDSISSKGVRFVDGNGCEVPVENMSDGYRSILSMTFELIRQLARAYGANKLFAPGDATTIIVPGVVLIDEIDAHLHPVWQRRVGLWFREHFPNIQFIVTTHSPLICQAATVGSVFRLPRPGSDEEADMVTGVALDRLLYGNVLDAYSTGAFGDVPLRSPEALEKLERLAILNQKELAQGLSPEEQAEQQHLRAQLPTASSALPSDTEVPQP

SEQ ID NO: 81557 - protein, 269 aa, Corallococcus coralloides DSM 2259
MIPLPNLPLPEPANTQLKGYQQEIDSLPDYETRVDRAQERFSSLNRKGHPTFDTVKATLSKMSVGVQRCAYCEDSLADEVEHIRPKALYPELTFAWMNYLYACGPCNGPKNNRFAVFAQGTGVHTDVGRRRNAPVVPPVPGTPVLLDPRVEDPMEFMSLELRQTFLFTATAALGTVAYQRAKYTIELLGLNSRESLPRTRYHAYRDFFMHLRGYVQDRANGHAPEHLLHLAHDIQTRQHATVWREMKRQHLLIPELKRLFEAAPEALGW

SEQ ID NO: 81558 - protein, 435 aa, Corallococcus coralloides DSM 2259
MRIERIEVKNFRGFASRAFEFSPSFNVLIGDNGTGKTAILDALSIAAGAIFLGLEGATPPGIHRDDVRRVMHTSGEVPTLEALYPVEVRCRGLIEGKSLEWARTLEGPNKHTTHGQTSDLSKRTLSWRSQVRKGKDVVLPLIAYYGTGRLWLQRRARQSTASDGARVLKPRSRFRGYHGCLDPSSNHKDFVSWFKTMELIQLQEGRALGTLGAVKHALRECMRDWTDVRYDLRLGMLVASKKDGAQLPFDMLSDGARSMLAMVGNIAYRAATLNPHLREQAPSQTPGIVLIDELDLHLHPNWQREVVDDLRKVFPQLQFVATTHSPFIVQSLRENELINLDDQSRETLPSRSIEDIAQEVMGVELPQRSHRHQVMMEAARKYYAALEQAKGSKGKELQRLKQELDELSAPFSDDVAYHAFLEMQRGKAGLPGDDS

SEQ ID NO: 81559 - protein, 231 aa, Corallococcus coralloides DSM 2259
MRPVERGDWPVDNDGVRRTFSDYPEARGALIERMGEYCSFCEGRMNASLAVEHMLPQEHHPGLARDWHNFLLACVNCNSTKSAKRIRLGSYYWPDRDNTARAFVHAADGVVTVAPNLSPQEKRRAERTLQLTGLDRLPPHNPRASDRRWQHRREAWARAEEARDCLAASDTPHMRRLVIRQATALGHWSIWMTVFADDADMRQRLITAFTGTARACFDPVTRPVPRAGGAL

SEQ ID NO: 81560 - protein, 596 aa, Citreicella sp. 357
MQLLHLAIPHFRNLNDLVIDFKTHVSPMPGASAEAEPKRIRSHALIGQNGTGKSNLIEALITIFRDIDLNRDASLDYTLEYEIRGHTVRIQADTSKQKRPYVWVDGDKVSQDYLLTNDRVDKSPRDERRGPRLLPSHIFAYYSGRNERIESLFQEHQRRFNQRQEITADEVLPERLLENFTGTDADIRAVEEAKRQNEARLKHAGDDRLRRLFYCRGGHSQLVLLACLLSDDPVFQKVLKNLHIESLESALFVLKEPHRLREKRRGGRFDENELNEGDPRFWYARGNVVSEFLDKLWQVSWAPIEQEATKQIDFRGRTEKQRQLYLFVPSQKNLQQLGELVGGTDSFFRYAEGAYIGDLIDEIRITVKKRDEHGGKVGFTQLSEGELQILTVLGLMRITREDHCLFLLDEPDTHINPIWKLRYFDDIEGVLGAEEDKLTSGGSQILITTHDPMMVGSLKREQVHILRRLGNRTVVDVPDEHPQGMGVTGLLKSELFGLSSTLDIETERRLFRRNELFVKSPRTAEEDTELSQLSAELADLGFSTSDFRDPDYALFVQKMAQHQKFRKPSLTLEEQAEQDRIAEQIIAEILNEDVAE

SEQ ID NO: 81561 - protein, 270 aa, Citreicella sp. 357
MPDSVRWEEKDWTAWLEKSDTLVGELATLNVAGKRKERNELIDANRAHWGKLKPWLLTLSNGKCWFSEVRELYSHYDVEHFRPKKEAKELDGAERDGYWWLSFDYMNFRVCGNVGNRKKGGWFPLHQGSHCSTFDAPCEESEARYLLDPIDDVDVSLIAFDEEGKAVPTPGTTAWEQDRVKETINRLKLNEHAPLAGARRDIWQKINRLIKKYYMAKARCGQGNNEVAKERLREVRSCIREMTATSAELSSVARWCVLLRNDPQLSLLVG

SEQ ID NO: 81562 - protein, 417 aa, Vibrio tubiashii NCIMB 1337 = ATCC 19106; identical to SEQ ID NO: 81430

SEQ ID NO: 81563 - protein, 219 aa, Vibrio tubiashii NCIMB 1337 = ATCC 19106; identical to SEQ ID NO: 81431

SEQ ID NO: 81564 - protein, 456 aa, Thiothrix nivea DSM 5205
MRVETIYLKETGPFAELRLDFQPKLAKNKADVHILVGQNGTGKSTILTAIAALFQPWQAQMDLGKRLLTTNSWVEGKISGVQIGLGWKAKRQDIEQSRVTPEIKLKHVGSVHSNAPTAWVNPAYYKTPLQTYQNAVQHLQTGASNNLNIEDFTFAAFAYSGYRSIAYTKLKAIEEVQGKTLEDALSFHKNTQAHYEKLIKWLALTKSKAALAAYRNDQEAAKRREGSITRIENLIKQIIDKPIAFEITDEPLAVNLRIDGRVSDFDVLPDGLKSILGWITDLMMRMELIPWENQLPIFERQFLLLLDEIEVHLHPAWQRKILPVLQNLFPHAQIILSTHSPFVVGSVSDAWVYPLRLDNAGNAVLDTPIKSKAGVSYPAIVEEVFGIDEEFDDVTESQLDVFEEKKKAYLQGQLSLDALQAFAASIAQGSVEVSNIVSREIRQAERLRKQQGIPAA

SEQ ID NO: 81565 - protein, 207 aa, Thiothrix nivea DSM 5205
MRKMLRPECPDWLAENQSRWTQTYCQRREQNPSANFAWPQHEGRKINHNLQQLLGESTDGHCSYCDGGFPLGSASRDTIDHFKPKEAYCTEAFTWENLYLACDCCQQVKSNRYSDNLLRPDLLDFDFSSYFQFNYRNGHLEPNPLADEEKQQQAIETIRLLGLNEHERPWARLSELNKFTCLSMDKQRELLGTFNYRFLMEMELQDQ

SEQ ID NO: 81566 - protein, 525 aa, Haemophilus parahaemolyticus HK385
MKNKDILELYKNWDGETLPPYKLMELVSQNPFSLLDIQIVNYKAFSDKVSVKFEDNKKPILFVGVNASGKTTIADAIATSLSKINSAIYNKNTDSGDVIEERDINKKNDPYQPALIELNLGYAKTKLTEVIVARSPNGSPKTIYSTLIQAKKLGTLYSYILAKDNLDLPLYLFYGVERSSLKTKDKFDKADFISKVERLNAIPQKLKSTLNFNDFLLWFKYLDDANNQDLVNALESVKSELANIEGKVNELDSYDNDILTGLNAANELLEKMNSIASIYSKLENLKNNNEVDTERGKQLQKIKEIIITFIPNIIDIKIDRNLSYPFIVKKQDGSQFPLSELSQGEKSIISLVGDLVRRMLILNPHKENPLDTPAIVIIDELELHLHPQWQEEVISKLERTFKNTKFILTTHTPTIVSSIINENLYLIKDNQIIAGKHLDFGTYGAEYASIYTLLYNINLRSNNEIKEKLERYLSLVNENQYTSEEAIMLRKELEKNFKGNEPSLEEAKLIIENKEWEKSLYEESQ

SEQ ID NO: 81567 - protein, 262 aa, Haemophilus parahaemolyticus HK385
MKKVNKSSIPNALLNYRSTNKSYTWKAFRKKKKSYKRVKKQIFKDQGGICAYCEQDFSCSQGDDDYITQMIEHFHPKRDISSNKNWALDWNNLLGCCTGGTESNKIIFPSPENLSCDKYKEIVLSKINNVEGYLINPIDMPAFPCLFKINQVTGHILANEKNCGKVSFNINNFKTTVELVNNTIRVLNLNCVRLLQKRKAHIKNYNNLINIAKKNQNSAIFQELCSRFLTKKNDKYHSFFTTYRILLSSHAENYLQRNNFSG

SEQ ID NO: 81568 - protein, 390 aa, Haemophilus haemolyticus HK386
MKIDTIEIENVGGITSIRLDNLDPNLNIICGENGIGKTHIIESIAACFTSYCDNYLKKKANSDNGLIQLEIIDIEDKFKKIQYQVEDFSPRDNRGGNYHLTDFWNNYSENLMYFKVDRFFSYQWVNSLKIYDNKENHIKKNLDGISKENLKDWFIRSEILSDKDYTPEVDRRNIEFAKEVITKLNCQYSFSAILKDMEIYINTPTGDIPYEYLSSGFKSCIFIIWGIIREVQIRFPDIESKTFNGIIIIDEIELHLHPEWQNKICDVLKEAFPNTQFIITTHSPHVIQTAEHNQVVALEGSNGILHKKNLESARNGFSGWSIEEILTDVMGMSDLRTEWFKSTLSKFNSALDEENFKNAKIIFEELERKLHPQSTELALFRFQLKALTGE

SEQ ID NO: 81569 - protein, 238 aa, Haemophilus haemolyticus HK386
MIPLQQPPKPDYLTDEKVQELTNKYQLDTKKTVWNKAEIKEPLLKSSNKKCAYCECILQETDSYSQIEHFHPKSLYPLEVVVWENLLPACARCNTHKGNHDTVNIPIINPYNDLPKEHLSTQGLRLYPKTEMGKITIKRLNLNDNDRLCIPRFKLCNEVHEKLGYIKDTTDLLDQRNRLHSLLTACSKSGEFSAFCSHALHSNIDYTNIKNLLSENEYWDDELAKLDEETKSIALESR

SEQ ID NO: 81570 - protein, 441 aa, Microvirga lotononidis
MYVKSLQVTDLRSVAEGRLDLVYPGRDQDEPFAGNYNWPPRLPNVNVLLGVNGAGKSTMLDAIALAALSPVIADSSGYRPYALIRRVARGKSPRAASMEAEIVIHGQDVDGSPGRTDQVRTISANVERRGDLESLKAAGSIDPIWDGMFQDRSPAFLMVGYGATRRVESVSSIDESTRSKTRQLRYERVASLFEDHFTLRPLASWLPEWQSINPGRHKQVVNLINRLSRNDVVFTGQREGREYLFRVGNNLVPFSALSDGYKAYIGWVGDLLFHVCMGCPPGKKLVDNKGVVLVDEIDLHIHPEWQRTMIPTLAQALPNLQFIFTSHSPLVVGTLERANIIHVETGPRGHAIMKRPGEEVYGLTADQILRSEIFGLDSTRDPGFKAHLDNLASEAASGNREAARLFMRQAARGSAAAEAVSSDRPEMPEWLTSLASRKFEE

SEQ ID NO: 81571 - protein, 305 aa, Microvirga lotononidis
MIRYPKATLDLVCELVDEEVSNWRAEAKARTAAIIAAGAYSEGRPSWSDVKPVFMRLQSNKCAFCEWPLGGEFAGKATQDVEHFRPKNAVKEWPKKPKKGTPPTYPFSTGGKGDGYHWLAYDLGNYAAACKACNTARKSNYFPIAGAARGASGADIATLNALEQPFLIFPLGTVDDDPEDLITFEGIVAKPTRDDDSHERRRATVTIDFFALNSREELWEDRFRVIREVFYALGQAKTAKDDMADAALRTIADAISESGPQASCARSYLRLIEDDPELAWEAYLAAEASVGRERDKRRQKTQGKR

SEQ ID NO: 81572 - protein, 471 aa, Leptothrix ochracea L12
MRIDRLALHHFRHIERHEFVLAPQFNLVIGTAGSGKTSLLDALAIALGAWSLGLPGTHDPASIGPDDLRAHARTTRKRVHPATRIEAHGEIPSQGSVSWVRSRTSPQSPTDNSQAAAFVQRVRILLAQLGGPALPDPPATEVVETAPAGLLPLIAYYGSERHMGGDNRRARRHAAATASPQTHHLRERRLTLRMRRALALADRPSSSSAELRRRLSSYADAFDIRTQLSEIEDWLLDLEELEARAVLDALQTLLSTGRQGEAVQLSLNHKTRQVSAQRADGWMVAPRQLGGSERQLLTLGGDMIRRILRLNSHVGVEQALAQTAGVVLIDELEAQLHPQIQRHLVETLRTLFPALQFVATTNSPFLVQSLRGGHELLMMRGQPTAELSHQSLETIASGLMEVGDDAHTSGRYQAMQRTARDYLQTLQLAKTAPLDQRANYQQQLDQKLQPFADNPAFQAFLDMQRAARLGE

SEQ ID NO: 81573 - protein, 245 aa, Leptothrix ochracea L12
MRPVRRGASPQSTDFVPYASALAPLVGRIGMYCSYCERLIPTNLAIEHIQAKSLPKYAALEGRWPNFLLGCVNCNSTKGDKEVILSQYLLPDRDNTALAYQYLPDGTVQVAPGLTAVRSRKAEATLALVGLDKASAQAASTANEVQVALDRCAQRQQAWFEASVAHTELQAQPDNDLLRRMIVRLAQARGFFSVWMTVFAADRDMRLRLVQAFPGTLESGCFDPVSTVPVKPAPNPDKLVSGKKI

SEQ ID NO: 81574 - protein, 432 aa, Emticicia oligotrophica DSM 17448
MRITRLEAKGIGPFEDLNIEFKPKPAGMENKAEIHILTGENGTGKSTILMLLSCYADKTNDNLILSRFRSKKIVQSVLDEGLISRFDIYSDEAERFQSFFIYSNQNISTVNYDFTKKVDRIILNKEINARYLFFAYSGNRELETKNEIKIAEINESPIFDTLNFRKKINFDTILNWIATNKAKEAFALLKNNNSSAQKYENSLKKIEDSISNITQKAVEFDIEDQPFRVFLKIANKSLDFNILPDGLKSIISWLSDLLMRLDRIDWADKSKSILEQNFILFLDEIEVHLHPSWQRKILPVVQDLFPNAQIFISTHSPFVVGSVDGARVYKFKLDENNNSVLDSEYWTEDGNSYDRILEEIFDIKERFGVGVQKQLDEFKEYKIQILKGKTIDEEAFMKLANEIAKQSIELNGIISFELRQLKRNTTQKLETA

SEQ ID NO: 81575 - protein, 206 aa, Emticicia oligotrophica DSM 17448
MRKLIRPNAPNFLTEKLQIELGERYKKNREKNKGHQFNYWHTEKVGESTLYKEIRNKLIEISDDHCFYCDGYPPLSDDDTIDHFKPKSKPEFYDLVCSWENLYLACGHCQKAKGSEYNDLILRPDEINYEFDKFFKYDSDNDEVIVNLGADDLSQLRAEKTIEVFDFNHVGLKKLRGFFRKVYSQDPQININDLGYRFCLNFQQTI

SEQ ID NO: 81576 - protein, 415 aa, Emticicia oligotrophica DSM 17448
MLLKQLSLRNFRGLDETSISFINDTGKPRLQTLLLGENGTGKSTILKAIALIGAGSNSLSELLGNPDEWISFGENSCEIKAVFMTKEKKPKEREISLKINRGDSIKDILVNNTDSLDEIDRALSHTDRNYFILGYGASRRLNKNQSFNQPSSFYNNDRSANVATLFNSDANLYPLSAWVMELDYRSDGEALESIKNALNEFLINIRFDSIDKQQKTLLFSNGKDLIPIHLLSDGYQNVSGWIGDLLYRIFNTFGDRQNPLMTNGILLIDEIDLHLHPTWQRRLLGYLKTKLPNFQIIASTHSPLTAQQAGEGELIVLNRTKNNQIDAQLFKGTPNKMLLHQVLLSPIFGVQSDESYETEQLKNEYENLKNRKGSKAQADKLSKRIQAIPQVTRTNMVADAGLVDLLNKINQELQQ

SEQ ID NO: 81577 - protein, 283 aa, Emticicia oligotrophica DSM 17448
MIALERVRTADKVHKNFTGARRVAWNKELLIRQKEILAGKFEAHNFVQNRWKVAKEQLFAESSGKCAYCEADTRVVSHGDVEHFRPKSKYWWLAYCYDNYLVACQVCNSVYKGNDFPLSDELKALSPPTLTISTTNQEIDLLALTINPDPIDNSGLKLTEFVKAYHIERPLLLNPYFDDPSEYFAWEIDAVLKHIILIPQKPKYKPYIEAAEKYYGLNRKELKESRYFFYEIYNTLYQVLFQNIDRISENTRQQIEDRIVKMKDKSAPFAGMIRYFDLKNRGF

SEQ ID NO: 81578 - protein, 465 aa, Salmonella enterica
  subsp. enterica serovar Senftenberg str. SS209
MRIDKLSLLNFRCFRQLDITFDEHITILVAPNGAGKTAVLDAIRLALFPFIRGFDASLYVKDKSLAIRTEDVRLVFRPEALNMEMSSPAMITATGEWESGKTATWMLDKRGEQPPHEDKTAAQLTRWGEQLQTLVREEHNLQQVELPLMLYLGTARLWYQERYEAQPTEQRLDNSAFSRLSGYDDCLSATSNYKQFEQWYSWLWLSYREHQITQLESPSAKLKEGVRVQRMKEAIQAIQQAINCLTQEVTGWHDLEYSSSHNQQLVMNHPQHGKIPLSQLSDGLRNAVAMVADIAFRCVKLNPHLRVDTALKTQGIVLIDEVDMFLHPAWQQQIIQSLRSAFPQIQFIVTTHSPQVLSTVKRESIRLLEQDENGNGKALMPLGATYGEPSNDVLQSVMGVDPQPPVKEKADLQKLTAWVDQGKFGEPEAQQLMAALQVALGDQHPQLQRLQRSIARQKLLKGKAQ

SEQ ID NO: 81579 - protein, 241 aa, Salmonella enterica
  subsp. enterica serovar Senftenberg str. SS209
MRHVIKTRRGTDALLTAHEQPPQNSDQSTRRWHRFGRENKAALMTLLLNEQYHLCCYSEIRADLRGLGYHIEHVENKSQQPARTFDYQNFAASALDSENGLPQLGINAFGGHAQGKNKSVDMAKFIHCHLPDCSRYFAYLSDGRIVPADELNAQEMERAEYTIDLLNLNSGFLQTERRNHWEELEQLFEEHIEKGWDLQQLLQLELVPSPDHKLHEFFSITRQFFQQEAEQVLQIHAPALI

SEQ ID NO: 81580 - protein, 444 aa, Pseudomonas fluorescens SS101
MEIRKIRLNNVGRFTDLEVAFAPTEKHASKVTVFVGNNGAGKTTILKSLATSLSWFVESLRTEHGRGEPIEDELIHNDAGTAIMEIEVAYFDNKNSLWVLTRTQRGLKPVGRNDLTDVRNLADNIRDVLTFSDRNVSLPLIAYYPTERSVLKVPLEIKKRRTFYQLDGYDKSLNLGVDFGHFFEWFRDREDIENEGAISRSTMEKLSIKLGRNNAFWKEIESVNAQSQDSQLTAVRTAIATFMPGFSNLRVVRQPTLQMMIDKAGSPLSILQLSQGEKSLMALVGDIARRLAIMNPSLSNPLHGEGVVLIDEVDLHLHPQWQRRLIHQLTETFPNCQFILTTHSPLVISDTKDVLCYVLDDGELEERNGLYGLDANQVLLSVMDTDVRNSEVQSRLDRLLELLQDKKLKEAKALFEELSTDLPSGHIELAKAALLIRKLELRSA

SEQ ID NO: 81581 - protein, 182 aa, Pseudomonas fluorescens SS101
MTHEERNSIRLACIEEQHGLCAYCCHAITQETAHNEHVAARDTTPQRALDYSNIVASCNRTKQCGKAHAHQTLPLNSLMDECETELKFYLSGRVEGLSPRAIKSIQVLNLGDCRENNRTLFSARKSILDTLLFDYGMEGNDLQAENGDLLQALLEDLRLPDTQNRLKPFSPVLVNVLRQLTS

SEQ ID NO: 81582 - protein, 769 aa, Pseudomonas fluorescens Q8r1-96
MQRFERSSEPPPGLLQSEEFNAQRQELVNYFRMDEERRAQTRVPSFRLGLDHESIKGALKRLFRGKCAFCESSTSTTPYRFRPTSDALPMRRSPDAHMYYAWLSNAWENLYPICKGCYPERPEHFPVKGKRAALPTAIQLQTFAEEALGLWRDHPPKEKNLLLDPCESGSFVRHLTVDLDGYLFPHTDRAQETINHFDLNRDELYEIRGQRVRAYFDELIDRVLPQMREGQDRRIRLFDFAELEFGGLWYLMCRQIIIFLTGNNPQRLSLSPIRIEQAFQKVAKSVIGQEVDRDALEEWLNDPLRDMFTEDSQLGRAFTESPPTLVAISLTNFKGIERLELIVPSAEASSAEQAAPLKPALLILGENAAGKSSILEAIALALSSDEARAELKLDVSALPLDPELLGERSAARRGLATVDLRFDDGSSRTLTISDARFSMEGGSEVPPVFAYGAFRQYQKQIRRYSYGKSISNLFQSDKLLSNPEKWLLGLDQENFNNVVRALRVILSIEGEFEVMERDFNNQRCLIVTAAPGHHTHNRTPLSLASSGYRSMLAMVCDIIQGLMSPHLHTFVESLETARAVVLIDEVEAHLHPRWKIQIMQALRSALPNVTFIVTTHDPLCLRGMEPGEVVVMQRVASQQGVDSEWPVMVEQVVSLPDLSQLTIEQLLTSDFFGLASTDQPGTERELAMFADLLAAKERREPLTADQQLAWTRFEQDIREALPVGATEVQRLVQEAVTEYLRNRRQMSTENLGKLREQSRRDIVAILEAL

SEQ ID NO: 81583 - protein, 337 aa, Pseudomonas fluorescens Q8r1-96
MRFVIRKKAQKPDAMTGDDSPAARELDKFRRYFEAPDDKAPSFAVYKSDSVKKRLDELFHGKCAYCESFYASTAPVDVEHYRPKGAVHEDATHQGYWWLGMDWDNLLPSCIDCNRKRKQMMPKLSAKLLTLQEVGRGFSQGVLMSSGKKDSFPVLGTRAMTEASAIANEYPLLLDPCRDKPDEHLRFHIDRTNLISLVLPQAHAGADLPVMGVNGADEATRAVIDEALEIGLSLKGVVSIHVYGLNRLGLVQERTRLLRQLEFLETLALDVGVMAQELKPDPAQPKSTDARDEGIVRRLNLLQEQVLREMKRMANPEAPYSAMVRTWIEGFKARLLG

SEQ ID NO: 81584 - protein, 485 aa, Pseudomonas sp. M47T1
MGTQENMTSAGRNSLRLSRLRLRDFRCFETIDIDFHPQLTVLVAANGTGKTSILDAIAIAFGPYVGAFDEAVGKHFEPSDIRQFRARQTATNEMEYAPQGARLEATGFIPGSLLDQLSDDLLPTIWSRHLSSTTKTKTSVKDAKELVNYGKRMQEASRTPDTEVVLPLIAYYGTGRLWQQKKLTDAKNIQRTSRTVGYTDCLDPASSYKSFVQWFRYWSLNAKQAQLKALEAGVSIANTEFDAYVQSVSRAVNACIQPAGWSGIEYSFTRDALVARHEQFGELPVEWLSDGIRNMIGMVADIAFRATKLNGHLSAQAAQETPGLLLIDEVDMHLHPDWQQVVLLNLAQAFPAMQIIVTTHSPQVLSTVSSECVRILRTEIDPETTSRVTTVSEPQWQTRGVASSDLLARIMGVDPIPHVPEAIWVSDYQALIQQNLHEQPEGRILRDKLEAHFGAEHPVIRESDRLVRLQGIKQRLPRDLGNGER

SEQ ID NO: 81585 - protein, 219 aa, Pseudomonas sp. M47T1
MGSVEVRHLDRQDDPPLGLRRYRHGQDAWSATCPTQEERRAIWLALDLMQGSRCAYCEGPIGEGNRHIEHFRQRRSYPQGTFDWSNLFGSCNRAGTCGTAKDRCGTYPPGTLIKPDIEDPDAFLVFTPGGTVEPRAGLSVGDHLRASETIRILALDGALNQIRRAELCGYIQTMEYFVEYAEAFPDDEGWVEELEREVRETAHLPYATAIRHVLTRQSE

SEQ ID NO: 81586 - protein, 416 aa, Escherichia coli CUMT8
MLNKSNVIKHIHVLLPDTNKNININVDGKNVIITGGNGCGKTRFLKLLYEQVSAQIEQYEYKTYDQIKQEISNRQNWMQHTPPTDRNYFSWKQEIADYEKQLKKMRDIRIELADLNKYCIDFNERKSLLRYFGAVRENNISHSGTIDSLKTLKDEEISVSLSQDTSNKFERYLVSFYNYGSHLIARENDKVKGDKVDSWFYFLQKQFQYLFEDDSLKLNYDAEEQTFYILQDNKSPYRFNQLSSGYQSILSIYADLLMKVELKGITSDELSGVVFIDEIDAHLHVSLQRKIFSFFVNAFPNIQFIVTTHSPFVVQSVNDAIIYDLSTNEQLEDLSMYSYEAIVKGLLGVDTQSDILNKQLDKLALLINEDVINTDALQDVINKIQPYENQLDMRSRTFLLMGKNALLDAKDATEGE

SEQ ID NO: 81587 - protein, 221 aa, Escherichia coli CUMT8
MFNVIRTYPAPDCIARNRYNDTDVTEVLKPLFYAKCYLCERNEVQDAEVEHLIPHEGDDNLKYNWDNLFYSCSRCNGIKGNRHKNILNCTDSSINIFNQIICKMPSMPDDDVVILPNINPPTLSIISTVGLLNECYNLKNTGLRKISRESLIEQMFFYYSRFIEARMTLKDPSKGSSRKRDAEEMLEAMLKTEHPFSIFWRWHYLGDGFLTANYPDLRVGF

SEQ ID NO: 81588 - protein, 273 aa, Rhodanobacter sp. 115
MVGYTHCLESGSDFRLMADWFRYWSISALEHQQKVLQGLREALPSSADDAIEAVRKATDCCLKPSGWSHLDFSLDLQELVASHPDHGELPVGMLSDGIRSMLTLVADIAFRMVKLNPNLGPYATSRTNGIVLIDEVDMHLHPSWQQTVLGSLREAFPCIQFIVTTHSPQVATTVPAESLRILTSDGVMAAPAGTEGAEAGRLLESVFGVDPRPEHNLATKELRRYLKLVDDGQWKTDEALGLRKRLDQRYQGEEPALLEADLLIENKEWEQQA

SEQ ID NO: 81589 - protein, 244 aa, Rhodanobacter sp. 115
MRNDAHWGGQMAYTDCRDRVLTDQGGLCAYCEIDIGGYDPLKCRIEHFHPKSDVNAAHNWALDWGNMLAVCSGGSQSALSDPTYFLKPLPENLSCDAYKDRQVQSGALTADCAGWILDPQQIFAFPCLFKVNASDGSIEPDDVACGNAPPAPDNHHASTFDLVKHTIDMLNLNCNRLMRARLVVVRAIERAKKQQRDKGFNAQQGLANLAKSYLQRPWPGFFTTIRLQIGQAAEQYLRQNNFQG

SEQ ID NO: 81590 - protein, 444 aa, Pseudomonas chlororaphis O6
MSRRLTAIDFDGGMVRLTPEHESAGITNTFTVIVGKNGVGKSRLLAELTNVSVGLEYHSKVIAVSTSPFDKFPSPRRRNGVSNKIYRYVGMRSEGVYQVSSAVSLISSAAKGLLEKLSSCNGNHDLEAVFESLSFYPVVDFVLKPGYLKSGVDNYDVSRVEGSSLAIELRRLDREYGIQVDERYYDLLENLPFGRRLEVFDSMVKINEVLQHRRALELKAHFAVSLLSIDGKDADSSYVRAIIVLMDVGLMRLIDLRLQKKNFGELSLKKASSGEQCLLVLILGIAGHITDGALILIDEPEISLHPRWQEEFMILLTTSFAGYRGCQFVVATHSPQVIARLKGPGCYITSLSKRELYSAEQFHDKSADFQLAELFDAPGIMNEYISRLAFNLLAKVKYSKRMDEASHEELKRLLEFNTQLEQDDPVKELIHSVATLCETYADNK

SEQ ID NO: 81591 - protein, 201 aa, Pseudomonas chlororaphis O6
MPIINDAVTLSEEALSLIQGKMQAEDFSHESWSDEDLLPVRREIREFYRNAQRLVCVYCLGPVSNRSAAGAPIEHIVPKSQHPGFMFEPKNLCVICPDCNEYKSKRETLADPVLIASRVNYPTNTDLFRIVHPHYDEYHEHIFKCERLYVECSDKGGYTIYACNLNRFYRRFGRCDELVNDVALVQQSERFYEEGVVAIQI

SEQ ID NO: 81592 - protein, 532 aa, Belliella baltica DSM 15883
MRIDKVYIEQFKNLNQFTIDLDETKMQTVLLGENAAGKSNFLEALVIIFRDLDLEEQTSFNYTIEYKCKGNLIKVNGGPDVKNKYGLFLGENKGDEIIYSTIVSKAAVKKNKELYLPKYVFSYYSGVSNRLLEHFDKHQFRFYRDLLKGIDSPPRPLFYARLIHSHFVLMAFYGFPNEKINTFLEDYLNIVGLESVLFVLKKPNWKGDTEEGDPKFWYSKGVVKEFLNDLWDASIAPIYHRDKVREDFNKHPDQEHLYLYISNEEKLKKIAEKYGTNTEFFKSLESTYISDLIQEVRVKVKKKNIDGEITFKELSEGEQQLLTVLGLLRFTKEEESLILLDEPDTHLNPLWKWKYMNLLEDVVERPETSQIIMTTHDPLVIGGLTKEEIRIFYTEKGKDQEGKDIMLVKTIAPDFDPKGLGVAGILTSEFFKLPSTLDEDTLDILNRRNELIAKQDDNKLTDKESLELKEIFYYLNNLGINTTDRDPLYEKFIVALSKLEKPENIKSSPVELKKQNEIAFDILKRIINESEK

SEQ ID NO: 81593 - protein, 268 aa, Belliella baltica DSM 15883
MIFIDLENNPPPQDWIDRADALTQQLIAAPTIVAKNVIIDANQALWNELKDHLSALSNQKCWYTESINAGAHCHVDHFRPKKEVVEEDGNITDGYWWLAFDWMNYRFSGPAPNVRKRSYFQVVANRALIYGDNCNIEDILFIDPIKVRDPECLAFDNEGRVKPKETVKTARNYKRADYSIRRLNLNAPSLIDQRKDKFRKASILLMQLDKKIQLQSVTWDQSRENEIEIGFRELIQMCSKNSEFSAAVKFCLKSSTYAWALEIVNAAA

SEQ ID NO: 81594 - protein, 546 aa, Rhizobium phaseoli Ch24-10
MRIDRVYIDGFRNLHDVEASFDEGRLTTVIIGQNGSGKSNLIEAIVEIFRHVDLPTGSVRFTFEIDYVIRGRKIRVHNRDSMTSFVVDGEPMSFSRFNLNKKSLFPDLVFGYYSGTGRRLEKLFDDHQARYYSVINKDRDDSEYAKAKTERRLFYCRPVHGVFGLLAHFAKPGKKGDVSKLLNEKLGITGFHSALAHFKEPSWFNHATWKKGRKPTTAGRGRRTFDDLGEQALDIWGAKGPAGECARAFQKAAFHPLAITGKVVDDYRSKAKTEAQLACFIRDQDALNAFATQYGDDQDLFAGLEAADISDLFRDMLVWVTRKGNDSGDVSFADLSDGERQLLMVLGLIRVSRGSEAVFLLDEPDTHLNPAWQLTYLDLIKEWTEIAADEDKCQIIMTSHNPLTIAALVKQEVRVLQVDDDAKMKVTQPYADPRGMGFTATLTEIFGLPTTLDPGTQRQIDERNTLAKIEQRTKEQEKQLIEINDKLNRLGFTNESREPLYQDFLRAWHDVRYADRPPMTPEDVEGRHNAMQLLIKQLTANKGGAY

SEQ ID NO: 81595 - protein, 283 aa, Rhizobium phaseoli Ch24-10
MIYVRRDPAFIPEKILKVAERAQAALETLPPADRMAFIEKKAHVWRGFKKYLSKMSYGKCWYSESPDPQSFFDVDHFRPKSEAKRSETITDEGYPWLAFNWDNFRYSAGRSNRLSTDEETDETAGKSSWFPLIDGSVVASWDDRRVADERPLLIDPTDQDDARLIKVDTNGRIAPSRFCVGTNKKRVTASTKLYGLDLPNLTEARLRVMRDVSRRVDDLLKCVAAADAYEPVADALPIPEQQAAITNLTLPSSAYSLAARSKLHELGLAELIAKPEDYPVVAA

SEQ ID NO: 81596 - protein, 312 aa, Kitasatospora setae KM-6054
MVPVYVSRIRVSGVKCFDGAREVDLAIPPGPGWTVFAGPNGSGKTTLLRALAMALGALPSGPPARWGARGWVRADPAPRWRVGDPPGPARARYPLPAEGRRVPLDADLLAEVLPAGWRVSDPERQHVARAGTDLPLDELGDGTAALARLVSWLAAAPETPGPVLLDDVDRHLHPRWQQRLGPWLTARFPHTQFLVATHSPYVCQAADPGALVRLPGPDEDRAPYRLDEEIRQRVLYGSGEDTALSELFALPSAYSPAAEAERRMLVRLERKMYAGQATDAELAAYRELGARLNSSLTARIDEVTARLLGRDG

SEQ ID NO: 81597 - protein, 242 aa, Kitasatospora setae KM-6054
MIPLQRPPLQARLAAELARATDRIRADGPDTATGRAAWRRAVRPKAQLRLMLRQMAPGLERCMYCGDNLGTDIDHFEPIAQAPLRTFDWQNHLLACAHCNSNRKRDLFPRDPATGDGLLVDPCREDPADHLRLYLDSGAYDPLTVRGEATIEVFGLNERPELVRGRRMMFAVVKALLLAHRAAGTPAEAAEYAAALREIHHADVLRTVLALRRSRPLAHAVLGPEVLAALEQLVSRPGGFGG

SEQ ID NO: 81598 - protein, 445 aa, Rhizobium leguminosarum bv. trifolii WSM597
MVMVTETIGNNLPRLTMYVRQLSIKNIRSITQFEISFQAGALPGWHVVLGSNGAGKSSVIRSLALILAGPKEALALRQDWRTWARFGTADGSIKAEIEVGPDDIFTKRGKPTKSVKAELQLVPAESTLDSRVNPLDLTAPSSTTALRSVWGTNSGWFSASFGPFRRFTGGDQTYDRLYYSNPRLASHLSAFGEDVALTEGLRWLRDLRVKELENDPDQAQLLGPLIDFLNVSQLLPHGARIAEVRSEEVIVTDANGARVIVEQMSDGYRSVLSMIFEILRQMTRSYGVERMLKSLNLHTGQVDLPGVVAIDEVDTHLHPSWQRDIGPWFTRCFPLVQFIVTTHSPIICRNASTVWRLANPGTDEPSEKIEGIALNRLIHGSILEAYGTEFFGRDIARSADSKEMVQELAQLNRKALRAKLEPAETSRLEELRKTLPTVATSAGVE

SEQ ID NO: 81599 - protein, 283 aa, Rhizobium leguminosarum bv. trifolii WSM597
MLQIANRDLPTTASGVLAQLQALVDAGADYPTRVGLAKKQWDAKTGSVAKATAFQSIRATLDKMCVGPRRCAYCEDSLADEIEHILPKDLFPQSAFRWANYLFACGPCNGPKSNRYGVVRGTGIFEFQRGRGDAMVAPPAGVAGCIDPRREDPMQLLELDLGGTTPDGTVLEGTFSFMAADGLQPVDSARAIFTIDVLTLNREIMRVARESAFTGFRARLKEYVAEKKNGATEVSLARLKDALLNSPHLTVFAEMRRQRTFLPDINALFEDAPEAVEWPVIRK

SEQ ID NO: 81600 - protein, 415 aa, Rhizobium leguminosarum bv. trifolii WSM2297
MKIRRLSVAGLRGFDHATFEFDPHFTLLVGVNGVGKSSVLEALRVSLSRVLPKFTASRSTPLAFAAQDIRQVSASLTVDLDLDFPEGQRNLLLHKPREQFIPDEEGSVRNATLDTPEREELSPPHWPKVDPSGNQPIAIYFGTRRSHPTDEQIKIGRSRGGQAAAFADALSDVRPLHLRDMASWMLAQEALAEELPRARLHLEALKSAAARFLPTCTGLRATNGADKPRLLISKDGVELDVRYLSEGERGVLALALDLARRLSQSNPVLDDPVRDGVGVVLIDEIDMHMHPLWQRQIVPLLTETFRGCQFIATTHSPQVIGEVAHDRILLIKDGHVYSPARSFGIDSSRVLEEVMDTKSRNAGVEAKIAKIAKLIGDGKVDAARAEIKKLSADIGEDDPEITRAMTLLDFMEGDA

SEQ ID NO: 81601 - protein, 202 aa, Rhizobium leguminosarum bv. trifolii WSM2297
MITKGAEPNSLTYHRAQAHSDYDNYAQKDDLRAALVGEQKGLCCYCTGRVRAESTAMKIEHWQSQANYPQQQLVYANLLGACLGGEGRSPTAQHCDTKKANRDLNWNPADTAHAIETRLKYLADGTISSPDEDFNTQLNGTLGLNFSYLKSSRKAVLDSVLQWWRSTPDARQKVQQQISYRINAAEYQPFSPVAVWFLRQKL

SEQ ID NO: 81602 - protein, 415 aa, Rhizobium leguminosarum bv. trifolii WSM2297; identical to SEQ ID NO: 81600

SEQ ID NO: 81603 - protein, 202 aa, Rhizobium leguminosarum bv. trifolii WSM2297; identical to SEQ ID NO: 81601

SEQ ID NO: 81604 - protein, 410 aa, Salmonella enterica
  subsp. enterica serovar Newport str. Levine 15
MQHAIDKIYAVKNNNPSIPFIVNLEGKNLIITGNNGSGKTVFLRKIFDFLNQSIVKTGNDHHVEYIKSELLRMEERLSRVNPGDDHYEYRKNQVAELQEKLNSRNYFNITFRDENSLKVNYHQKKSIIRFYEATRQAIISSDGRITSLETLTDEYKSHGPQENSGIFFERYLVTTWNYALLQKGLNKIEEASKAEKWIERIIEDLKQLFEDPTLTLEFDIESLRINIKQEGKEKYRLDQLSSGFSSILSIYADLLVRVELGKIERDEISGIVLVDEIDAHLHVTLQKKVFSFFKSSFPNIQFIISTHSPFVVQSVSDAIIFNLTTLEQMEDLSLYSYTSIIKGLLGERSSSSILLEKIEELSSLMSGENFNDADYIEIMSDLEPFIQDMDARSQAIILSAKNKFIEKQQG

SEQ ID NO: 81605 - protein, 224 aa, Salmonella enterica
  subsp. enterica serovar Newport str. Levine 15
MFNIIRDVEAPECLSHGIYNDPSVTDALKKIFHGKCYLCEQSRISDPEIEHFIPHEGDAFLKYDWNNLFYSCSRCNSIKSNRHVNLLDCSDPTIDISMEIVHLAPSLTSEDVTIRPSTEDNINEKTLNTIRLLKECYNSKSTGLRGITRENLLENLLKNYTNFLLSRQTLINLESTEDEIDYAKARMKAMCKIAFPFSVFWKWHIRLDNFLLEQYPNLFEDLGI

SEQ ID NO: 81606 - protein, 533 aa, Salmonella enterica
  subsp. enterica serovar Newport str. CVM 19449
MKVDKLHIRSRFKNLENVEVDFDEDHLMTVVVGRNGSGKSNVLEALVAIFRNLDLGEAPPFSYELVYRLGECHKPNHPSERWLEIAIDADPNRGTLAKQYEVHVRDLLSDDISKDMFGEHSLGIPIPFSKVSRDKGGKAPYLPNYVFAYYSGPSDRLENYFKKHRTDFYRRLLEDKLDLKGDIRPLFYAKPHHSQFVLLAFFLSERDSKDKAFLREHLGIEELDSIHFVMRKPRWAKKKEELFWGAYGVVRRFLDELIRYSLSPVKVTRKEDLSLTGKDIRNEFFHLFLPDANALREFAKELSADELFKMLESTLLSEIISEVSIRVKVSSSKEPLTFRELSEGEQQLLTVLGLLRFTGGKDSLFLLDEPDTHLNPSWAVKYLNFLHEFVPNHETSHLLMVTHHPLAIAELKKEQVQVMKRDDEKQISAKMPDENPRGMGINLILRSDMFGLQTTLDDDTNQRLTSRNALAAKETLSKEKLVREQGFPPEDEEQYLARLNAQLEHLGFNLATDDPDYLEFLRNKYHAKHEESH

SEQ ID NO: 81607 - protein, 269 aa, Salmonella enterica
  subsp. enterica serovar Newport str. CVM 19449
MRWICKDEIEECLTQAWKDMAEQANAELIAAPDEEARKAILRRVASSNIWREFYKLLPEPLKRKCWYCEAEEIRSDMPVDHFRPKNKVEDDKQHDGYWWLAFDWQNYRCACTFCNSRRVFDDTEGGKACRFPLENPDERALVPADQDKLNNERPYFLDPFNPDDEKLLWFDNDGLPLAKPSATVEQQTKVQNSIEIFHLHESRIVRARNIVRLEVERQVRKIKTNDNVQEAKAKLRRMVRDTEKLSRAAVVYLRAHRELPEVKDILNLD

SEQ ID NO: 81608 - protein, 709 aa, Bacteroides salyersiae CL02T12C01; identical to SEQ ID NO: 80886

SEQ ID NO: 81609 - protein, 315 aa, Bacteroides salyersiae CL02T12C01; identical to SEQ ID NO: 80887

SEQ ID NO: 81610 - protein, 411 aa, Bacteroides xylanisolvens CL03T12C04
MGNFITSIKVNHIFHLENFCIPISENEKKHLIITGKNGSGKTILLNAIVEHLSKVCNDKTLSFLDYEKHLESCRTRLQQYKVVGDSQKIISNQDSIELYKTWIEEVYGKVELSFHDIYSISKDFFSQNFIIAYYADERKSLFVEPKNPVKPDLKMKTDLKHNKVDQFLNFMVDCKVQEALARNEGKTEDADYIRQWFVGFRNILRQIFDDTTLELDFNYKDYSFLIQTRGKSFKFTELSAGYSAALDIVADLILKMQSQNNVVRAYEKEGIVLIDEIETHLHLELQRVILPILTTIFPNIQFVVTTHSPFILNSLENAVAFDLEHREPIEDLTDYSYEALAEGYFGVRTDSSEIQMRLQRMEELIRSDRLSISDKSELEMYLQDFDKIPEAVAPAIKAKYYDLKREWQNKN

SEQ ID NO: 81611 - protein, 213 aa, Bacteroides xylanisolvens CL03T12C04; identical to SEQ ID NO: 81179

SEQ ID NO: 81612 - protein, 502 aa, Saprospira grandis DSM 2844
MRIKQLRLKNYRCFEDLDISFAEHCINAVGEQENINVHLLLADNMMGKSAILKALRIGVATVFSNMKGAKVANNRHKGITQEEHRLLGEDIFAEYSPSVSIAIKSKQQLYLKKGQQGSWEEKELNWERYKSSPNGKTKTKPPTTRKNHVAGLFRESYNQIVSKKERLNPLCLYLGAEYVHIQQSSRKDYNFAGRSAMEGYWYCLDDSNMESYVFNWLSKLELSRREAEATAGGAQLYGRLPAHVHKIFKRAVQTVLPDIKDVDFVKMTQPKKGRLFEAVFSFKEEGYRRYEMLSDGYRYMVLLLGELVVRSTLLNKHYLEEDILDRQEGVVLIDEFGIHLHPRLQRQSLSRLSKLFPKLQFIVSTHSPLLVNGLYKEQIHLIVEDADKKRISIQPDTDAIGLGAEGVLREMFAVPVSLDQKTLDWQKEYIQLLAKMKKKLSSEEEKQRFRELSGLLAKQRAYEGLEQQLAKQILSLLGTEEQLAEELREEKLLDYLAQILND

SEQ ID NO: 81613 - protein, 312 aa, Saprospira grandis DSM 2844
MIAIKFPREDLKDDPELAAWLAKAESRSDWKELPAFLLRQLVHYGDEPSPYKCWYTEIQQTDRNAQDIEHFWPKGSGKPLSTAKKQMIEDELSFEFFQEEEEQPYPWLEKDHRNYRLATALANRFTGKRDYFPLALNSPRLTTGELPWEKEVYPLLLDPAEPQDAALLMVVPNGQIEPITAAVDDLPRSAYNDLAANWRQDGFNYLRAKISIHIYQLNDSGLVQLRKKKYEETMAKLEELERQIDSAYSGTNYLIDELKKMGAVDQALALTARSAVEDFKFRSQHPEMIPIIDEIQSHWQDFFDRYNSSWEL

SEQ ID NO: 81614 - protein, 557 aa, Saprospira grandis DSM 2844
MLLKRINIPKFKVLKNINVDYTRQEDDRIYPIVSLNGGGKSSLLQFIFTMLHCSFVEHRKFALDNLLSEFDFTESSDKLASFTLEYNNYQVELNFTIETDDESYRAMIDYKELEEKKKETITIMDRLGELQYIEQQIKDTKRVSTLIHRKLRRFIRREEEHDLIIDRDPEDSLNAIELIKNRIQEEYISDEELERIFKKTKILKSNLEKTLYKNSQIYIHHINDNKNVLICEALIPQELLATEFPQQKEHLEKQRTQLLEKISNQVFLAAPRTQIFHFLTDDSNEELFEQPAGYSFNSYDSILRRIKEKLSGFFTYEFASNQLIIDSFKQARDKDFEQALLTGEYGKNLEETKKELNNFLTGKEITVDGKISEVIFKEKNTGYKLLPRDLSHGELKKLSIFIWVKRNANKHSPPLFLMDEVDIGLHPSWQYEISDDLQKWGKNSQFIIATHSPQIISAAHHRNLVVLNQIEDSNCSTSRQYEQPFVEPDLNTVIKTIMGSDYVPKKVQRLRKEYLQLIENRQEESERGKELKARLLEHESEQSAFLQEMKFLIQFRD

SEQ ID NO: 81615 - protein, 209 aa, Saprospira grandis DSM 2844
MKHIKKTSPPPFFSSTVAGLTAWRHFSKKRSTKQHILQEEQNYLCCYCEKRVSLDNSHLEHIYPKSKYPSQTFDYNNLIVSCEGTHCNLDESTSKNICGHKKLNEFNPINFLDPTTTTDIGEYFIYNKEGEILASTKDSVKADYMINTLNLNYSGLIESRKNTVRALVNAFRRLSLNQGQQEQKLKTILANESQDFISFLRHYFNPIVS

SEQ ID NO: 81616 - protein, 621 aa, Saprospira grandis DSM 2844
MSSNFEFLRKVMPEAYYCFYRAEQALLTHPFVGMMYMRKGGGHVDTILFAALENSQNRELWLDPEKKYETAFLNYDSLNALVKNSAYWTAGGNTFLVNQSNWEGKVKLFLSNFLESLKKALGYIEYVQGQKLLKDRHLIEEIEFDASIKRAVNADFLREDEALFEFLTSAYLLFMEKEKLAQEKPAFLKAFEEENLAFFVKESKAFSAVYLNEKVEAGSLAYFESVLWDLYAFLGRVVLPRAKLNRLFFSDVYSLKKVSLDFEEAPSWIFLTGENGYGKTLVLQAIAAALYGEDEVTYEFLKEGIGVSAHGINRGFLFLRLRYSFFSRAVTAVNGHYHPHRNVIAYGSSRLVPRQVVKQAGEYNMVRSLFESDAPLRDIEDEYINWFARKEIHPRSKARYQQVKALFEEVVPDLELEIDEENFDRLYYRFKGDWAETTERLPFNRLSAGYRNILAILGDLVLNLYELQPTVTDIKALGGIVLIDELELHLHPKWQHKLPKLLSDAFPNVQFIASTHSPIPLLGAPEGAVFLKVDRDQERGIFVERLEGLEKEIEDLLPNTVLSSPLFGLKDLRSIKHKEEGDLQTESNYQEIEDNKALNKKLFDLLNKKKQQDFNPSDKKD

SEQ ID NO: 81617 - protein, 315 aa, Saprospira grandis DSM 2844
MRSINKNFNLAPEEWKRKLRNKLATLIREGANHRPTKRIYNHALKADLAVYYHDKCGYCEQALGNVQRTENFYSIEHYRPKRGPHSYWWLGYEWTNIFPACQTCNNSKDRDFPLLDEALRRTGPQSPLTQNIEDYLNDQSRKADHDYLLEEQALLLHPEVDSVEDYLAVNFNGMLVPRPKLTDVKTKRAEVTINCLSLNRSSLQEKRKKIIDDFQLQLKNELVKSGFAEPTKAVLEGSFFPIYQSLIEGLREIQVFHLVYECIITEIEAMLFQGIINDLIKDYLPLDEEMKQMLLFFLNRSWELYIEELNKALIP

SEQ ID NO: 81618 - protein, 426 aa, Saprospira grandis DSM 2844
MRIRELEIYNFRGFEQLKLKLDPHFNIIVGNNGSGKTAILEALTVAMGSYFLGIRNTDSRHILNKDIHIKTFEHNEEYVFPVVVRARGEVQGVSVDWARSLKGRKNRTTSRGASSIKRIATEAENQVRTGQNVELPLLVYYATGRLFDLAQKNKSTTTKQISSRFRAYDRCLEAKSTHNQFQKWFKAKEISIIQKRQEDLSFNLVKKAIVENVPDCKDLYYEFDPDKPEGLKMLLEDERILSFNALSDGSRNFLAIMADLAHKCVTLNPQLQEEALKETKGIVLIDELDLHLHPEWQRRMIKALKSTFPNLQFVVSTHSPFLIQEAAENELIKLKNNQATIGSANHLSIEDIAEEIQDVENPQWSKSRQYMFEQATAYYKAVKEGRATPEMKAELDKAMKPFAKDTAFYAILEQERIIQESQKGKE

SEQ ID NO: 81619 - protein, 224 aa, Saprospira grandis DSM 2844
MRTVEKGIAPNVYQKYGDAKHDLAGRIGYYCSYCEMSVHNMLEVEHVHPRANGGADLDWDNFLLSCKYCNTIKSSRNLNRIGYLWPDQDNTDLAFEYNSANEVSVKTGLTGTLAQAAENTIHLMGLDRLPGHAAPTPADTRWRSRQEAWDKANRSLNNWRRAPIPEMAAQIALSALESHYSVWMTVFEGIPDVLAAIDLEYGRFGLFKDRDAAGNRVIRTNGQI

SEQ ID NO: 81620 - protein, 780 aa, Saprospira grandis DSM 2844
MAKQLAEIKALFNKRFGYRETNWQKEKVQALGGLELDGLYLDGEHRLLWANSESIAKPVYDEQILALKASYPKLQFLLLSKADMLFLREIEQQSGVGYDKWWFIHNSELAIQESDILLSKLKWRTSLFDRIKDLRLKPSERFGEIISALVEKVEQFKGEDFIYKYYFYVSTVGQQPDELKISFWKNKKRKENSEEPECFYEINTRTERETLVIRPKEYDQGDNNSGKDNPFSIAAKIAKTIGAVQVRNGEWEKEYTYHSKPAEGILSFLKGVDFNAINYGLLAGGGDLKLITEEEDWIRYRNEIDRHFSREGGKVSDKAIKGLTLESLSLKNIGHFEELEIDLSHRVSCFLGLNGSGKTTILRSIALALTGVYQLEAREPLKGWLKVDRVEKTTQASSYKEILALDGSIELCFSSRTKEEKRKHLHRILFKPHEEPTEDHKAEEKVEKFRLLNGREFPIPILGFAQGRTRPLSTKKEEQASAKNYKGRSTISDLENLITEEGDNKLEELKRWLMITHNEGLNLEESIEREEDLTKKKISQRKRDGYKKAFYLVFELMTEIIGREITFNVANKDTLWVKLGASKSEDDDEELKEQVISFSRLSQGYKSVFVWVGHLVIRYAEHYDYSEGFETQEGIIFIDEIDLFLHPLWQTRVLNILVEKFNRARFIVTTHSPLVVSYITDESTDLALYRIVKETVEEELYVKGNGIEDTYGYWMGIKRFPPKITALIAEADNAISIDAFDEAAEVIEKLDGWVMPESMVVRKLQARLNRRKIIFKFRKK

SEQ ID NO: 81621 - protein, 249 aa, Saprospira grandis DSM 2844
MLHIKKTDSLPESIEGFLADDSECRSKKGNVREYFNCFKKRSLKGNLNVRNKVSLQSHLLGEQGGCCCYCGIRIGKPASVSIEHFTSLTVNSALVLDHGNLLASCTSRSRCNLGRNDKEQRKKVQLKNVLNPKRGEASDFYQKMKIKYILPGEKVKGVGKISSGNTEIDKELNNILSLNNSDLIKCRKEALNVFISSYEKLLVCLRSDELILDEISTLFEKDDFLAIKMYWLGVELSKSDYLDPTNLNL

SEQ ID NO: 81622 - protein, 471 aa, Saprospira grandis DSM 2844
MEEFKIELKLKELQIQGFRPFEEKILLPFQPDITVIVGNNASGKTSILDVLANLLKAVPNMLNNNRLDQHVLLGAEDINYNIKPRESVSQLSLIAAYPEVNFEEEEELINQEEEISFELRLNPSQSVREQKIRLTSSDEDTANGDTALGDSYPIFQRAKAEKKKVSLPILAYYAARRLDRAVDSQKGNILNIDVFANFRNDELSQDSFDLERLRSWLNYLEQRQLKQQYETEEKEREEEVWKNIQQVVIDFLSGNGVVYEGVETIYNTKYPNGTLAVKTNKGSRSIQQLSSGEKNILLLVIDIARQLVIANPDATNPLQEGTGIVLIDEVDLHLHPAWQEQLFDKLKKCFPKLQFVVSTHSPHVVRHLKKENLVIIEQEEDGPLLLQVGKKYIEERSVESILAEVFKISLEGKHDTKVRDFYDLLAEGDLEKAKELLSELEKFWGEDDQQIKATTAAYDLEMKWLEDDEEE

SEQ ID NO: 81623 - protein, 234 aa, Saprospira grandis DSM 2844
MQAINKKRAHEPTSLRLYRETTDAASYTGLPSDVKRKIKDVLLKSEQFYLCAYCLGKIEVSSATIEHYSAQNGEEENSEEEDLSYMNMLAVCAGNCKNKQSKIEQHCDKARGNKTLQFIDPREKSKSEAILTYSSDGRILPNKRKVVDEELRSKIEEDLKALNLNAACLVSSRQSAKEAAQRYLDAEAKKEEWSVRDIEKAIEKWETLKKGAKPAHYLYVVLYLKKKLKAARRR

SEQ ID NO: 81624 - protein, 706 aa, Saprospira grandis DSM 2844
MIKVDRGPVPDFFVKYDTISKESSLRGESSYDFRRVWRNDYHLRPQLKHVLLKRFNRKCAYCESPVGENNNFHIEHFKPRSLYPSLTLSWDNLLLACNICGSMKSAEFPLDENREALLVDPCKDNPEDHFAYTRDGLIFGITEKGRITIEVLQLNRKNLVNIREVAMGSYVKILYTHNNSLKKITKKLKESPFSGIALFLMRIKNSNIVLDGPSLINERKQLKSETIWNEVISKVKIKSETIWNEVISKVKIKSETIWNEVISKVEIQNFKSIRETSINFNPLYEEENERVEMPILFLLGENGAGKSSILQALTVCLLGEEKVLSKTGITVDDILRKDGAPKKGFVKVYFEQGGSITLHFERGKGFRFEFVDRQKAPSVLLAYGAVRLARRAHESKFAFNIKEGVNIQGLFDPYFGLSNAKKFLLNLGDVDFNIVSEKILKPALSLSFEDSFKREKGQIFLVKESGEEIRYETLSSGYRVIIVLICDILKTTLEVFELDLEKQGFEKGAYLSTDKMKGVVMIDEIENHLHPRWKIEVMKTLRKVFPKMQFISSTHDPLCILNSYYGEVNVVEYIKPKNSDAQNSETIILGKESLPDHEGLSVQDILTSAFFGLLSTRADGMEEKMRRFYYLKSRNLYEGSDDFHELATLEKELKAYNFLGRNQRERLMLEAIDDYLEEQKRTANPEERAAKKAKLKALLKQIIKDK

SEQ ID NO: 81625 - protein, 266 aa, Saprospira grandis DSM 2844
MIFIDKGKNKPKFYASDRYKKKLFNELKVLKTILDTRKYKFVYRGYANALRKGFRSYRENDVYYSKCAYCETVMRTNDIEIEHFRPKGPLKTWDASKDRAQNKLSNTVIPDTGYYWLACDWDNLLPSCPGCNKSGTGKGSWFPLVEESTRGLRSAGQGAEVDEEPLLLNPTKNIDFGKFLSFKEDGTVKPSLGLSPEDLRKAQATIDIYGLGREGLVDARAAVILSLKLELSKDFELSEIQQTYLASSSEFSLMASQVIENLIEAM

SEQ ID NO: 81626 - protein, 523 aa, Saprospira grandis DSM 2844
MIFPRTVDNRFSNYLEASLFQTFSELGEHYSVFYKVWLQDSKTENSSGSSVMSFILLDKRAGIIILDINQGGIINTNFQNIEPLLKEELLQQLPSKKIPPIKIFSFSKNDEAAISKLVQELLNPLAEEAQLIDAEDFSILEQFFKVKSAFYAYPIQLESLRFENYKGIKKIALNGLPKEASWFFITGENGFGKTSFLQALAVSLDGKLPKSELQRERFEESPSPLQANLWTIIHKNEVTACPPFFVFSKGQSDTSYHSVLAYGASRLDIDKDPNPQRHASNPIESLFNSQYVMRNIEDKLLEWNLLDRERFEKTKQILEELLPAIKIEIVAKKSIWYKEKAPEESYFEAVSFDELAAGYRSLLALFGDMIIRLYERQPNVIDPKEFVGLIIIDEIALHWHPKWQRKLPTILSQLFPKLIFVVSTHSPIPLLGAPKNSVILTLNRTQKDGITVRRLERLEQELPKLLPNLILSSDIFNMDDLAPISAQQEEILNFSASMQDKNAREQAKEHLKALFKELEEEED

SEQ ID NO: 81627 - protein, 296 aa, Saprospira grandis DSM 2844
MIPVQKKPLSIPAKLSSESCLNNRRQIIGPPINKGKISAYYYGDTSVKEKLNELYYNKCAYCESLLDGFDVEHYRPKKGVTENTTHPGYYWLAYEWTNLLPACISCNQRQKGNHFPVNNSHKTIPSCNHLSEIIESDQKLNELYLSQEVPLLLHPEEQNFDPFDYFDFNLETAAIIVKKDLSKTDLKYKRADATIKIIGLDRDYLKTRRANIIIALSNEFLFHLSQLATGKIQLPDLQTIFYRLLAKLESNSQVNNEYAFFWQYLKTNALYLINLSVNNFIPDPRFQNLLIRRFQK

SEQ ID NO: 81628 - protein, 421 aa, Pseudomonas amygdali pv. tabaci str. 6605; identical to SEQ ID NO: 81088

SEQ ID NO: 81629 - protein, 252 aa, Pseudomonas amygdali pv. tabaci str. 6605
MRRVIKGTEPASLTEWKASANEDWTPTYPTLQNPQKRDLHNCLLQEQNFSCCYCGREIELDSSHIEHFRPQDHYLPLALEYSNLHASCLRETTPGNPLHCGHYKGNWFDEDLHISPTEDDCEQRFRYLLTGKIQSTSHTDLPATTMIEKLALDIAYLTKRRQEAITRVFDEQILASISDTELTLLVQGLRSGDANKQLAFSHVVARYAEQFLASLNPPPEKKLGREYVTRVVLRTYAERKLLSYICLYFIFV

SEQ ID NO: 81630 - protein, 452 aa, Pseudomonas amygdali pv. tabaci str. 6605; identical to SEQ ID NO: 81086

SEQ ID NO: 81631 - protein, 216 aa, Pseudomonas amygdali pv. tabaci str. 6605; identical to SEQ ID NO: 81151

SEQ ID NO: 81632 - protein, 431 aa, Thiovulum sp. ES
MKNFITDLTIKNVRGIQNLHIPLSKTDKKHLLITGKNGSGKTTTLIELNNSLNGLISGSFAQFIENKQKHILKFQKQIKDYKKQKENLTDPMQLKNIEKWISDLQNNILYSKRAIENWQEQVEEFSNLDLNFNQTEVYNEISNGSFILAFFQAQRMNKPTVPKSIENVNLPKKNQTATTLHMQFIKFLVRLRNTMLNEQFDGDKNRAKKIKEWFDSFENTLKDMFGHKDLKLKYFNDTLNFKINYEDKEFALNELSDGYSSLLAIVTEIILRMEAHGVKAYDMEGIILIDEIETHLHIELQKKVFPFLTKLFPNIQFIVTTHSPFVLHSMPDSVICDLERREITSGDRFKNSSYSHIVKNYFEVDSEFSQILLNDIEKFENLVNQFENGEVSEEAEEELLEMDIKLNKISPMLSDEVYLRFKNAQEKILDK

SEQ ID NO: 81633 - protein, 206 aa, Thiovulum sp. ES
MHKIDRKEKPIFQKYSEESVKTALKIDFKKKCYLCEEVTRHFEVEHFYPQKDFPHLQNDYENLFYSCQKCNKIKPKTINTSSEDEVLNSCDIAVENLISLKYNSKKCHVEILATSQKPDQKTINTVKLLKRIYNGENSKSSSCEDLKDDIGEKVENFYKVIDEYHRTKLKRVALKKIKEELEIDKSYSTFKLWIIRNDKKLKEVIA

SEQ ID NO: 81634 - protein, 469 aa, Citrobacter sp. A1
MKIEQVSLKNFRCFEQLDVTFHPQLTVLTAPNGAGKTTILDAVRIALWPFVKGFDLGSQTGKSATIQIEDVRLERREQEMEPILPCQITAQATGIPIREKQPHLFEWQQVREQVKPRTQSKGDRSTQVLTRLAKSYQSVIYKGQQAEADTIELPLIVYLGTGRLWYQGRYTSEAEDKKLDASVFSRLWGYQNCLTATSSYKQFESWYGWVFRSYRELQIGQLENQIKPQDQSSLAYFAAAIEVVQRAINTLTSSLTGWHDLQYRASMGQQLVMEHYQHGYMPLAMLSDGLRNMVATVSDIAFRCIKLNPHLKDEAAQKTAGIVLIDEVDMFLHPAWQQQVLGALQEAFPLLQFIVTTHSPQVLTTVAKENIRQLGSDEHGTYARMPPFSPLAHENSDALAKVMETHSQPSLPLQETISEYELLVRSGEETSERATTLLATLEQAGYQFHESDLATWRFLARRKLAAKGS

SEQ ID NO: 81635 - protein, 197 aa, Citrobacter sp. A1
MIELQHRAIPTPALTQYRTANPAATAADFDSTAFKAVKDAVKADLHQDQGGLCVYCEQHLKSTGGQVEHIKPKAGANAHPHLCFDYHNYAHSCINNQTCGQRKGNGLLPIEPGPGCNQQWAIASSNGWVEPLPTLTRRQRHPVVQTRDMLGLNKDPNLVSERKKWFTQAVTVLQTAPDDIDQFLQLAPFRALIAASI

SEQ ID NO: 81636 - protein, 565 aa, Vibrio cholerae HE-45
MRLASFTIGSDREGERQRFKNLKNVTIDFEEQEWITLVIGWNGTGKSNVLEALATAFLELIGKPQKKGTHTKPETPSFAYDIEYICHGKYVKISADPDSKKAKYIISYKMADDAPAEQKELFENEDTYKKISLTDFTKQRDDFLPKYVFGYYSGHSERMHDVFLPYLEKYDENLRNGINPGLRKLFYAKPVHSQFALLAFMLNRDDFITNFLENHFGIDTEVGIDSVLFVLNQPPWKSSAPDGDPRFWMSRGVVKDFLSNLYDIAIAPIRVKRKTQKSLWNSTELEHLYLYVKDLESLERLVGDKLPSEFFQDLESTYVSELISEVRIRVKLKKNDGSVTFRELSEGEQQLLTVLGLLRFTAEDESLFLLDEPDTHLNPKWSVDYIDYLNKFVTSGSKGENNSHIVLTTHNPIAIAELTRDQVQILSRDDETRTIESHKPHYDPQGMGYAGIITSDMFGLGSSLDKRTQKRLETYRALASIENKTKFEALRFQVISEWLDNDRFSMSQRDDDYERYIKIRNSLLEEQSGMDDYQQLVNFALSLSQEKRDEIAKQAITKLLQEDQR

SEQ ID NO: 81637 - protein, 291 aa, Vibrio cholerae HE-45
MRFVDNAFIDLPDNWEDRAETATGALLAGEIVADDRSAIWKDLKESLETLSNGRCWYCETNIPRTDNAVDHYRPKGKVQGVALADEGKSLTRYDIVPEHSGYKWAAFKAENFRFSCQHCNEYRKDLQGTAGGKWNYFPLVNEPQRAYEELDEDNEVPALLDPCKRLDWRLLSYDKSGMPFSRFEEGSPEDKKVKLSIRLYHLDQKRLNEGRIAQWKLFKPLLDEAKKWYLKKLRQDQGADACFEKELRKIGQWFHPKSKNTYLGFLVYQLEQDKDKDMLHPWISELIRTVG

SEQ ID NO: 81638 - protein, 687 aa, Caulobacter sp. AP07
MPVGRSKTPHLYYLWLADAWQNLLPICGTCIPTEPQFPVGGKRARLPSISQVDAYVDRADGRWNTHPPGDEDPLLLDPVQVRNFEQHLAPKLDGELIASSSKAEHTIAVFDLNRAERRHQRYQAYQKRLQALGAFLAQAEREPEEERTVQASLFDFADMEFGGTWFLLLRRIALRIAKLLEVRWSTSRANIFRFFLRLAAQERAAAGFNTALEAVALEDTSVRARQWSLGAVYSVRAPITRVEIQNFKAIEHLELNLSTGEIRPEEGASFVTPSLVILGENATGKSSILEAMALSLTTPAARGALDLTWPDFILDPSQLGLEQGHDDRRATVSIRLATGQSVKLTINDNGPSVSSELGNHQVPVFAYGAFRRYSRRALRPAAHKHVRNLFDASPLSNPEPWLKSLSKEAFDMVVRSLRDLLSIEGDFDVIERKRGVKHLRVVTSVTEPDGVIRYSKTPLHAVSSGYRSMLAMLCDIMRGLLDERVYEGFENFQTAQGVVLIDEIEAHLHPRWKVQVMTSLRTALPRMTFVVTTHDPLCLRGMGEGEVEVLQRVATVDSGHESQLPILVERMENLPNVADLRVEQLLTSDFFQLLSSDDAAADRRLAHIGDLIAARRRDALSPADGKILDDFEQDIASALPVGSSEVHRMVQEAVATYLEQRHEASSQTLHRLRDKAKADILAALQAL

SEQ ID NO: 81639 - protein, 316 aa, Caulobacter sp. AP07
MRRVDRAAVDVPASLQPGGAGPDELVAARAFRNAPPAPPRTDGKNKKKTFTYTAYKGDDVRLALEALFHGKCAYCETFYAAAAPVDVEHYRPKGGVADEPGHGGYWWIAMSWENLLPSCIDCNRKRGQVLVAPSTSLATLAKTSKRAVSQAGKKDSFPLAATGVRAQAEAGDFSGEHALLLNPCQDDPATSLAYSFDPAHPAGLIVPTGNVSQQQRGAASIQVYGLNRQRLVEDRTRVLRNLEFLGDTVIELSATIEELEGQADAANPQEAALTRLLAMRNQTLAQMKAFTRDEALYASMASAWLDDFMARLASPA

SEQ ID NO: 81640 - protein, 806 aa, Burkholderia sp. BT03
MLSEGALHAKRICWELAKFSKARGIPEHDLEDIAYILLVALILRDERRTGKYLPASHAKELESLISDILDVGDPSHVEGQLQGVRDLLAAATNTRPESNPRETRRSALAIRHIAGMLAHELRDLDRNGRIDVSDALFYKQFARLAPSHPRHHALVARFALPLIDLHGGVSESQPGPGEVFVISGMPDQADFNYQQRTARLPDHLTTSLRFIRNLRLVAYDIAFQTGNVIQTPTALSVIDTSFDFGRSAYGDVPVIYSNAGAPNDVLGLRRERASPMLVVAGVKDRRLLKRSAEARRELVEYHGLRAVVDFGSFNSKAMTTLSFWYFGPPFPGFEDRIAHIDARQLRPNAKSDEMLSCATLVGTLLRIWSGGETLSKSRMEETGAPRRIIAFVEEAFSGGNTLVPGFARFVTRHEMSERDYSLRAEDYVGRNDDHSWRPDVEINPILTRLREHRQGSAVFLIGDNGAGKSLAMRDTAMALALEGHHSFGVSFGSTDRFERSPRAEPLSSHFTYAGARSFRSGPNVQHSLGELGDMVKDIYRNTQRLDCFEAALDTLGFRPRQFLVPVVMTSTSDPLERLLADVHPLSTLSTTERERQDLNRWQTLPDGAYKLAFIRRDSPEIVVFNSLSSGEQQILTMVIKIVAKVQRDMTVLLDEPEISLHVAWQRQLPQILREFSRRLGCSFVVATHSPVVIASATDSDDHCFVMRDRRLYELKADQRRSVESSLFEGFETYTPYTHHVQERCAEIVSRLIGESDENGLLHDETTILDELKLLKRRLDQVKGMSSTQDIVLVDKAIIAVQEILAQ

SEQ ID NO: 81641 - protein, 255 aa, Burkholderia sp. BT03
MTPHSERDGMRERLRKELAEYLARPHRTKKYREDARATLSKFFRETRNGKDGWVLLESLDKANGDTVTGSELKAALRDQLVKIQSNRCCYCRRWLVNTAYARPIEHILPRAHFRKFSLHFWNLALACTDCNTLKSDKLWGAVNPKRRSYPQPNEINDWYHPRFHVYDQHIRFIRLESNGTTFVVFLGLTTQGRTLCKSLLRHIAAKEMLISNNATLSSCMATLDEYGDRFNTEKAEKLRDFQNELSASVVRMIKT

SEQ ID NO: 81642 - protein, 451 aa, Pseudomonas sp. GM18
MEIKKIRLSNVGRFTDLEVAFAPTPTHPSNVTVFVGNNGAGKTTILKSLATSLSWLVARIRTENGSGSPIPEDAINDEASTAVIEIFVDVTYPDATPPVKHFDWTLARSKRGRKPTRTSKLSDATQLAEGYREYLSYIDQTVSLPLIAYYPVERSVLEIPLGTKTQRSYDQFDGYDNSLNRGVDFGRFFEWFRDREDIENENIGSAIMFRDLPETSSLATDALLGYLKKAYTDSRDRQLTAVRSAVSAFMTDFKNLRVLRRPRLHMAIDKSGKTLNVAQLSQGEKSLMALVGDIARRLAIMNPTLENPLEGRGVVLIDEVDLHLHPQWQRRLIHQLTETFPNCQFILTTHSPLVISDSKNVLCYVLDDGDLVEQNGLYGLDANQVLLGVMNTEVRNKDVQERLDRLFELLQDNHLKSAKALFQELSNELPSGHIELAKAALLIRKLEIRSA

SEQ ID NO: 81643 - protein, 209 aa, Pseudomonas sp. GM18
MRKIQKGNEPESLRQWKRTHPQQRYTDLPPTERQSIRAACLEEQHGLCAYCCHGITLENAHNEHVEAQDSAPNRTLDFSNIVASCNHSKQCGDAHKSQSLPLTSLMDECETELKFYLSGAVEGLTPRAASAIKVLNLGETRKNNLALFSTRKAIIESLLFTHSIKPSELRLESDDVLSILLEELQQPDQNNRLQPFAPILVNVLRQIRD

SEQ ID NO: 81644 - protein, 451 aa, Pseudomonas sp. GM30
MIDFIKFQDWGEVWRTIPFVAAEDLLGQYGFRSTIVTGQNGSYKSTMLRELVAGVIAPKSTSAMVSVSDGLSMKHVICASGSVADRFPSKEKAGGGSTEFATEQYAYIGQRVGANLLSKKRPFETVLVFALDGNKSERYEWPFYNRAHEFANIVPELEVSVFVNKDKITRTTKAPSRIEQGVSVEALRRSLDLDDFKFSRYFSESVAINILNEFDEHVFKEFSEFIRSSRSTFVLNMGSGGIRCKTASNDVVRLGFMLDIFSLRDVKVQRVGSQQPFSIFELSSGEYHMYTNLMGLGFGVEEGSLMLLDEPDNSLHPQWQRDFMAAVHGICQVGMKFGHLIVCTHSPLIVGAALEGSTIVDLSNDEPIVSVASFGASSDDILLEQFGITSSRNRIVVDVVQRAVSIIEKDGFEHPDLLALTDELVSIKSALKSEDPLVEVIEAILGASGDD

SEQ ID NO: 81645 - protein, 241 aa, Pseudomonas sp. GM30
MINIGFERIHPIPVLPDGIVVADLLGLDWDSQGNAVKAFKSALKPLLRKVQKAKCSLCRRMLYDDYAVHLEHFIEKNIHGDYTFEVRNLSLSCGTCNSKKQGYNRTLNGLIRKRAKRKELEAEKHCPALAVKIPANAPLPTTPESYRWVHPYFDQYSDNIEIQKGWIFIGKSRKGIRTIRSVKLNALAQIERRALMERFEARPGRLSMLMGATAELDNHRAGHILQLVAKKLWQRREASGV

SEQ ID NO: 81646 - protein, 423 aa, Pseudomonas sp. GM41(2012)
MRLDRLNIQNFRCYEDATFDFQPGFNLVVGVNGSGKTSLLQAIATCLTDFSNAFNGYFVPLDEELIRFAIDKHQGRVRFERCYPMQLKAEGCIFGLSNWVIEKLRNDGSASADANVLKVLTEKKNLLGTENNLDLPILAFYRANRRWAISGVTAESAASQRVSRLHGYENWFDAAANLTDFESWFIGKTLERLQKVSETEGAIKHFDDELSLVNSALKKALPNSHGLRYDITLRSLMVDLDTKESLPFNQLSDGQRAMIALMADIARRICLLNPHFGQKALAETVGIIIIDELDIHLHPSWQRSIVAALKSAFPKVQFIAASHSPQIIGSLKPEEVIVLNNGDGSHPRVTYGLDSSSVLEEVMDVSQREPKIEALLSKLFSTLEDNDLKKAKVQLEALKKQAPDLPEFAGAEALIRRKEILGK

SEQ ID NO: 81647 - protein, 214 aa, Pseudomonas sp. GM41(2012)
MKRVIKGTEPASFTTWKSTANNDWSPTYSNLQNPQKRDLHTNLLQEQGYFCCYCGREIDASSSHIEHFKPQEHYGELALEYQNLHASCLRETKPGNPLHCGHRKGNWFDEAQHISPMDEQCELRFRYLRTGEIQPTVSTDLPATKMIEVLALDIAYLNNRRQNTIRLLFDEEFITQASEEELTRLVAAIRSTDIRDQKPFDHIIARYAEQLLGR

SEQ ID NO: 81648 - protein, 456 aa, Pseudomonas sp. GM50
MKLEKLTLANFRGFDQIDIEFSHDVTVIAGVNGVGKSGVLKAIASAMSLALPKFTVSREAPIGLSDTDVQSGKPGLSVAVILGLDAAKVIVDLTHAAPLAADKAESLLKRRDDLRFATRELKKGSKEEQDVNEEIRRIEMQLDETSDIAAVRILPNDAAVKSEDLIAASKAGIQQPLAVLYSTSRFLSRLPPVLPKAKSIDSATAYDKSLSQLEVSLNDFANWFRVVVSGAGSETRERLFQQLEQAVKTFLPEVSSLALHEGRPPRFSVMKSGRLLFLEQLSDGERGLLALVFDLVRRLAIANSDSRNPIAEGVALVLIDEIELHLHPKWQRDVLPRLRDIFKACQFVVTTHSPLVLGEVPARCVRFLEFIDDKICATVPTEAYGMDANRILQEFMGAPVRNRQVDAELTTLFELIDEEHFDEARAAIANLARKLGEDEPELTRASSLIRFLEGAE

SEQ ID NO: 81649 - protein, 208 aa, Pseudomonas sp. GM50
MRTIQKGMEPVSLTRHRQQPHADYDNYTDKAGLRAALVAEQQGVCCYCQSRIRATPDGMKIEHWKCQALHPARQLDYSNLLGACLGGQGGAGKNRHCDTQKGNSNLCFSVCDLAHPVERQIKFLGSGKITSDDAAVDAALNDVLNLNWSRLVSNRKAVLDAFKQKLGKGNLNIVAELQKWDGTQAGELPEFAQVMVYWLKKKQARGRV

SEQ ID NO: 81650 - protein, 455 aa, Pseudomonas sp. GM50
MEITSFKLKDVGRFTDLTVSLAPTAKHPSNVTVLVGNNGAGKTTLLKSLATSLSWLVARIRTEKGNGNHLAEEDIRNGASSALILIGIEDESQARSSPPDANPEDALFTWGIARGRQGRKAHIHSSLGGVSRLADHYRNQLTAFDKASLPLIAYYPVERSVLEIPLKIRTKHTFDQLDGYDNSLNRGVDFRRFFEWFREREDSENETGVSDAALAEISDKFGKDSKVWKALSQVKASSRDRQLTAVRSAIAAFMPGFSNLRVQRKPRLHMAIDKDSATLNVSQLSQGEKSMMALVGDIARRLAMMNQSLDNPLEGDGIVLIDEVDLHLHPKWQRSLIRQLRETFPNCQFVLTTHSPLVISDAKDVLCYVLNDGELREHNGLYGLDANQVLLEVMDTDIRNSEVQQRLNRLMERLQDGDLDEAKKLFSELSLELSDGHLELAKAALLIRKLELRRA

SEQ ID NO: 81651 - protein, 210 aa, Pseudomonas sp. GM50
MRKINKGIEPEALTRWKRLNSTLRYRDLPVEESRSIRSACISEQYGLCAYCCQAITIDDAHNEHIEAQDRAQNRTLDLSNIIASCQRSHQCGHGRGTRALPLTPLMDECETELKFYLSGLVKGHTDRANTSIEALNLGHTEESNRGLVGARKTLVDALIYTQNLPPDELQNEDEDFLGLLLEDLQTPDAGRLQPFSPVLVNVIRHLLARP

SEQ ID NO: 81652 - protein, 445 aa, Pseudomonas sp. GM74
MHIKDLQIEKLRSFESATLEFNLPGAKDLQYPNVNVLLGDNGLGKTSVLRAVALAVLGPLLSGSSGFVPEGLIRRAPGKVAGKINLNKNKARLTAQILSTVEERPPLKKSALTMPEEFSVSTEIRTVSLVERMSWSMSPQDYDEAIEAMQLDEKSPAFFIVGYGATRRVEAAARVDESARTRSRLRRYERVAGLFEDHLTLMPLSYWLPAFAEENKGRYTQVINLINDLLPPVCQIQSVPTDREHLFEMNGTVLPFRALSDGFRAYIGWIGDMLFHVCQGVSSGLKLREMRGVIMVDEIDLHLHPEWQRSVVPTLAKALPNVQFILTTHSPLVVGSLTSQNLFVLADENGSTVVKRLPEHVRGKSAEQILLSPYFGLESTRATPTADTLISLARSAVSGDAKASVDYLRVLAEGMTFEEMAKPQKTKTTATRVRRPRVTPSESKE

SEQ ID NO: 81653 - protein, 295 aa, Pseudomonas sp. GM74
MIRYPISEAELIALINGVQPNWIGRAQTRIQHYIAAGGYTDDSDFWGEIKHVYISLQHEKCAYCETKLQGAVLASKVHEVEHYRPKSEVKPWPNHKVVHWKDFKPAWPTGAGSKVGYYKLAYHHLNYAIACTRCNSTLKSSYFPIRGKRDIQNSDPANMQKESALLLYPISSVDPDDPQELITFNGVLAVPRHSDGPANERAVTTIEFFQLNHEDLTSRRAVEIRTLWFALQLAKINPQDKQLYEDTIALMCSPQSPFSSCVSAFLELTKTDYPTAEAMAKLIITALTANQPLTA

SEQ ID NO: 81654 - protein, 323 aa, Pseudomonas sp. GM78
MADHYRNQLTADDKASLPLIAYYPVERSVLEIPLKIRTKHSFDQLDGYDNALNRGVDFRRFFEWFREREDSENETGVSDSALAEISAKFGKNSDIWKTLSQLKASSRDRQLTAVRSAIAAFMPGFSNLRVQRKPRLHMAIDKDGVTLNVSQLSQGEKSMMALVGDIARRLAMMNQSLDNPLEGDGIVLIDEVDLHLHPKWQRSLIRQLSETFPNCQFVLTTHSPLVISDAKDVLCYVLDDGELREHNGLYGLDANQVLLEVMDTDVRNSEVQKRLNQLLKHLQDGDLESAKGLFAVLANELPEGHLELAKAALLIRKLELRRA

SEQ ID NO: 81655 - protein, 206 aa, Pseudomonas sp. GM78
MRKIDKGKEPGSLTSFKRSNRTLAYRDLPPQERQSIRSSCISEQYGLCAYCCQSITVDNAHNEHLEAQDSAPNRTLEFSNIVASCQRPQQCGHGRKTRQLPLTPLMAECETELKFYLSGLVEGQTERARVSIEALNLGNRGLVGARKQMLDLLMFNLSNQPAELQFEEEETLAMFLDDLKTPDPAQRLQPFSPVLVNVIHHLLTQP

SEQ ID NO: 81656 - protein, 443 aa, Pseudomonas sp. GM79
MKIGSFDHDGTMVELIPAEALSASSNSFTVVVGKNGIGKSRLLSGIAKELTQRYDYDYDDEDEPLVIAISTSPFDKFPAISRSRSKNYSNFRYVGLRGDSSASASSLISLMSSAARGLLKSALHGHNGASFLEVFSSLHFRPQANFILKPAFDKTAHSTANSTEEYFFVEPVESTGPIRVDKRYKHVYDGLGTEEKSSVEYAMSNVASYYQARKAIELEFDFATSTSYIDGKKLSPSILNSIVILMKLGLMRLMDITLEKEDHGSLSLRRASSGEQCLLIIMLGIAGHIRDGSVILIDEPEISLHPRWQEEFMPMLTSAFSGFSDCQFIIATHSPQVVSRATSKFSYILVLESGSLLNSKDFNNKSADFQLAELFGAPGRMNEYVSRLGFNLIAKIRARKSIDIEILNGLDDLLMFKSRLSDEDPVKKLIISVEELVASHATH

SEQ ID NO: 81657 - protein, 196 aa, Pseudomonas sp. GM79
MPLINSAVTFSPEAILKIATVKSEPQLSHTRWGDDDLEELRREIRNFYRREQKLTCAYCKEEIGVIAAANAPIEHILPKSKYIQFMFEPKNLCVICADCNTYKKDREGLLDPPLYRDAVRIYPLDSSRYRLFHPHFDEYDQHIKKIRYIYLPGSNKGSYTIFACNLNRVIVELGVSDELFNDVATALERARFGGNG

SEQ ID NO: 81658 - protein, 508 aa, Pseudomonas sp. GM80
MLRSFEITTSNLDAQVNLYEDENTTFDTWISVLIGQNGSRKSFILRQILDAATGETNKAGAKTVSFESKGTNWGDGCFPDSITCISGTPLDRFPRMRNYSLGISVSKARQGVRKEFLYLGPRASNGMTGTAPSERALMTALFLNADKLAGRAHLFSTIFSEVGFRPKIRILLRLERELSMHGRRFNAKEPGRISGPPERAMERIYKYSLRPFLDSSYVHNLGGRLEAALGRIMNLDFYGFFELVKIFNSDEPPVFVFKDGRIQLESPAPQGCRIGGDELEVYVRAGVVLISHTTFYKIQNDTCVGAESAAVDLELNGEDLSSGQWSWIAGFAGLCADVTQESLILVDEPENSLHPIWQQTYVPTLNKLLREFKGSQAVIVTHSPLIASGVDPEWGRVEALVNHGVDEEGRQVVRSKTVNNTFGWRASDVYEEVFQVPSSRAPAFTKTADIALGLLRSGEPVTVDEYKLFKDELSRDLQTLPVTDPLRNVLVSIIKDLEARLAQENMDV

SEQ ID NO: 81659 - protein, 291 aa, Pseudomonas sp. GM80
MFEIIDFSDDDDALLEGVRGHKGKAWSAKAEVVAYRKRLLELQGYRCAYCQGVIDLDEVGHRELDHILPKSTTKDCTIDKGRSNDDKHRQHTFGYPQFTFEPLNLIVTCKICNAFKKSHDPLLDRSLAYESDDYPVLGSILWFYPYSHRYSDHISRTENWTYKRLSCQGEAVIRVCKLDKAEVLASRFAIRALIQAKRSKNARAAFTSLAAHVHNEVCSMEQAVDALAGTLDISENICEQLIELWLFYLRGGGVRHVEKFESILAAIVFDESLGIDEAAEPFARAAEVQTA

SEQ ID NO: 81660 - protein, 423 aa, Pseudomonas sp. GM80
MRLDRLHIQNFRCYEDATFDFQPGFNLVVGVNGSGKTSLLQAVAASFVDVPACMGFYNNSLSESDARFVIDNYAGRVRFERKYPVTLKANGDIFGPRTWLLTRLLADEITYGDSSLVEAVREYVDGLNQGKNADLPLLAFYRGNRRWSVTNVSAEYSATQKTSRLDGYKNWHDCAADIQDFESWIIGKTLEQLQSIHRSSGIMSIFDDELTWINAAIKCALPDSTGLYYDLPLRSILVNFGSGLVIPFNELSDGQRGLIALIADIARRMCILNPHMGKDVLKNTSGVVIIDELDIHLHPAWQRSIVPALRQAFPKVQFIAASHSPQIIGSLKPQEVIVLNNGDPSHPRVTYGLDSSSVLEEVMGVNQREPEIESLLSELFSTLEDNDLKKAKSQLAALKKKAPDLPEFAGAEALIRRKEILGK

SEQ ID NO: 81661 - protein, 214 aa, Pseudomonas sp. GM80
MKRVLKGTEPASFTDWKSSANDDWAPTYPTLQNPQKRYLHAALLQEQGFLCCYCGREIEAATSHIEHFRPQEDFEDLALNYQNLFASCLRETKPGNPLHCGHRKGNWFEETLHISPLNEQCELRFRYLQNGEIQPADSADLPAAKMIEVLALDIAYLTNRRRDTIRRLFDDEFITSASNEDLARLVSVIRAARVSDQKPFDHIIARFAEQLLDH

SEQ ID NO: 81662 - protein, 432 aa, Pseudomonas sp. GM80
MLKSLKLSHVGPLPELDVKFSSRLNLITGDNGLGKSFLLDIAWWALTRKWPGDLNRALTGAGMVRPTDPAKASIEFSVSAKTKDVSYKTSFSPLDQAWTGKAGRPINPGLVLYAMADGSFAAWDPARNYWLKKGNLDVQDRVPGYVFSAREIWDGLVDSERGLLCNGLIADWASWYKEKGESYDHLCAALAKLSPEEGESLVLGPLTRISLDDPRDIPTLKMPYGQDVPVVHASSGMKRVLAIAYLLVWSWQEHVKASALLGQETTPRLTFLIDEVESHLHPRWQRSVVGALLDVVTALSPNAQVQILLVTHSPLVMASVEPRFDDSQDAWFDLDLAKNRETGETEVQFKQREFVRLGEVSRWLTSDAFDLGSARSIEAEKALEEASRILSEEVLDEQLAISLDLKLRKLLGDTDPFWIRWRYIGMKQGWLK

SEQ ID NO: 81663 - protein, 198 aa, Pseudomonas sp. GM80
MIPVQLKPEPATFDARVRVRGLAYLKKNGFALHLGLPSGTEPPSYWRESLDDLHVAYEGVCAYLGIYFERVSGLSVDHYIAKSTNAQGIYEWDNYRLACSTLNSRKRDYSTVLDPCYLASDLFRLQLSSGHIYPKPGLAAAPTRVIEQTIERLGLDDATCREMRARRFQEYIQYNLPQAYLKMMSPFIWAEAYRQGLL

SEQ ID NO: 81664 - protein, 467 aa, Pseudomonas sp. GM80
MKLIRLELENYRCFPSLTLELDTQLTLLVARNGQGKTSLLDAIKVALWPYVRGFDLGSTTNDITGIHPEDVFLRPLKAHQMEPSLPARLSAQATLHGQNWEWTRRRESIRKGTQTRGDDAANKLEAAAEALEVQIFNRAVSDQPPFDLPVLAYYGTGRLWSQKKLTAAFEKAENAEFSRTYAYRDCLDPASSYKHFAKWYTRIFRSYRDEQIRNIERGHLSIDVKDEFAHPVLAVQNAVNAVLATQTGWRNLAYSSEFSDLVLEHPIHGMLKVSQLSDGIRNIVALAADIAYRCIKLNPHLGITAPHQCTGVVLIDEVDMHLHPAWQQTVIPDLLGAFPNIQFIVTTHSPQVITSVQAKCIRVLHTVTEDKLLQVKISNVDQQTQGVASSQVLAYVMGIDPTPDNEPSRKLSEYMALIQQELHKSQQGLVLREYLNLHFGTQHPDMLDCDRLIRLETFKRKQLTQKK

SEQ ID NO: 81665 - protein, 215 aa, Pseudomonas sp. GM80
MRKLIRGTTPNCLARYRHGINKWADVTHADKEQIRQCLHAMQDTRCAYCEADISTIGHSHIEHFRQRHGYTQGTFEWTNLFNSCCREEACGKFKDNCPPYDHKNLLKPDVDDPDGFLLFISDGTISPLINLDDRARTRAVETLRIFNLDAQNGALRAMRREAIRPHQKTVEDLMAIAEELSSDDLQEFLQDEIQSIAHLPFSTAIRHTLSKSRAV

SEQ ID NO: 81666 - protein, 467 aa, Pseudomonas sp. GM102
MKLIRLELENYRCFPTLTLEIDEQLTLLVARNGQGKTSLLDAIKVALWPYLRGFDLGSTTNDITGIHPDDVFLRPVKAHQMEPSLPARLTAHAFFLEKEWQWSRRRESIRKGTQTRGDADATRLEATAEVLEVQIFDRAVSGQLKPFDLPVLAYYGTGRLWSQKKLTAAFEKAENAEFSRTYGYRDCLDPASSYKHFAKWYTRIFRSYREEQIRNLERGKLSIDVKDEFAHPVLAVQNAVNAVLATQTGWRDLAYSSEFADLVLEHPVHGVLKVSQLSDGIRNIVALAADIAYRCVKLNPHLGILAPRKSTGVVLIDEVDMHLHPSWQQTVIPDLLGAFPCIQFIATTHSPQVITSVPARCIRVLQTVTDDKGRRVTVSNVDQQTQGVASSQVLAYVMDIDPTPDNEPAQKLSEYMALIQQDLHESAKGLALREYLDEHFGTQHPNMLDCQRLIRLETFKRKQLTKQ

SEQ ID NO: 81667 - protein, 216 aa, Pseudomonas sp. GM102
MRKLVRGEGPRCLTRYRHGLHKWSLDSPTLPERAQIWEHLRAMQDTRCAYCEADISKHTNAHIEHFRQRERYRQGIFDWSNLFGSCKREESCGNFKDRCRPYDHTVLIKPDEDNPDDYFIFVSDGTIAARADLDAPLRHRAVETLRIFNLDAENGALREMRREAVRRCLDTAEALQQLFLENPDSEGFQQFLEEEILETAQQPFATAIRHTLSMCL

SEQ ID NO: 81668 - protein, 455 aa, Pseudomonas sp. GM102
MEIFSFDLTNVGRFTDLSIHLAPTPKHPSNMTVLVGNNGAGKTTLLKSLATSLSWLVARIRAEKGIGSYLTDEDIRNDASVAMVAIAVVDRLQARPDLPKVTPEDILFVWTTARGKKGRNTAVHSELAGASRLADHYRNQLTADDKASLPLIAYYPVERSVLEIPLKIRTKHSFDQLDGYDNSLNRGVDFRRFFEWFREREDSENETGVSDTALAEISKKFGNDSDIWKTLSQLKASSRDRQLTAVRSAIAAFMPGFSNLRVQRKPRLHMAIDKDGVTLNVSQLSQGEKSMMALVGDIARRLAMMNQSLDNPLHGDGIVLIDEVDLHLHPKWQRSLIRQLSETFPNCQFVLTTHSPLVISDAKDVLCYVLDDGELQERNGLYGLDANQVLLSVMDTDIRNSEVQRKLNRLFERLQDGDLDEARKLFSELSLELSDGHLELAKAALLIRKLELRRA

SEQ ID NO: 81669 - protein, 210 aa, Pseudomonas sp. GM102
MRKINKGVEPEALTRWKRLNSTLRYRDLPVEESRSIRSACISEQYGLCAYCCQAITIDDAHNEHIEAQDRAQNRTLDLSNIVASCQRSHQCGHGRGTRALPLTPLMDECETELKFYLSGLVKGHTDRANTSIEALNLGHTEESNRGLVGARKTLVDALIYTQNLPPDELQNEDEDFLGLLLEDLQTPDAGRLQPFSPVLVNVIRHLLARP

SEQ ID NO: 81670 - protein, 766 aa, Pantoea sp. YR343
MLFHNRNDVAPPLPFQSQEARAERSDLVEFMSLSDDRKAQTSVPPTRFRINDESIQLALNKLFHSKCAFCESKNPLSIHLFRPTDGAMPLLKSDFSHVYYIWLRTDWGNYYSVCSQCNANSRNTFPVSGKNRGELPSVEDVKNFANENFGLWRGKHMDRALLLNPCEVKNFGMHFSVDYSGEILALTRRAEITIKLFNLNSQYLIEERGKAYDNYMNILLSNLVREIESPLFEFKTIEFGGTWFLLLKRLIKVIEIKLDKKLLKAKSKLYCILQDVYKTPIGIKVLNESINELKNKQILKKEMKSSTPVSRIEYITPSFFELKNFKSLQSIKLKMPKVRLADNVYNYQDEAAALLILGENSSGKSSILEAIALALCGEIQRSQLGKSPLTFVLSPELMGSTNGYSPKSASVIVEFTNSAILELQIENDFKLKVTGEIDAIPPLFAYGAFRQYGANNRLKNSLGNIGTLFYSDRVLVNPEVWLLSLPDNEFLMVVRALRKILSVDEDFDVLIRDKENNRCLMVTKVGDYNNITEVKTPLSVVSSGFRSVLAMVCDVLKGLLAGQCRSGTVEFDKAKAIILIDEIEAHLHPRWKMQIMTALRQTFPNAYFIATTHDPLCLRGMYENEVVVFNRIRISKNKNNEIPIMVELIDQLPNIENLTIEQLLTSDLFSMFSTDSSGAEAKLAHLADLLAKKASGIVLKPVEEEALKELEQQVSSSLPLGSTEVERIVQKAVAEYLQRRKHESKTGLHILEEETRRSIIKALEGY

SEQ ID NO: 81671 - protein, 328 aa, Pantoea sp. YR343
MRSVKRGNKPPPPSLMSTKKDGTTELERVRAHMTKPLKPNEKRESFKFSVYKSDDVKKRLEELFHGKCAYCESFYASQAPVDVEHYRPKGAVEGEHQHPGYWWVAMDWENLLPSCIDCNRRRKQIIPVVVNNMRQLHQNMQTGKKDSFPILGVRSLAENKNFSQEKPLLLDPTRDNPSEHITYCIKNDNAVGLIIPQMIHDVDENNHDYAMLGQERLERNINIRGAISIQVYGLNRIKLVQERISLINRMRFLEEVVVELGTIIQNLNNSELNNFPDVINAIKSIKLLQEKILTEMRNLTMPHAPFSSLAKAYLDDFKDRLRAELLNI

SEQ ID NO: 81672 - protein, 553 aa, Pantoea ananatis LMG 5342
MKVDKLHVRSRFKNLEDVKVDFDEDHLMTVVVGRNGSGKSNILEALVSIFRNLDLGEEPPFSYELIYRLGEPHKPNQPSERWLEITIDADPDRGTLTKQYEVRVRNLLSEDMSKSMFDDLPSSTTIPFSKVKRDKSGKAPYLPNYVFAYYSGPSDRLENHFKKHRTDFYRKLLKDELDLKGDIRPLFYAKPHHSQFVLLAFFLSEQDNAEKAFLREHLGIEGLDSIHFVMRQPGWAKQKGELFWGARGVVRRFLDELIQHTLSPIKVTRQEDTSLTGSNIRNEFFHLFLPNVNALREFANELSADELFKMLESTLLSEIISEVSIRVKVSSSKVPLTFSELSEGEQQLLTVLGLLKFTGGKDSLFLLDEPDTHLNPSWAVKYLKFLREFVPNHETSHLLMVTHHPLAIAELEKQQVQVMWRDSNFQVHAQEPEESPRGMGYGGILTSDMFGLRTTLDNSTERLLRLRRSFTEKSELTPIQAGRLRKIDRLIEGLGFTTAHWDEEYALYLRMRREVEMETEAVNVTPDLKRVRKERAKAIVTRILAAEREENNK

SEQ ID NO: 81673 - protein, 287 aa, Pantoea ananatis LMG 5342
MRHLNIDFNRLTLPEGWQEKARDLLNSLVAAENAKQRSEIIEKNQDHWKAVKPVLASLFNHKCWYTEAPQQGTDVDVDHFRPKKRVQETLSTTVPHNGYWWLAFSLQNYRFSCIVANRRRTDVATGVTGGKADHFPLCDESVRAKTPECDLEEEQPILLDPLKATDVQLLQFKPDGEAMPRFSEEKHARKFMRADRSILYYNLNHSDFVRCRIELRDQIEKDVKAAKRYFNKLESGDANNDFAYEQTIRRLREMRSKEAPFSSFCIACLDDYRHKPEYDGVLDAVYL

SEQ ID NO: 81674 - protein, 521 aa, Acinetobacter radioresistens WC-A-157
MRIFNAKLNNKNFNFLKEKDLIDNNNKYTIILGENGTGKSELLRQIINNLLRIKILNISPEHNELGKFSYRDLLDSYLSNKYKSNLVEKSISTSLNLYLHDDADIYLSYEKSNSQRKIKNFKGEEISISDGQFRHKTRLESHGFILLDTILAINIIAISESIHIKFPIIQDDSSLSYYYPGHLKESDSDYFFSNINTNKNINQKEKSIILSILLASLRSENIDLKSIFDLLKFDFKIKIDVNSQTDIDVKLKRLHDFRFNSIGIEKISNFNDINEAVNWYSNTKSNINEDIFKKNIQENYTFFLDLLKDNESINYLYHLISYNLIDVSNIYFYKSSEDLIEIPIQDMSSGQLCLISSFSSIAAHIRNGSLIFIDEPEISLHPLWASQYIELLQNKFSSFQRCHFLIATHSPHIVSNLPDDNAYVITIKNDGTSKCIESNVFNFKSVDFQLAEIFDFPGNRNEYLIRVIMVILTKISENESLNVDDLKTIDHLKQFIPKLKPNDPVKHLINQISVLTSNEQS

SEQ ID NO: 81675 - protein, 214 aa, Acinetobacter radioresistens WC-A-157
MNKVNFSETLQTYIDNYDGENYRIWNTTEGLVAEIRKEIRNHYKIEQRYKCCYCRQQNLQDHGLVWDCEHILPKAIYPAFLFEPFNLALSCKECNQAKEKYKNELIKVSCSIYSLKSEDYRIIHPHFDTYSDHIEISSLNGTIIFKVLENSEKGKFTYICCNFIRYEKKLVGYSEVNNNVALTINKLLEEGIAVENILEGLLNKNTPIHMEIDF

SEQ ID NO: 81676 - protein, 407 aa, Haemophilus sputorum HK 2154
MKYIHNISGKIEHLDYEINIDLNGKNLILVGANGVGKTSILNSIYKAITIELEKNNSQIENLKSSLAYYKCNIKNYPEGSNEYIDVLSSIQRCERRLKEFNLPLTLSIPNISDFIRDFNTKKAINSNFSAYRTSRIQATSSSTSLEEEKKTSLNLEYVGSTLEQHLLNIRVTKSLLMTEAKDHVKANKFSQWFDNFECQLKYLFEDNDTKLEFDVSSMKFYIIQRNKKFTFQNLSSGYQAIFDIYADLLMRTELFDITPDELTGVVLIDEIDAHLHISLQKIILPFFINSFPKVQFIVSTHSPFVISSSSNTVIYDLTTQELITNNITYYSNDAIVKGLFHVNTTHSIELQNIIDELKEVIDSDINDSNKLREHIKKLEPFKESLTNSAKVILLLAENKVLDIEENR

SEQ ID NO: 81677 - protein, 219 aa, Haemophilus sputorum HK 2154
MFFVKRDPQVPNSLSNTRKDYRTDEVVKKLNKMFFGKCYLCEKDNISDIEVEHLIPHQNNENLKYDWNNLFYSCSRCNSIKGIKEKILDCTNIDAGKAIELRCPSSDSDPVIVSLGLLNENEEILATKKLLEECYNSRSTGIRGISRQALIDEIIKHYACWLDLKLKLRNNLLSTREEKEILEKLEKMCQSNYPFSAFWKWHIYRDNVLKDKISIFNEE

SEQ ID NO: 81678 - protein, 420 aa, Bacillus cereus BAG1O-2
MINNLTITNWNQFDNVNIDFHPQVTIITGTNGSGKSTIVRLISRNLGWNYKEIATPIKLHNTNSFFSPGIGIENFTNLELAFKLLDVKHITVGSLTTDEGIIEFQAPNQLDHVSYALKISSNNHPFTLHGVSVASHRFPFTYSVLKSIPVKPITTEDAYFKYNESLKRKTLSNEYYNPEEEMHISHMKATLMSWALFGQDSDFIKGDRNSYRRFKGFVYVLKTLLPKTLGFKEINIRDGELILITDTGDFLIDSVSGGIGSIIDLAWQIYLYDKDLEPFVVVIDEIENHLHPSMQRSILPNLIKAFPNAQFIVTTHSPFVVNSVANSHVYALKYNKDNKVCSYRLDFNDKSSNALGILRDILGVPVTLPIWLEEELNIVTRKYKDKELTAQTYKGLKNDLSEIGLSDHLPQALDFLQRGE

SEQ ID NO: 81679 - protein, 219 aa, Bacillus cereus BAG1O-2
MISLKKENIPEILKKNGTEWTRKYMEFIDSKQEVPNSLKSKYSHQKIKATLLEETKGKCAYCESSFTATDYGHVEHIEPKSKVPKKIFLWENLTLSCSKCNLKKDVYYNEKLPLLNPYIDKPEKELVFLGPLVSARSKRALMTIKKLELNRPELYERRMAHLDHIQSLIYAYATADDIELKKMLYDDLIKYTELDKEYVSMMRSIIKTIDSPVLVKGIS

SEQ ID NO: 81680 - protein, 445 aa, Bacillus cereus MC67
MKLKSLYIEEFRNLQQFTIDFQKTTSFIQAIIGRNGSGKSNLLEAIVTIFKGMVLEERPQFNFDMSYIYNSEEIKVSGVKGEGFTVNYRGIDSDLGTLTASLLHHGKSIYPENIVLYYSGVNLRLRELVKVFEESFTGDLDKKLFTPRRFFYVVEEHYNLFLLALLSSELEHTKSMLKEKFSIYGLKSFEIILNTNYRHIGGELEQFINLLCEESSEEIVRKNGVHLRFNDAERSLYSIRNKVGYERDILKWLDACLYSNCIVDVHIELKKDESSSTIISHKQLSEGEQQLLLLTGLAEFFSYKESLYLWDEPDTFLHPKWQRELTSYIEGLEVKQQFILTTHSPNLLTTMDRENVFMLEQGQVCEVTPYTLGRDINSILYELMGVSLRHKPTQNNLDEFYSLVDNAQFTEAEKILKKLISHMGEDDTEIVHAQNILALEKEFNE

SEQ ID NO: 81681 - protein, 210 aa, Bacillus cereus MC67
MKHIVKGSAPGSLVYHKKQLLATYDNYREKDDVRISLLNEQGFICCYCMSRIEKENMKIEHWLPQSKHEDSTLDYKIMFGVCQGFQKSPFHRQCCDSHRKNDKLTINPTNRAMVDTIKYSGGGEISSENAVLDKDLNETLNLNTELLKENRKATLQAVIKFIGNRDAWSEAGIKRAIKFYSSKDERGAYVPYCQVALYFLQKRLSRQLAK

SEQ ID NO: 81682 - protein, 729 aa, Bacillus cereus BAG5O-1
MISINRGPAPPVLHSKKIKTEIEKMNYYYSLPISARDRSSYETKTPFPLELKLALEDVFQGKCAYCESIIKNVNSYGRINHYRPSKGAYFNEYYSPDHYWWLKYEWSNLYYVCPLCNSKKHKKFPILGKPAPIGAVGSELLSEDPLILDPCSDIPENHLIYNENGEVHSKTRKGQYTISLLGLNREQLVDERKHSLQRFKNNCDTFIMLLGSNLNKNEELFWNSYKNLLKEVDSSSEYCGIKRQFLREWIERDSEYKEIFSNETSSFLNETPLITKEKQLNSNTSFIEHEDEIEDYNLIEKNKLINYYAKQRLVTRIVISNFKSIEKLDIELNIEDDQAPWLMLLGENGSGKSSILQAIALCLMDNSQRKNYQLDASQYLKKEAKSGFVRVYISGSSNPIEIQFNKHSNEFISNQKSQKVLVLGYGDTRLLPNDKHKSPELSISRTENLFDPYSPLIDPNVFLYNLSIEEFHYVRSSLESLLVLKEGESIKKGKKLNQILITTNGATVELDRLSTGFRSVIALTTDIMMAMKEFWKDSKDAQGIVLLDEIDAHLHPRWKLQIVDKLRCTFPRIQFITTSHDPLCLRGLKNHEVAVLRRAGNNKIKVKRHLPNADKFEIDQILTSEYFGLHSTASPEYDKLMKRYYELLSIPNSKRTDDIEKEIEKVKNVLGEFELLGQTPRDQIVYRLLDEYIAKNQGFENEDINKMDDNTKDDVLNLLQKYQLDESEE

SEQ ID NO: 81683 - protein, 289 aa, Bacillus cereus BAG5O-1
MIYVNRSNVPIPAVLDTSNSSSLGSIETQNCIAYYVNSPSNSFKFKIYKDPEVIRKLNALFYGKCAYCESSVQTVNNIEVEHYRPKGRIRVIKDDKWKWTQTGYYWLGAVWENLLPSCTFCNQLRRHELEDGRIKTAGKWSYFPLVNENQRVYSPTGNLEEEEPLLLNPCVDDPSKHLDFQTDGTVTYRTERGKESLNTFGLWRRDLKRRRHEKAKEIEFLTTRVREKLKMLAICKEKDMRVLLLQDLDALLAHLKTYTEPDKIYAGVAKQLVGTFFNEISQDLTKVSN

SEQ ID NO: 81684 - protein, 541 aa, Pectobacterium wasabiae CFBP 3304
MEQILPSRIIKLIKKSESGDFASSYQLFKIFGSDEYGVDPDEKMSSHYKELSAKQLEGGQLRVADIHLENYKGFESLIMDFSMKKGSTILVGNNGCGKSTILDAIQKGLTHLSSRLSTRSHNGDGIEKHELKTGKNYASIAINYDFMGVRFPMIIAMTEPGYEDSAKSNYSGINELGNIFKTAHSINPNASFPLIAMYTVERANDVSTKDIENSDEIKEAQIWDKFKAYNKSLTGKADFKLFFRWFKELIEIENSDNAEIKALRAEIRAKEKDLDNPLLKALLAENKNSDTTKKLLEDHENSLKFLRSKLNNYYSINSKTLHTVEDAIYSFLPGFNNLKLQRAPLDLIVDKDNVSLSVLQLSQGEKTILALIADIARRLTLLNPNNEKPLEGTGIILVDEIDLHLHPSWQQNIIPRLEKTFKNIQFIVTTHSPQVCHTIDSQNIWLLKNGQKFKAPKGVRGAISSWVLENLFEVAQRPPEDKYTKLLQEYKSLVFSEKYSSEEAKKLGTTLSRHFGPDDETLVELKLEIEKRDWEDDFEKD

SEQ ID NO: 81685 - protein, 260 aa, Pectobacterium wasabiae CFBP 3304
MILKRINKTGEDQFFIDFKTQNPNGTWDEFRNHEKSVLYKRLKQHICNDQMYLCAYCEIDLDRKNEHQIKIEHFKSKSGSLPGGSNWHLEWSNLLGVCLGGTNTGDNYELPANLSCDSYKSHYEDKNKITDKDWTGKILLPLTLPNAHNLFNFDKVTGKLLPNESYCNSISIDGKPAVETLGIVTKTIEVLNLNCSRLNNARMKLLFHFNSCARERDLRKIHNLLMQWSQGEPKFFQTTRDIIIRESRICRGLLDGTIKY

SEQ ID NO: 81686 - protein, 716 aa, Rhizobium sp. CCGE 510
MRYVDRSRTSVPKALLSDRVRAAIEDVQRFMRRSEDEKAQRRSPYDESIIHRSEVPQALSELFFHKCAYCESRSANTIDHFRPKSLYPWLAYDWENLYPTCFECDRRKGGAFPMAAAPAPPFSTIGEARAFEHVLFVDPCFDDPRAHLRFCSDGRYQPLTDKGQGTIGYLDLNRKNLVWRRNEVIERIITRLEFGLQNSPALETFIEPEAEFSGAATQYLSLLLETAIGRRPAWRRYGPSGQRLMQELYRVEENALRSAAAQLREGSDAFEPDYNPSRVMRPAHEVRPPAPAAISVVEINNFKSIGNLTLHVPPLRKDKGTAGALMLLGENAAGKSSVLEAIALTMLSERESSGLVEAEDLLRRKGAQRLELVDTEPVSVKISFHDRPEPAVLNVDPLKRRIESTPQPRSVVIGYGPRRYSKDGAPWLKSKSARVRSLFHPAVALPDPAAWLREIAVSESNKFNAVARGLREILALRESDDLVLDELMGVCVRVQGRLEPVGRLSEGYRSLFAMAVDIMRELLQDQPELENARGVVLIDEVETHLHPRWKMRVMSALRRAMPNVTFIATTHDPLCLRGMENGEVIVLFKDVDRQIAVMEDLPDITGMRAEQILTSDYFGLNSTADPEIEANLTDYVEALTRANSGDQRAQEDASRLGQALRSTLVLGDTAADQIIQEALGRFLSERRDLPPIERSSSRKEVVERMLGAFRKPLDGA

SEQ ID NO: 81687 - protein, 305 aa, Rhizobium sp. CCGE 510
MRYVDRSTRPAPESLSAADGGGLKEYAKAKAYYAKVPPHKKAYPFKAYKADDVALALRNLFHGKCAYCELRYEGGQPMDVEHYRPKGGIQERDDHRGYWWLAADWNNLLPSCIDCNRRRGQISADAVMTLAQLEAAFASIGDTEPGGKQDAFPTLDGVWADPEIDPNTIESPALIDPTRTDPKNHLHWPQADVSVVLPVVDLLGSECPRATASILIYALNRIGLVQSRLEIRQSFDAQIRLIREVATAAMELVDPRREIFMKIAEDGILSLRRQTGIEHAFSAMLSARLEAFEAEFSTLLEAELI

SEQ ID NO: 81688 - protein, 413 aa, Fusobacterium necrophorum subsp. funduliforme Fnf 1007; identical to SEQ ID NO: 81144

SEQ ID NO: 81689 - protein, 160 aa, Fusobacterium necrophorum subsp. funduliforme Fnf 1007; identical to SEQ ID NO: 81145

SEQ ID NO: 81690 - protein, 437 aa, Bacillus cereus BAG6O-2
MIIHDLKLENFHGFEERYITFSDKFTVLVGDNGTGKTAVLDGLAVALGAFLSGLDGVHSRHIRRDEIHRKIYNQGSLTDIQMQFPVRISCTSTVEGHKLDWSRAVNGKKGTTTSKEARSIIEYASYLQRAVMHGVEVKLPVISYYGTSRLWVQRKEQNNIRRNNDRLEGYEDCLDPASNEKHFFRWMEKMTYIELQRGETPPVLKAVRKAISECMRTWKTIGYDVDSQEVHAIKNDNTAISFHLLSDGVRNMLGLVADLAHRMAQLNPALGDAVIRETPGVVLIDELDLHLHPSWQRRIVEDLKRTFPEVQFITTTHSPFIIQSLEEGELRRLHEEDDDEVVRDEEFVNKSIEDISESVMEIENVQRSEKYKKMYEAAQKYYSLLQEGKQASDAEVEKLKNELDEIESLYSDDVAYYAFLQMERRAAGLARDTNEAD

SEQ ID NO: 81691 - protein, 235 aa, Bacillus cereus BAG6O-2
MRPIDRGDVPVDEDGEPIQFKKYQESRGHLMDRIGSYCSYCERSLGGNVAVEHIQPKSLHEELALTWDNFLLACVNCNSIKSNQSINLEEYLWPDKDNTLLAFHYMEGGLITVSTALTPEVKQLAERSMQLTGLNRYPSVDPNTNPERTDTRWRDRRTAYERAMRAKENLTSFDNPPMREQIVDTAVATGFFSVWMSVFKHDVDMLLRLIHAFPGSSTNCFDENGVPVNRDGGSV

SEQ ID NO: 81692 - protein, 446 aa, Fibrisoma limi BUZ 3
MYIRRIEINNIRSIEHFEMTFAEGQEAGWHVLIGDNGAGKSTIVRSVALAMLDITDINAAGQNWDDWLNRKHDLGSIDVQIAPDGRYETQTGLVQNRITFEWEQYGKEESRATLLEVIFRGRKSYSKTSYATPTITTASAPPPTPSAPSEHLRVDAWFSAAYGPFRRFTGGSLEKDKLYQTNPRLGAHLSAFGEDVALSGALAYLQELYVRQLEDRYNDRPVNPSLDYLKTFINEAGLLPHQTKLESISVKDGVYFKDGNGSIVRDVQMSDGYRSVLSMMFELIRQLIRVYGADVVFQQISRNNLVIDLPGVVLVDEIDAHLHPTWQTRIGQWFTRYFPNLQFIVTTHSPLVCRAAEKGSVWRLAAPGSNQQSGEVIGIERDRLIYGNVLDAYGTEVFGENVSQSNEGQELAEKLAKLNVKSFKGIITEEERQELYELKAKLPTAR

SEQ ID NO: 81693 - protein, 271 aa, Fibrisoma limi BUZ 3
MIRLSVPELPVTTLRKLAEYQRLVLDAGDYTLQVAKAKSLFKQHNKADNAAFKIVREKLAEMCVGPRRCNYCEDSVADEVEHIAPKDLFPEQCFSWDNYCYACGPCNGPKSNRYAVFRQDQNESFYEIPEHGDPPLIRPPLGQHVLINPRVEDPLQFMLLDLQTKTFRFAPLMDEDSLSYQRADYTIRILNLNTRGDLINARRNAYTNFRARLREYIHDRDHDATESHLGELKRNFADESHQTVWQEMKRQHQFLPELQQLFGEAPEALMW

SEQ ID NO: 81694 - protein, 420 aa, Fibrisoma limi BUZ 3
MWIKKLQIAGLRCIKRAEFTFQPGMNLLVGINGMGKTTVLDALRVCLSKVLSEIENMPNQRVTLTPDDINLGFKATLLFCELEIYGRQFSYSFQRSPRYVNKSNESDLKNRISVVQYKDDLYPSLKEANFSADKKIPLAIYFSTRRAVIFERELTIAGRSVLSGRAAAYDRALAEKRESRLQPIAEWFKAQEALGQESPKALKHIEVIRSVVKQFLPEFGELQVAGNDRTPFFRITKDGASLRIPKLSDGQRGVLALVLDLARRLSQANPDLEDPVKEGEAVVLIDELDLHLHPKWQRSIVENLTRTFPNCQFIATTHSPQIIPAVEPEQVQLIKDNEIIRPDRTLGMDTNWILRNLMETDERPEGAAEAIRQVEDLITEGDYEIAREAMVNFRQDKGFDLPEWAMLEARIARLEMFDEE

SEQ ID NO: 81695 - protein, 239 aa, Fibrisoma limi BUZ 3
MKYITKQGAPRNYLDWCKANEGLNNEDYRCLQNPEKASLHETLIKEQGGLCAYTMRRIAVSSSHIEHIKPETLCRAELRGSDLDYNNLVACFPKEGMTNPFRYGAQEKGDWWEDDGRDFVSPLHKNCEPKFIFNLKGEVAPFKGDHQAKKTIEVLKLDHNSLIEDRERAIKEFIFGPAGDSPLSPKKVDQAIRAVCERNKSGQFREYCVAIKHALMEYTRQQKKAAKKKKHIQAQQKKK

SEQ ID NO: 81696 - protein, 573 aa, Pseudomonas pseudoalcaligenes CECT 5344
MRLDRITIGSPKSSPTHQFKNLKNVSIDFDQQHWITVVIGWNGTGKSNVLEALATIFRDFIQGARKPAFAFNLEYRISSGSTALHVNIDADPDRPRDSLIIHVATDAEAKSDELFDASFEISSKTSALRGKRIPLKSFFDPKFGYLPRYVFAYYSGESDRLYQVFRPYLEDFDKKLRRGEDPGLKRLFYAMPVHSQFVLLAFLIQQSDDVRNFLAEHLGIDPDEGIESVLFVLREPPWTSKEGDPRFWRAKGVVASFLDRLYNIALAPVELSRRERVSLWSDKVLQFKYLYVKDIASLRKLVGEQRPAEFFRDMESTHVSQLIDEVRIRVRLQKNDGTVTFRELSEGEQQLLTVLGLLRFTAESESLFLLDEPDTHLNPRWAVDYFNYLRTFAGQSNDDRENSHILLTTHNPLAIAELVREQVQILQLSKDAESTRIVAVHPELDPRGLGYAAIVTSDMFGIASTLDQPTHLLLERQRAYAGKEHLTPEELAALSEINSKLERLGFRFFHPDEEYSRYLRLRSAALRAKFESDDPEQLANRSIAMESEEREELGQRLIRELLAEQRDKQESDQ

SEQ ID NO: 81697 - protein, 270 aa, Pseudomonas pseudoalcaligenes CECT 5344
MRYIDSTRLRLPDGWLERAAAAKIAVENGANPDDYARIWRELKDGLANLFNDKCWYCEVSVPRSDNAVDHFRPKGRVRDAENEHRGYRWLAFEQSNFRYACTFCNSRRKDIEGDTAGGKADRFPLLDEARRVYEPGAVTGERPILVDPCEVGDWRLLGCRKENGKPCATSDIPEQRQRADISIEIYHLHHEPTCKLRHSEAVKLLGDIEEAKALFIATQSDALQEPAFKRVAARILKSIHVDSAFSGEMRFLLSGERDMAHSWIQTLLET

SEQ ID NO: 81698 - protein, 407 aa, Yersinia enterocolitica subsp. enterocolitica WA-314
MLCSISKINIPIPYSRKNVDIQLDGMSLIITGGNGCGKTSFITAIYNHLKNGIDNPNNNSEEFLTQQISIYESELNKIGRDGVNYNHYSSELEKHKTRLKEINDFSIKINSIENKNIRSLLRFHSATRQSAISSPNQAPKYSVLIEENKHFANDKDGSQFFESYLLSLKKNQSYAIAFDENETEANRIKEWFDKIQIDLQSLFEDSNLILEFDTKDEKFYLHQDGKDRYTFQTLSAGYSSILSIYTDLIMRVEMWGVSPDNIQGIIFIDEIDAHLHVSLQKQILRFFIKSFPKIQFIVTTHSPFVVTSVSRAVIYDLTTNEQITDVSSYSYGVVMEEIFGVIPESHVLTDKLTHIEYLINNISPENIDELEAIISSLASDQESMSNDTQAFLDAARLKLIKTKKIDK

SEQ ID NO: 81699 - protein, 217 aa, Yersinia enterocolitica subsp. enterocolitica WA-314
MFNVIRSMPAPESLQSKKKYDNEDVHYALQDCFYEKCYLCETKKPLDINIEHFQPHKGDENKKFSWENLYLACSRCNNIKLAKYDNLLDCCSISVWDKIKLIPGFSPKARKFIITPLSTDDKTLETAKLLDDIYNNDNTINKRLTARSLRSQVVQTTHKLTQHMIEYYNEDSTDEEKKVAISKMKIMIKKSYPYSAFCRWMIKDDEELDKLLSNLMN

SEQ ID NO: 81700 - protein, 771 aa, Pseudomonas fluorescens BBc6R8
MQKLERPDKSPAVLRSKAAHQARQQMRDFWALDRQRRAQTSVPAIGLSSTDQRLITAVAGMSLNRCAFCEAKDVLSVHRFRPAGNALPFAETSNAHLYYLWLADAWQNLLPICTSCIPRETQFPTDGARAPLPSLRQIDAYVERDDGLWPSYPPKESILLIDPARDREFEKHLVPKLNGEIIGSSRKGETTVLLFDLNRAERRHQRHQAYQSLIDRLLVLLREGKKFNDSPDWKLIFDFPMIEFGGTWFLLLRRIARWIAVSKAVRWQTSSNLIRAFFLRLADDGDAIYHLEAALSAIAEEDEGLRARRWSISPMYTARTSIAAVEISNFKAIEGLQLTLSEPAARRGDLVSRRVPSLMILGENATGKSSILEAISLALTTPAARAALNVPWTQLVLDPSQLGLEHVNTALPAGVRVKFTNDQSVTLTIEHGAPTVRSDLGNHHVPVFAYGAFRRFLTGTRRPAPHKHIRNLFDGSTLSNPEPWLKALKQDQFDMVIRTLRDLLSIEGEFDVIQRERGSRQLRMVTSLTEPDGEIRYSRTPLHAVSSGYRSMLAMVCDILRGMLDPQVYEGFESFRTAKGVILIDEIEAHLHPRWKVQVMSSLRNALPGMTFIVTTHDPLCLRGMGEGEVVVLQRIAATDSARESQMPIIVKRMMGLPSVADLRIEQLLTSDFFQMLSTDDAAADRGLAGIADLIAARARGDELSLEDSRILADFECDIASAVPVGSSEVHRIVQDTVAEYLRRRRDASSETLQRLRDDAKAEILAALESL

SEQ ID NO: 81701 - protein, 325 aa, Pseudomonas fluorescens BBc6R8
MRRVDRGGVDVPKSLLLDGAGPAELIKVKEHHNAPNPPADQNGGKKKSFTFTAYKSADVRAALEKLFYDKCAYCETVYAASAPVDIEHYRPKGAVAEDVAHGGYWWIAMGWDNLLPSCIDCNRKRGQVLVEPSSSLAVLAANVKPAVTQSGKKDSFPLAVTGVRAMGEEAELEDEQALLINPCCDDPATSLMYSFDPAHPAGLVVPTGDLDQQVRGAVSIQIYGLNRLKLVQDRTRLLRRLEFLGDLVIDLASSITELEAPAVQRALQGTSAENVASRLRLLRDRTLAEIKSFTKDDAPYSSMASAWLEHFKARIRPVTPVEAFP

SEQ ID NO: 81702 - protein, 455 aa, Microcystis sp. T1-4
MWVESIKLENIKCFQNQEIKFISNPDNKRRQDAKPCRWITLLGENGVGKSTILQALALLLAGPEAAKELLPRPTGWICNPKTPGKLTAVLHQEDGDAGKFGTDKTRKTFAYSYFVTGKERLELGGSKDKQTYTEPALIEENTKILSWLRANAFASDNHGWFAVGYGAFRRLTRVSQVIIPSLEPPKRSSNFFSQFNEDTSLSSFERWMVYLDYRIAKNPTDIQAKQMKKIGEEAITKLLPGNVEIAEVTADGLIQFLVNGQKVPTISLSDGFRSMIALAGDLIWRLLQSFPDLDNPTEASGVVLIDELDIHLHPSWQREIAGWLQEVFPKLQFFVATHSPLIAAGAGPNSLTLRIDLVACELEIVEIHYKELAANVDRTLTSSAFGLKSTYPTDTENKIKRYHQLNRKKKNLAAAEKQEYEQLSLFVGEVKPFGEISQPNSLESRIDALLEERLS

SEQ ID NO: 81703 - protein, 229 aa, Microcystis sp. T1-4
MIAVTRISEPPVLAKNVARWLEALESIKSNNKATKAQINQAQNKYSHPQVKDALVKMFNGKCAYCESKIIVVTYGAIEHFYPKSQYPDLTFTWENLLLSCDKCNDANHKGTNFPLDDITGNPLLIDPTDGVTDPNTHLEFVWDEMAKLASVYGRDRRGQIVEDLFDLNGMRGRKELINYRSQYIKRLLALLRFAKQGDSEALSLLQEACQSGAEYYAFASIYILPHLPP

SEQ ID NO: 81704 - protein, 428 aa, Microcystis sp. T1-4
MKIKSIKLINYRGAVSLNIDFHRQLNVFIGVNGAGKSTILDSLAIMLSWLVNRLKNTNASGRLPEINETEINNGQWTAIIEITGVTEDSQEITWKIVKTRTGYIHAGERSNFSQLNEYSQEIQRQITDHQGQINLPLFVYYSVNRAVLDIPLKIKTKHQFESLSAYENALTSGSDFRTFFEWFREREDLENENRKYQDYLIKPEGFCFPDPQLEAVRETIERFLPDFSNLSVRRNPLRMEVTKKNKIVTVNQLSDGEKCLIAMLGDLARRMAIANPQNPYPLTGNGVIIIDEIDLHLHPQWQRFVVPKLLEVFPNCQFFISTHSPNIITHVQPESLHFMEQTEMGIKIHPVQESYGKNVDRILEDLMGLETTRPKEIAEALKDIYEQISQNQLEAAKNNINDLRAKIQNDPELIKAEVIIRRKEIIGK

SEQ ID NO: 81705 - protein, 70 aa, Microcystis sp. T1-4
MKYIRKRQEPPEFKNWKEQANSDWQPDFRNLAGKPKEILIKALMTEQGEICCYCENRLIDGKCHIEHFKP

SEQ ID NO: 81706 - protein, 413 aa, Fusobacterium periodonticum D10
MKIEKVHIKNIKGIKDLELSFKKDNKILDVIVLAGVNGSGKTTILESIKDFFYNTNINYDEPEKSNVNLDIFFEDFEKKNTEDHEKTSNNDEHELLNFSNIFEAYHYGKYNDSKFYQDLIAKRFENPPKIIYVPANNSFEEVETKSTTLSRNYEFINIVNSELMEDIPSYIATRRNYLATIEEDLTMKEVTNIIVNEINSIFSILELDVKLKGFSKDEKTMPIFENSVGEEFDINDLSSGEKQLFLRTLSIKMLEPNNSIILIDEPELSLHPKWQQRIIEVYKKIGENNQIILATHSPHILGSVSNENIFILYRDEKGKIEAKTGDELYSSYGQPVDRVLKDIMGLESVRTPKIEKDLEELRKLVDEDKYDTKEFKEKYSELLEILGNTDEDLFLIDMDAKLKQKVNSNVESK

SEQ ID NO: 81707 - protein, 198 aa, Fusobacterium periodonticum D10
MLKVNKKSEPEEFTKYKSKNKIINWDSFTVEIKQVLKQYLLEEQENSCCPYCETEINLKNSHIEHIRPKEKFPKLLSDYNNFIACCMESGRCGNSKENKWNELFINPVIENPEDYFIYDIKTGKIISIFKDGEKYEKAKYTINLLNLNDNRLCEIRKKYIFEFLSYSEYNKNSLSDYPIKFPSLRRYLELLQKLNLQF

SEQ ID NO: 81708 - protein, 520 aa, Myroides odoratimimus CCUG 3837
MRIDKVQIKAYKNLTDFEIDIDEEKMITVLLGQNATGKSNFIEALVLIFKHLDLNTETKRSYPNFEYTIKYQIKNKMIEVVFENKKYAITVDDKSLSLKEFFTVENKKQFQPKYVFTYYSGISNKLKEHFWDHQNTFYDKIIKENFDKSEIDELRKLFYVQLVHSYFVLLGFYTHKTESTNNFLKDVLGIEDINSVLFILKKPEWAKDNEDVFWGAKGLVREFLNILWDLSFAPIYNAERIRKDFREYDSQDRLYLYLKGEQEIESLANHYNTNVELFKALESTYISKLLEEVRIRVQKRNVDQSITFRDLSEGEQQLLTVLGLLKFTKDEDSLILLDEPDTHLNPLWKWHYMKYLEEVVQKPESTQIFINTHDPLVIGSLVKEEVRIFTKTENGTITNQPDVDPKGLGVDNILKSELFGLPSTLDEPTLQKIEKRNRLSIKNANNKASEEELFELNQLHNELQTLGFTNPFNDPLYQKFAVAYQKYEQEEHSTIYSSEQLKKQEEIALSIINRLKSEEK

SEQ ID NO: 81709 - protein, 262 aa, Myroides odoratimimus CCUG 3837
MIFIDITQYRPSPDWLDRAQKVKDLVKSEPDYKKKLEIIDKYKNLWGELKEDLRSLSHNKCWYSESVDASAHSHVDHFRPKGKVVEKDKSEREGYWWLAFEYLNYRYCGGAGNVRKKDKFEVFKNKCTKEDDDLDDEVIYLLDPCKRSDVALLSFIDNGEITYSSELTAWNKERVIYTIETLNLNFNMLIEERAKVWQNCNSLIKEAQDILDKLSKNQSVKNNTLFEQKLDQIAKLKDKSKPFSAVAQSCIYSSGLGWLKQI

SEQ ID NO: 81710 - protein, 409 aa, Aeromonas veronii AMC35
MIREIDFKLSGSVDKRVKIPLNGKNLIITGANGCGKTRFLRQLNDYLRGILERKIQPEDVILRELESAQETFNSIDLSHQYYQYHKDRVDEISKKHQQSINEKIEFEGLMDIFSLLNEKAFVLRFFEANRLANQLANNGQVENIASIKQRGMQEDILQDSSDKFERYLVSYYNYGSHVIARENNPEKAKQINSWFDKVESDLRNLFEDNQLSLKYNPEEQAFYIHQDGKEPFRFDNLSSGYSSILSIYADLLMKVELRDVPSNKIAGFVLIDEIDAHLHVSIQRKIFSFFDKAFPKIQFIITTHSPFVIQSVNDSVIYDLSKMECLEDLSMYSYESILKGLLGVDSTSNLLNEQLELMAQLIQQRPINKDELQKVVNLIEPHEAQLDSKSKAFLLLGKNALLDANDGEE

SEQ ID NO: 81711 - protein, 221 aa, Aeromonas veronii AMC35
MFNVTRIYPAPACIARGHYTKEEVLVVLKPMFFEKCYLCERDEIQDVEVEHFVPHEGDDALKYSWENLFYSCSRCNSIKSNRHVNLLDCTDGALDVGTLISCKMPSAPSDRVMVGTTSQNPTQEMINTARLLDECFNLENTALRGISREALMEQLWDHYTDLLNARRVLRNKKSPEVDKIRAEQTISAMLTVKHPFSIFWRYYYLGDTFLVNTYAHLRVGF

SEQ ID NO: 81712 - protein, 432 aa, Alcanivorax dieselolei B5
MHYKTISIDKWRQFRKVHIELHKNLTLLTGPNGSGKSTLLSLLELSMQSNYREPFLATPVNDQKTGKSGYSLGTLFARFNPFIKTEESNEQSVQHEIGAIVYSSGAVAKLRTSNSDALQYHVNLSNQNTVVGFKIASHRALPRYQAVQSLPVSGMRPKEAFEYFSQAQSHYQRGDRYHREGKTVQNPVAPMKETLIGFAAFGADNAHMKAVPELIGLYDDFQNLLSTLLPEEIGFQRLEVRSPEIVVVSKAGEFPIDSASGGLMSLVQTAWQIFLYTKGHGEAAVVLIDEPENHLHPSLQRDFLGNLVRAFPSVQFVVATHSPFVITSVRDSKVYALRYSQFDKNANESGSAVTAQEIDFVSKARTADKILDEVLGVSVTIPVWAEHDLTLIVNRFERTELSEVAINNLRAELESAGLSEFLPEAIGRIARD

SEQ ID NO: 81713 - protein, 208 aa, Alcanivorax dieselolei B5
MIKLTKGPEPEVLINNKGRWTRDLLAAIEEGNAEKIRAVTKRYNHSEVKTALKEETRQKCAYCEANVTDVAHGDIEHVAPKSISRDKTFEWENLTFTCQICNQNKSNKEGFVDPYKEEPDEHIFFAGAFAKGKSLKGTLTVAELKLNRIALIESRNREIERYADQLEKVFLIPDERTKELLLASMLNELDGGRPEFIAACRMVLSQYR

SEQ ID NO: 81714 - protein, 418 aa, Tolypothrix sp. PCC 7601
MKVKRLIMQSFRGIGDLTLDFDETEPTVLIGINGVGKSSILDCLAILLSRFTSSIQHSTPSGRLFTEEDISNGKKETHNEIVISFDYEEAIWSLTKVKKGRKKDTSSNLSTLSKIVEHIKQNLYTSHQFNIPLAVYYSTNRAVLDIPLKIRTKHSFEQIDAYENSLTGVGSEFRIFFEWFRKQEDLENELRLEDNAAYRDKQLQAVRQAISSLIPSFSNLRVRRSPLKMTLQKQGEELIVNQLSDGEKCLLAMVGDLARRLAIANPGLQNPLQGSGVVLIDEIELHLHPNWQRRIITSLIKTFPNCQFIVTTHSPQVISYVKPDNIYILKNTDQGIVANRPQSSYGRDSNQILEDVMDDIKRPEEFKKSLHDLFQLIDEGNLDSARQLCQQISDDIGEDDPELIKARVSIRRKEILKR

SEQ ID NO: 81715 - protein, 211 aa, Tolypothrix sp. PCC 7601
MKYIRKSEEPQSFSNWKELANDDWTPSWSNFSKPQKTDVHHSLLQEQYFICCYCGSRITIANSHIEHLKPRTTYPELALEYTNLLASCQKDTVPNEPLHCGKKKDKWYDDNLMVSPLNINCADFFRYTEDGQILSITSDLNKKYAADTTIDKLGLNIDKLQKMRIGAIEAILEGLEDLTENERQILFQSFCQPNENGENEEFCAAITYILQ

SEQ ID NO: 81716 - protein, 472 aa, Kosakonia sacchari SP1
MKLKSLGLTSFRGFDRLDINFDERLTVIAGINGVGKSTILQAIAITYSHSLPEFTVSREKALPILDADIQQGKYTCIIEMESSGLGAAQLITFLSKESLDKGEKLALGHKQAKMKKDLARLEKGTPDYKNLKNEITWIDKRLEGNFEKRLNWLFTDTHETEARLKRYLKSSPTQPLVVYYSTHRLLSRLPTKLQGTLPFKQGAAFSKSLTQLEISLNEFAKWQRAIFSTRVLRKETVQYGERIMKLLQEAISSLMPQIKEFWFHEENPPRYSVMKDATIAEQINDKKVGKQLFLEQLSDGERGLIALVFDLTRRLAVANPNLKNPIAEGEALVLIDEIELHLHPKWQREVLQRLRDTFKACQFVVTTHSPLVLGEVPARCVRFLEIVDGKVSVTIPTEAYGMDANRILQEFMGAPVRNRQVEGELKSLFELIDQERFDEARSSIAALEHQLGEDEPELTRASSLIRFLEGDE

SEQ ID NO: 81717 - protein, 208 aa, Kosakonia sacchari SP1
MRTIQKGQEPGSLTQHRLKPHADYDNYGDKAALRQTLVAEQRGLCCYCQSRIRANEDEMKIEHWQSQTGFPARQLDFSNLLGACLGGKGRAAKDQHCDTRKGNSVLCFSVSDPAHPIERKIKFLGDGQIKSDDATIDAALNNVLNLNWSRLANNRKAVLDAFKQRLGKGNLNVAQELKKWDGTQTGELPEFAQVMVFWLEKRMSRATK

SEQ ID NO: 81718 - protein, 753 aa, Kosakonia sacchari SP1
MLFVDRGRVAIPSVLLPGGAAEAEKEKAAVFYKQAHHLQSRFEFKVFRSKEVKSALYDLFQGKCAWCESRINSTASGDICHYRPKGAVAESRKHPGYWWLASQWENLLLSCPACNRPHQYNGVIAGKSSRFPLEDEAQRAFEPGWEEREKPLLLDPTSDDPARHFVYDWEGNILSETPEGQMTITIIGLNRPALVEARRSALAMVRSVLNLLATASSVGSEEQRMFILRHLQELTADNAEYAAIKRQFISAELKKIVRDTGYDAFHWLKSTLPVTKKSVSGIWEKLRDFELKQSDFSLLNSRGIAISRSQSRKIQKVTITNFKGIDELTFNVASNWQMLLGENGAGKSSVLQAIALCLGGADNFAKVVNENGIDPKTWIRSRRQKATIEIQVSGFVKPHFLHIYRDRAVFLRAANKSALVDYAKGSATATGAKEAKDVQFVLLGYGATRLLKPAPKLSELRFREAGPVRYARFDNLFDPLSLLISAEEWLLKQKREIFDLSARALKDLLGLDNNDILVKRNNTIMVVMDDKKPLPLAALSDGYKTVIALCVDILAIATEFWGDPGSAEGIVLVDELDCHLHPTWKMRIVSALKRAFPEMQFICTTHDPLCLRGLGAGEVCVMQRDGESINLLSDLPNPADFRVEQLLTSAFFGLNSTQDPENEAIFDEYYALLALPEKDREQFQRLEQLKTELKERRYIGETPREQLMFEAVDHIIADNKQKGFLQIHDMKQEAINTVSNLWRNALNKRLLKK

SEQ ID NO: 81719 - protein, 352 aa, Kosakonia sacchari SP1
MIKINRSQATPNIPVYVRAMTRGRSIGLTQAVREYNESIDFHTNASHYLNEEKITDSKFKFNVYKDKELVAELGKIFGNKCAYCESCFGAVTPKDIEHFRPKSEIKTYGEAILRPGYYWLATEWLNLLVSCPDCNRRREHEVPGQPAMVNLGKDIQFPIADENARLRVHTCSAVQIANEEAQRLLINPCIEDPEDYFTYDDEGLIHPRNASDMKAICSIHVYALQRKALVEARKATLVRLQRLFFHLRLPIQELTQISARHVNKRAIKQNQITELMNDVLDMFEPEKPYLGLLRDYIRRHAVSGTYLSYRTAGIRVEDLLRLPVSRPLPAPRLNLNNFRSMSSRIPIGLRLR

SEQ ID NO: 81720 - protein, 412 aa, Bacillus thuringiensis MC28
MFKIRTMDIQRINGIQDLFIGFNPGLNFICGPNGIGKTTILNCISSAFRKLPSYRIFPHNNARYGEFTIDMEYEEHSESSIFYIGDHRENIFDLQRNGIREHRYNNVFKGNCIDFNIQSRFFDYKPSGVGSAFDRIKSWFYRNYYKGDMNLDKFYNLQLAQECFNLLDPNISFGRVSETIITDGHPLSRFPKYQNILSNNNSLKYESNKLKTLDMFVNTTQGEVFVECLSSGYKSSLTVLLGIIKEIEMFSTSILVNEFTGIIIIDEIDLHLHPQWQAKLVYAIRELVPKAQVICTTHSPHIIQVAKPEEVIVLGGDNDGNIYVKEIPSPSEYGFQGWTIEEILTDVMGLEQSMSPLFLDSLEKFNVALRKNDKEMLMYEYKGLQKMLHPKNPLATLLSVQAGELMIWEDLK

SEQ ID NO: 81721 - protein, 255 aa, Bacillus thuringiensis MC28
MIYIERPSKPLELTDERRKELTDKFEKTKTAVWKSKYITQPLIEMSHSKCVFCECRLGEEGKYMEVEHFHPKSLYPSKVVVWGNLFPICSRCNKAKNNHDTVRYPIINPCLNNPRDHLYFENFNIFGKDSSPLGLLTEKVLNLNDMLQVVTPRFQVGMLVIQKLQGIAQMVKRYDHQYAPVGDDHDIINKTKALLQHALPQMEYSATIATVIVSSRFYDQMKDEMISKSLWNEELDQLDSVAREISLEVAFAEMA

SEQ ID NO: 81722 - protein, 622 aa, Nitratireductor indicus C115
MYLTAEAVLHAIAILRANVHPFIGITFVACKHYGLSVGSLDALSLDKLTEEHLDGHHRLDHRSSYYFQPFKSASSWVKQRYPSTGLQTVNTQTFASVFEHPRGTPKWGFSREYLDRITTVLEEKKFPSNVAADALAVWLYKDTDVGSVSNYEELVELFFSEYKINEAEKERLFSIRMMEDVLAFEGAFSFEPLAMTAITRELPPPPDAKAEGGRTIKSLRLRNAGPAREMELDFGQRLSVITGDNGLGKSFLLDFAWWAATGSWADREALPQLDNPTVVSEVDYSLSGSSGRMVSFKAKYDRKSFTWVRPKEAATVEAIAIFSRADGSFAFADPVRSRFNRKSSISNSLSAKELWDGRPGTIEGLIRDWIKWQTSIDRKTFDQFAAVLKRLSPEDLGTLTPGEPVRIPDEPRDIPTIRHRYDTVPVTHASSGVQRVLLLAYLIIWSWQEHELAAKQMGEIPLRRMMVIVDELEAHLHPKWQRIVLPALMSVGELLSSDLAVQMIAATHSPMILASMEASFDTSIDVLYHLHGVGPTVKLEETPFVKYGDASGWLTSPLFGLRHARSREAEETIERAKALQLAENPSSGDVAAITERLKSQLANDDKFWPRWLYFAEQHGVKI

SEQ ID NO: 81723 - protein, 206 aa, Nitratireductor indicus C115
MIGVVFQPEYVGFDDEVRKPGAAFLTSCPKPTSKQFKKYAYWSRALSQLHEAYSGVCAYTAMYLPDRGTVDHFLPKAGENGRPDLAYEWNNFRLAGGKINTSKGDLTDIIDPFHVQDDWFFIDLPACLIRPNPELDKELKRKIANTINSLRLNQDDNYVQERCNILMAYATNDVSLNFLERRYPFLAKEIARQGLTLERLRELFRI

SEQ ID NO: 81724 - protein, 272 aa, Pseudomonas syringae pv. avellanae str. ISPaVe013
MSVTAEHAAQSKPSRLDAYTSWYDAASNLKNFETWFIGKTLERFQRLSRAGSSSVFNDELTWINSAIQCALPDANGIEYDMELRALVVEMDDRKIPFNDLSDGQRGMVALFADIARRICLLNPHMGKDVLSKTNGIIVIDELDIHLHPGWQRTIAPALKKAFPSVQFIAASHSPQVIGSLQPGEVILLNNHDGSHPRATYGLDSSSILEEVMGVPQREPEIEELLDQLFSTLENNELEKARSQLDALKKKAPDLPEFAGAEALLKRKEIIGR

SEQ ID NO: 81725 - protein, 215 aa, Pseudomonas syringae pv. avellanae str. ISPaVe013
MRRIIKGTEPASFTEWKASANEDWTPTYPALPNPQKRDLHDGLLREQNFSCCYCGGAIDLCSSHIEHFRPQEHYLPLALEYSNLHASCLRDRKAGGVLHCGHYKGNWFDEDLHISPTEYDCEQRFRYLLTGKIQSTSHIDLPATTMIEKLALDIAYLTKRRQEAITGMFDEQFISSASDAELANLVDSLRSGTANTSIAFGHVVARYAEQLLTQG

SEQ ID NO: 81726 - protein, 287 aa, Pseudomonas syringae pv. avellanae str. ISPaVe037
MPVFAVYRANRGWLTMNVAAEQAAQSKPSRLDAYANWFDASSNLKSFETWLIGKTLERFQRLSRTGFSGVLTDELTRINSAIQCALPESKGIEYDMEMRGLMVDIDDRKIPFNDLSDGQRGMVALFADIARRICLLNPHMGKDVLSKTNGIIVIDELDIHLHPGWQRTIAPALKKAFPSVQFIAASHSPQVIGSLQPGEVILLNNHDGSHPRATYGLDSSSILEEVMGVPQREPEIEELLDQLFSTLENNELEKARSQLDALKKKAPDLPEFAGAEALLKRKEIIGR

SEQ ID NO: 81727 - protein, 215 aa, Pseudomonas syringae pv. avellanae str. ISPaVe037
MRRIIKGTEPASFTEWKASANEDWTPTYPALPNPQKRDLHDELLREQNFSCCYCGGAIDLCSSHIEHFRPQEHYLPLALEYSNLHASCLRDRKAGGVLHCGHYKGNWFDEDLHISPTEDDCEQRFRYLLTGKIQSTSHTDLPATTMIEKLALDIAYLTKRRQEAITGVFDEQFISSASDAELANLVDSLRSGTANTSIAFGHVVARYAEQLLTQG

SEQ ID NO: 81728 - protein, 346 aa, Pseudomonas avellanae BPIC 631
MESQVPSVIEAKGVWWESAVESSWLQQRVSLKKSTNTIGDAGSKALTLYGKSLQDSVRSDAHVTLPMMTYLGTSRLWFEGRFSSAAAQTTLDKSEYSRTSAYLNCLSYSSSFKTFTAWYIWMYRSYREAQLIALERGEEVSDTGQRFEKIISAVKEAIDRLIKAPTGWHRLEYSASHQQQLVMHHPDQGILPVEMLSDGLRNTIAMVADLAFRACKLNPHLGERAPLQTPGIALIDEVDMFLHPFWQQTIVGSLRAAFPAMQFIVTTHSPQVLSTVRRENIRVIGKDAQGRLIASRPLAMTYGEPSNSVLRSVMQVDPQPPVDEKPGLLQLTEWVDKGRYDEPVVV

SEQ ID NO: 81729 - protein, 189 aa, Pseudomonas avellanae BPIC 631
MCCYSEIRPDRVGLSFHIEHVENKSQHPQRTFDYNNLAACALDSQSDLEVLKIQGAEVFGGHASGKSKGVDMARFVSCHMPDCSRFFAYLSDGRVVPADGLSLDEVDRAEYTIDLLNLNSPYLQDLRQAWWDELEGLFEDHVDQDMSLHCLAGIDLIPVGASLSQFFSITRNFFGGIAEEVLDQEAGRW

SEQ ID NO: 81730 - protein, 452 aa, Pseudomonas avellanae BPIC 631
MEIKSFRLINVGRFSDLEVALAPTERHPSKVTVLVGNNGAGKTTLLKSVATALSWLVARVKTPKGVGIRINEDTIQNGAATSSIRVDAYNDQIIDPLICGADFYWEIAGTLKGRKATSSTVLGELSMLAEGYRSQLTAKSDSSLPLLAFYPVERSVIEIPLKVHAKHTFDQLDGYDNALGRGVDFRRFFEWFREREDSENETGISTELLNELSQKILVDTELWKVLSREHASSRDRQLTAVRNAVAAFMPGFTNLRVKRKPRLHMAIDKNGKTLNVSQLSQGEKSMMALVGDIARRLAMMNPALENPLHGNGIVLIDEVDLHLHPKWQRSLIAQLTTTFPNCQFLLTTHSPLVISDSKDVLVYVMDDGQLREQDGLYGLDANQVLLSVMDTDIRNEAVQASLDEMQHFLIRGELDEARTIYGVLAGELSADHIELAKASLLIRKLELRRAKD

SEQ ID NO: 81731 - protein, 203 aa, Pseudomonas avellanae BPIC 631
MLEKWKRANKGKKYTDLVGREDIKDAIRHACVTEQHGLCAYCCCRITTEKDSACNEHVEAQHLAPNRTLDFGNIVASCTKPGRCDDAHGHQPLPLTPLMIECEKELQFELSGLVAGTTPRARECIKVLNLGDTRKSNKGLIEERKKMIDALLLSYGVDPAEPVVEEDGILDLLIEDMVRVDIQKELQAFSPVLVNVIRRLKAW

SEQ ID NO: 81732 - protein, 441 aa, Pseudomonas avellanae BPIC 631
MNLTRLCLKNYRRFAEFDIEFDPQLTVISARNGQGKTSVLEAIVAALGPFVGSFDQGMSRHIERTDARYARVGEGFESEQQFPVIISAEMSNPAKRWQRALNGPKSRTTTKEAEPLAAWGKELQLLLRSDSAISLPVVRYYSSRRLWVSHKNVSSKAILTESRTAGYEDCLSAFSTYVQLQEWMRKATLAVIQQKQQVGYEHSNLEPRLQGIRNAVNEVMAEEGWSDFHYSLTYEELSISHADHSALPLGLLSDGVRAMITLVADLALRCSRLNGHLKEQASLKTTGIVLIDEVDLHLHPAWQQRVVASLRKAFPNIQFIVSTHSPQVLSTVKRECIRMVFQDADENWQTACPPQEVKGVESAIALNDIMGVNPIPPVAEALWIAEYTAKIENGPHEDHNGLALRKKLLDFYGAQHQVILDADRLIRFQTFKLQKHSNTKG

SEQ ID NO: 81733 - protein, 168 aa, Pseudomonas avellanae BPIC 631
MRCAYCEGAIFHEGHIEHFRRKNPDHFPELTFAWSNLFLACGSTQHCGHHKDRRSAPAYDPGLLVKPDEHDPEHYLYFHSSGKVLARNNLSDHENSCATETIRVFGLDNPALEGARANAVRSYRKMHDADLSEIASWSDAERDAYFRGEIEATRWLPYATTIRHFLQK

SEQ ID NO: 81734 - protein, 461 aa, Vibrio cholerae HE-16
MEIKQFRLTNLGRFSELEAELAPTPELNSNVTVFIGNNGAGKTSILKALATSLSWFVARLRSEKGSGSPIPEGVILNGQASALIDVSVFDDHGQSNNPDLESENAIYHWSLAKTQTSKKARFNSNLNDASRLADLYRTAITHNEKISLPLIAFYPVERVVLDVPLKIKERHSFLQVDGYDNSLNQGVDFRRFFEWFREREDAENESGLPQDVLDKLLETLGDNNDVWHKLQSLMASSRDRQLTAVRTAISNFMPGFSNLRVRRKPRLHMSIDKDGQTLNVLQLSQGEKSLMALVGDVARRLAMMNPALENPLHGDGVVLIDEVDMHLHPTWQRSIIERLTSTFPNCQFILTTHSPLVISDYKNVLVYSLDDGEVRQVPSQYGEDANSVLLNVMDTHIRNAKIASQLNDLLDLIQQTNDSSSVSQAKEALSKLEKELPSNHLEIVKAKMLLRKQELKYAQNN

SEQ ID NO: 81735 - protein, 196 aa, Vibrio cholerae HE-16
MDENQWFQALYEQKQWQVVSDLSSHNAAEQFYLCAYCCDCITGETTDTVNEHVEARAVATRRSLDHNNIVASCKTTNQCDSAHKSQVFTLTPLMDECETELKFKISGRVEGSTDRARETIQVLNLGDNEVNNKSLIEKRKQLSHSLMWSNGINPTDGLEDEELLLAVIDDLMTPKDGKLEAFAPVVANILRNWIAA

SEQ ID NO: 81736 - protein, 565 aa, Vibrio cholerae HE-16; identical to SEQ ID NO: 81636

SEQ ID NO: 81737 - protein, 291 aa, Vibrio cholerae HE-16; identical to SEQ ID NO: 81637

SEQ ID NO: 81738 - protein, 410 aa, Escherichia coli N1
MIIEKLHLKNFRHFPEVNINFNRGFNFISGPNGCGKTSILAAIGHTLNSNTEYSRHGENCEYWIDVTEQGRKFRPGKGAGSIRPAGYRKDALISHILPPREQGRESIDYYNARNILKLPPLIIGAQRKITYKNITGMTRETDVTGSRNHYCDNSLKYLYNSVERNIKQWMINRYFIIDKDWAVEEKENWEHLIKTLPEIAPFNSNFKYIRTGRDLEPVFSIYEKECYLEELSSGFQAILYIIITIFEWIESCMPEGERCVKNAEGTVLIDELDNHLHPEWQLTIRNGISALFPQLQFIVTTHSPHLLASANKNEIILLPPSYEKEKYNICPLDKTYSGWSTDLILTGLMGVLSLDSKEYEKLVEACYKNIEENDIDELKRNYSRLESVSHPDDSILIVLKTRIAGMEAIR

SEQ ID NO: 81739 - protein, 252 aa, Escherichia coli N1
MIKLNRLPSPVVLRDNCNAWTKNLMALVDKYGGYNKIPAKEKGPALRFYRHEDIKQTLKASTHGKCAFCEGIPDETGYAEVEHFYPKSLYTEKTFEWENLLYACKACNNQKLNHDTYHLPIVNPYDNDPDEYFTYNDIMIRPKKGAYQEVAERTIKVCGLSSPRLITARSDILVSFRIFEQELSTALSKFHDARTEKSKEDRARKISEALDTIESMAKPDAKLSHFYRFLLNSSAVYHQAKDELNNYLCEVL

SEQ ID NO: 81740 - protein, 550 aa, Escherichia coli ARS4.2123; identical to SEQ ID NO: 81326

SEQ ID NO: 81741 - protein, 216 aa, Escherichia coli ARS4.2123; identical to SEQ ID NO: 81309

SEQ ID NO: 81742 - protein, 402 aa, Acinetobacter baumannii Naval-72
MECIIGTTSYNDLKTMKVKSLKIENIGGIPNLELQNINPQMNIICGENGVGKTNILDSIAYLFSIGDDNVINKRSGSEKGKITLNLDILQNPIFTTVSEFEPSRYTRSTQHFYNTIDTAKIIYLKVNRVFNYYFQNTIGQRDTSDHRKSFHTKGIDNKDLKEWFVHRILLSNTNGALSDSELLNIKMAIKSFSVLDGSVTFKSVTKFNEIIVNTPTGEIYFEYLSSGFKSTLFIILGIIKELDYRYPDSHLNCSEFDGVILIDEVELHLHPEWQGKISKILKDIFPQAQFFITTHSPHIVQSAGLNEVIALDRKEGEVSKRHLPNSEYGYQGWTVEEVLKDVMGMKDLRTEMYDSIRKEFIEAFKNQNKEDAKQAFAKLSSMLHPTSELKTIYQMQLDSLGE

SEQ ID NO: 81743 - protein, 241 aa, Acinetobacter baumannii Naval-72
MIKLRRIERPSYLTEEKVKELTDKFKSTGKPVWNHDQIKIPLSTSSNNKCAYCESDLTEPTTYMEVEHFIPKSKNADLVVNWDNLLPSCKRCNGTKNDEDIVSKPIINPFDQEPKEEFYFDLFYIFGKTTVGINSVETLNLNDESLFLKRCKVAGAAKTSLKLMNNEFSLAHKLNHFNRNRLRAVLLAAQPERPYSAFVATIIHTTIEYDQLRKRFIDEGLWTKELMCLHETSLNLVLPQS

SEQ ID NO: 81744 - protein, 430 aa, Vibrio sp. HENC-01
MKLNTLSVKNFRCYKEKTFQFNPQVNLIVGQNATGKTAVLDAVAVAIATWILGFKKKNDKKSLYPTDATLSYVEKEGESQFVEAWPVLVSATGVVKNNVVEWERSKDSPTGNTRYGNATSLTALAKTCDEQLSENINLPLISYYGTMRLWQDPKAYKAKPSLTKSTTKPSRLDGYKHCVDPRIALKELVAWFARQEWQAFQEGKESTMLTVVRKAVIGCIENAEHLRYDPKREELLLTLKGSEPQPFNLLSDGQRCVLALVADIAQKAARLNPHLGHEVLNKTEGIVLIDELDLHLHPKWQRHVIEDLRNTFPKVQFICTTHSPFLIQSLRSSEELIMLDGLPPAQLANKTLSDIAVGVMDVNSPDTSSRYEEMKGVATEYLKLLDESESAPEDKLQQYKERLAESIAPYDDNPAFQAFLEMQRVAKLGE

SEQ ID NO: 81745 - protein, 245 aa, Vibrio sp. HENC-01
MRPIRRDTSPEADDYDDYTKAKPALIGRLGSYCSYCERPIKTNLAVEHIQPKAGDDGHPELIGRWTNFLLACVNCNSTKKDKKVDLDKLLIPDRDNTFSSFQYTEDGKVSVSEALATPISGYAKATLELVGLDKKILRALDANGVQVEIDRVSQRMQAWAKAQSAEAMIQQQPQNDLLKEMAIGWAVSEGFFSIWLTVFADCPDMKLKLVRAFKGTEESGCFDMTTGDSVTPAPNPDLLAHGGKV

SEQ ID NO: 81746 - protein, 456 aa, Parabacteroides johnsonii CL02T12C29
MRKIIITNFRCYEEKTMSFRRSINLLIGDNSVGKTSLLRACNLIINAFFSGYSDENTVWKSAANDDFRERRSEDIVDTDLPIKITFWLDKSDCPDIVLEDGTTKSLQSNEPEAKAECARFYIEKKSKKNARNLITGINTLKDFASSLQNSSHIIVDGKAVQKNALPLFAYFTTEDIHTTRKFDKEKKKFKKYPQKPSFGYFESYDSKGLLDCWLKRLLVLKEAKKGEQEIECVRKAVISALGPSGCNIIDNFEIRHNDGNVFFHYCDGREVRSDLLSDGYRRLVSIVVDLAFRCALLNKVMYGDEAFKLTHGTVIIDEIDEHLHPDLQVRILKALHETFPKLQLIVSTHAPLVMSSVENNENNVVYRLDYKDGKYSHTEVDTYGLDANLLLKERMKVSVRDIKTSSLFEQLDDYLKNKDIEHAKSVLYELENLTDPQQPELVRVRAIINRLELIGK

SEQ ID NO: 81747 - protein, 241 aa, Parabacteroides johnsonii CL02T12C29
MKCIQKDYTTDVVRTHNAELRAQFLDEQSLLDPATYSGFTGKKLYKLVRDIKIIPHFWNLKHQMMEEQGGICCYCGLKIAFDGLRKPSVEHLIPKGTYRELVGEYKNLLLSCSLTTEEKSDIEDGNAIEADVQHCDDTKGDQQLNHTPLQLDCYDYFVYDINGHVAGRNVDSNTDIETLNLDCRALVDRRNAALSILFDENGDFLSDRELQQIASTIMDRDADGNFREFCFVIKSVIDNLP

SEQ ID NO: 81748 - protein, 409 aa, Acinetobacter baumannii OIFC0162
MNIRGDIPHAKIENINIPLNRRNLIITGRNGSGKTSFLTTLERNILNNLEKKDQQLLQSQRNIESWINYRNTLAKTSEQYISISNQIEREQEKIQLLNNGFQLDFNSFDELQSNYDSFKAIFRSFPAMRISSIDHATQTTSLIEEKTIAKQNFKHNLGSKLEQHLINVKTSEAFAKGIEKDEIKGKKFEEWFNLFDTSLKKLFENNNAKLVFSNEERKFRITDGKLISSFQDLSSGYKAIFDIYADLLLRTEFFDITPSELQGIVLIDEIDAHLHISLQKLILPFFSESFPNIQFIVSTHSPFVITSTDNDTVVYDISSGEFFEDDLSYYSHESIIKELFHVKEENENLKKLSGQLLEFIELKDSPKDLNTIQDLLNEIHKNFEKLSVELQLQYMVAKNKLAKLKHEGN

SEQ ID NO: 81749 - protein, 223 aa, Acinetobacter baumannii OIFC0162
MFSVTRPTTFPKSLTKSTKDYRAADVVEVLQDIFFAKCYLCERQGFPDVNIEHRDPHLGDDTKKYDWHNLFYACVRCNSIKGDTHINILDCCQSIDVSQAIELHCPLVNNEAHKITVQLGNLPNSLEISSTIELLNRCFNETNTALRGISRHSLIKEIQKYQIQLSILKNKLLYPELPLTSKAKTEILEQLKAMCDKEFPFSAFWKWAITRDDDLSKIVGNVF

SEQ ID NO: 81750 - protein, 403 aa, Arthrospira platensis C1
MQINNLSLSNFRGFEQAEFEFQPGMNLIVGINGVGKSSVLDALRISFSRILPKLTACQERRINFNIDDIMIGKNELTVEINVDISGIPFRCKVSRGKRHEQELKPDGYQILGLIKDDPNQPLVVYCATRRSIVTEQDLNPNRSLGNQSAAFVDALIPRMLRLREFIDWWLVQEELLDEKPQLTQGRIDALNDAVTCFLDWCNNVRAVPASDTYKKPTLLLDKNGVTLNINQLSDGERGILALILDLVQRLLQANPELENPVQDGKAVVLIDELDLHLHPQWQRMVVHKLTEIFPNCQFIATTHSPQMIGEVKPENIIILDQDKQPYIPDQSLGMDSNWILRFLMETPERDMDTQKKLEDVESLIADKNFSEATEKINSLRQLGEFPELVRLQTRIDRISRLGK

SEQ ID NO: 81751 - protein, 239 aa, Arthrospira platensis C1
MKYIKKEQEPEKLRSWFNNQYDQEGNRLGCDYYNDVPSDVKRDLKDHLLGEQGFLCCYTGILIDTDTSHIEHLKPYSICRDEKNYEDVNYLNLVTAYPGRNYKSQDDEVNQPSKKSKKNSKKCPFGAHAKDNWYELDNFVTPLESDCEDRFKFDNSGKVEATNHQDTAAQITIEKLVLNHQRLIDLRKAAIDEAIFPTDTELDESNIKEIANGLYSQKNAEGKFSQFCFVIEQIAKQLV

SEQ ID NO: 81752 - protein, 474 aa, Microcystis aeruginosa PCC 9432
MWPNKLEFYRLLLFSGGMSMWVESIKLENIKCFQNQEIKFISNPNNQRHWRAKPYHWITLLGENGVGKSTILQALALLLAGPEAAKELLPRPTGWICNPKTPGKLTAVLHQEDGDAGKFGTDKTRKTFAYSYFVTGKERLELGGSKDKQTYTEPALIEENTKILSWLRANAFASDNHGWFAVGYGAFRRLTRVSQVIIPSLEPPQRSSNFFSQFNEDTSLSSFERWMVHLDYRIAKNPQDIQAKQMKKIGEEAITKLLPGNVEIAEVTADALIQFLVNGQKVPTISLSDGFRSMIALAGDLIWRLLQSFPNLDNPTEASGVVLIDELDIHLHPSWQREIAGWLQEVFPKLQFFVATHSPLIAAGAGPNSLTLRIDLVEGESEIVEIPYKELAANVDRTLTSSAFGLKSTFPTETENKIKRYHQLNRKNKNLAAEEKEEYEQLSLFVGEVKPFGEISQPNSLESRIDALLEERLS

SEQ ID NO: 81753 - protein, 229 aa, Microcystis aeruginosa PCC 9432
MIPVTRISEPRVLAKNAARWLEALESIKSNNKATKTDINKAQNKYSHPQVKEALVKMFNGKCAYCESKIIVVTYGAIEHFYPKSQYPDLTFTWENLLLSCDKCNDANHKGTNFPLDDITGNPLLIDPTDGVTDPNTHLEFVWDEMAKLASVYGRDRRGQIVEDLFDLNGMRGRKELINHRSQYIKKLLALLRYAKQGDSEVLSLLQEACQPGAEYYAFASIYILPHLPP

SEQ ID NO: 81754 - protein, 409 aa, Acinetobacter baumannii OIFC111
MSISGNIPHAGISNINIPLNRRNLIITGKNGSGKTSFLKKLNEKLDLHFSKQIQQNQSDQNAVKHYLTQLQSYPEGSYEHSNAQQQLSFFQARIDKANDALTLNIDNELELIQLYDNNKAIYKSFEAMRTSSILSVTSSTSIEQEKSSAKQNKSLNLGQKLEQHLINIRISKAFSFERNDSTQLKKLNSWFEKFDNNLKLLFENDSTTLIFKEQSLKFKIKLNDREFDFQNLSSGYQAIFDIFADLLVRTEFFDISPEELRGIVLIDEIDAHLHISLQKKILPFFTNLFPSVQFIVSTHSPFVITSTDDDTVVYDISSGEFFEDDLSRYSYESVIKGLFHVETQSEQLASETKAIAEILNNEPNNYEKLREILRNISPFAKQLDVESKSFYFKALNHLLDNQELGDLDV

SEQ ID NO: 81755 - protein, 220 aa, Acinetobacter baumannii OIFC111
MFKVMRSEVPAEWTNGNYRDPLVVNQLKKDFLSKCYLCEQTDFGNVNVEHFVPHLNQSEELRIDWKNLYYSCSHCNGIKGPRHQELLDCCDENHNVDVVIALEAPSVPNGKIVLTNTLDNSSDLFELTNKTIALLEQCYNNANSGIQQISHQYLKEKILEEHAYLQNLRFQLKNGLNRMLQKEKDELIERIKNMLKPSYPFSAFWKTYVRNDPFLSEILK

SEQ ID NO: 81756 - protein, 427 aa, Acinetobacter baumannii Naval-82
MKFKKILLNDWRQFQNIDIDFHPNVTIITGANGSGKSTILKLLSKHFGWYQPFLGTPILSKEQGVFYYKTVFRPLNKEYQTSHYGHNIHILGNIFYSNDASSDIFIHEQIYSDAQFDLQFGGNIPVVKGVHISSHRPIPKYERLQNIPTNPMDASQAFNSYFQETVNLFNNNYTQHTPIYRMKEAIVSMAAFGPGNQFVQKNEKIEKQFSDFKDILKQILPADLGFKDLSVRIPDLVLETETGDFLLDASSGGIMSIIDLAWQIFLYSHDKDEFVVTIDEPENHLHPSMQRSLLNDFVKAFPKAQFIVVTHSPFIVSSIRESNVYALKHEKNNVSDQQSGWAKKVVSYKLDLNQKAATASEILRDVLGVPVTLPKWADDELQKICSTFTVQDITTDGLSRLRAELNNAGLGEFYPEALSNIVGESGL

SEQ ID NO: 81757 - protein, 222 aa, Acinetobacter baumannii Naval-82
MIKIIKKQKPAVLIKNASKWKSQLLDDIKAEKKSTKYLLTRYSHPEIKETLIEETHGKCAYCESKLLHIHHGDIEHIFPKALDQSKRYEWNNLTLSCEICNQNKSNHDPNLNHILNPYIDNPESSLIFFGTFAHGMDNKGEATRFLLELNRTALVERRQERLDKIRLIVKELNNTGLPIVARKAIYQDLIENEASHESEYTSMVKLAIRCFDASIPTEVKAA

SEQ ID NO: 81758 - protein, 530 aa, Thauera aminoaromatica S2; identical to SEQ ID NO: 80984

SEQ ID NO: 81759 - protein, 175 aa, Thauera aminoaromatica S2
MIFVRRDPKLIPEKVLRVAERAQAELEALPAEQRAAFIEKKKRIWRAFARYLSKMSYGKCWYSESDCVHSFMDVDHYRPKKQAKRSDTDSDDGYPWLAFSWDNFRLSAQRANQINHDDATDETVGKGAWFPLMQGSRRATWDDRCIEDERPVLLDPAKLADVRLIEVTATVAGDN

SEQ ID NO: 81760 - protein, 429 aa, Thauera phenylacetica B4P
MLKSLHLSGVGPAREFGPVEFAPRLNFITGDNGLGKSFVLDAAWWVLTRTWARGSEAVPQRDAKRASIAYAYTKSTRGDFVEQSVYSRLDQAWPVKQGRPPIPGAVIYAGVDGSFSAWDPARNYWSDKEALASERLRAFNFTPGQVWTGLQGPSGITHCNGLIQDWVLWQKSGDPAFDDLVKVLDALSPSINEKLAPGKPVRIGLDVTDYPSLRMPYGQDVALIHASAGMRRIAALAYLLVWTWREHRLACEQTGRKPAKEIIFLIDEIECHLHPQWQRRIVPALLHVMKALTGKNVPVQVLVATHSPLVLASAEPSFDPSQDAVFTIGLREGQAVIARDSWAKQGDVVNWLVSDAFGLQQARSVEAEEAIEAAEAWMRGERDALPAHLANERAIHRALEHVLPGGDHFWPRWIVWVESRKTVQRGGGL

SEQ ID NO: 81761 - protein, 193 aa, Thauera phenylacetica B4P
MIPVANPITEPADFDQRCRKRGLQWLNRNPDTKRPADYWSEFRAELAVGFQDRCGFGAMWISSGTVDHFVSCSENRLKAYEWSNYRYLDGWINSSKSKKRSQDLLDPFEVGEGWFEIELPSLQLKLTDAVPPEYRRRADYTLRNLPIRDDERLIRQRRAWYELYEQGKLTLDGLREKAPLIAAAVEKHTAGKA

SEQ ID NO: 81762 - protein, 455 aa, Microcystis aeruginosa PCC 9717
MWVESIKLENIKCFQNQEIKFISNPNNQRHWRTKPYHWITLLGENGVGKSTILQALALLLAGPEAAKELLPRPTGWICNPKTPGKLTAVLHQEDGDAGKFGTDKTRKTFAYSYFVTGKERLELGGSKDKQTYTEPALIEENTKILSWLRANAFASDSRGWFAVGYGAFRRLTRVSQVIIPSLEPPKRSSNFFSQFNEDTSLSSFERWMVYLDYRIAKNPEDSKSKQMKKIGEEAITKLLPGNVEIAEVTADALIQFLVNGQKVPTISLSDGFRSMIALAGDLIWRLLQSFPNLDNPTEASGVVLIDELDIHLHPSWQREIAGWLQEVFPKLQFFVATHSPLIAAGAGPNSLTLRIDLVEGESEIVEIPYKELAANVDRTLTSSAFGLKSTFPTETENKIKRYHQLNRKNKNLAAEEKQEYEQLSLFVQDVKPFGEISQPNSLESRIDALLEERLS

SEQ ID NO: 81763 - protein, 229 aa, Microcystis aeruginosa PCC 9717
MIPVTRISEPPVLAKNAARWLEALESIKSNNKATKAQINQAQNKYSHPQVKDALVKMFNGKCAYCESKITVVTYGAIEHFYPKSQYPDLTFTWENLLLSCDKCNDANHKGTNFPLDDITGNPLLIDPTDGVTDPNTHLEFIWDEMAKLASVYGRDRRGQIVEDLFDLNGMRGRKELINYRSQYIKRLLALLRLAKQGDSEALSLLQEACQSGAEYYAFASIYILPHLPP

SEQ ID NO: 81764 - protein, 426 aa, Microcystis aeruginosa PCC 9443
MRIKSIKLINYRGAVSLNIDFHRQLNVFIGVNGAGKSTILDSLAIMLSWLVNRLKNTNASGRQMSETEINNGQGTAIIEITGVTEDSQEITWKIVKTRTGYIHAGERNNFSQLNEYTQQIQRQITEHQGQINLPLFVYYSVNRAVLDIPLKIKTKHQFDSLSAYENALTSGSDFRTFFEWFREREDLENENRKYQYDLIKPEGFCFPDPQLEAVRETIERFLPDFTNLSVRRNPLRMEVTKKNEIVTVNQLSDGEKCLIAMLGDLARRMAIANPQNPDPLTGNGVIIIDEIDLHLHPQWQRFVVPKLLEIFPNCQFFISTHSPNIITHVQPESLHFMEQTEMGIKFHPVQESYGKNVDRILEDLMGLETTRPKEIAEALKDIYEQISQNQLEAAKNKINVLRAKIQNDPELIKAEVIIRRKEIIGK

SEQ ID NO: 81765 - protein, 210 aa, Microcystis aeruginosa PCC 9443
MKYIRKRQEPPEFKNWKEQANSDWQPDFKNLAGKPKEILIKALMTEQGEICCYCESRLVDGECHIEHFKPQSDPTVDPLDYANLLCYCQANLKLGEPRHCGNLKNSWFDENLLISLLNPDCESHFAFNYDGTIKPAQEDDQKAINTIEKLGLNLNKINDFRQKAIEPFLDEEIDNAQLKVLVNGYLCLDDQQRYSPFWTTIKYLFSDLIE

SEQ ID NO: 81766 - protein, 455 aa, Microcystis aeruginosa PCC 7941
MWVESIKLENIKCFQNQEIKFISNPDNKRRQDAKPCRWITLLGENGVGKSTILQALALLLAGPEAAKELLPRPTGWICNPKTPGKLTAVLHQEDGDAGKFGIDKTRKTFAYSYFVTGKERLELGGSKDKQTYTEPALIEENSKILSWLRANAFASDNHGWFAVGYGAFRRLTRVSQVIIPSLEPPQRSSNFFSQFNEDTSLSSFERWMVYLDYRIAKNPEDSKSKQMKKIGEEAITKLLPGNVEIAEVTADALIQFLVNGQKVPTISLSDGFRSMIALAGDLIWRLLQSFPNLDNPTEASGVVLIDELDIHLHPSWQREIAGWLQEVFPKLQFFVATHSPLIAAGAGPNSLTLRIDLVAGELEIVEIPYLELAANVDRTLTSSAFGLKSTYPTDTENKIKRYHQLNRKNKNLAAEEKQEYEQLSLFVREVKPFGEISQPNSLESRIDALLEERLS

SEQ ID NO: 81767 - protein, 229 aa, Microcystis aeruginosa PCC 7941
MIPVTRISEPPVLAKNAARWLEALESIKSNNKATKAQINQAQNKYSHPQVKDALVKMFNGKCAYCESKITVVTYGAIEHFYPKSQYPDLTFTWENLLLSCDKCNDANHKGTNFPLDDITGNPLLIDPTDGVSDTNTHLEFVWDEMAKLASVYGRDRRGQIVEDLFDLNGMRGRKELINYRSQYIKRLLALLRLAKQGDSEALSLLQEACQPGAEYYAFASIYILPHLPP

SEQ ID NO: 81768 - protein, 455 aa, Microcystis aeruginosa PCC 9807
MWVESIKLENIKCFQNQEIKFISNPNNQRHWRAKPYHWITLLGENGVGKSTILQALALLLAGPEASKELLPRPTGWICNPKTPGKLTAVLHQEDGDAGKFGTDKTRKTFAYSYFVTGKERLELGGSKDKQTYTEPALIEENSKILGWLRANAFASDSRGWFAVGYGAFRRLTRVSQVIIPSLEPPQRSSNFFSQFHEDTSLSSFERWMVYLDYRIAKNPEDSKSKQMKKIGEEAITKLLPGNVEIAEVTADALIQFLVNGQKVPTISLSDGFRSMIALAGDLIWRLLQSFPNLDNPTEASGVVLIDELDVHLHPSWQREIAGWLQEVFPNLQFFVATHSPLIAAGAGEKSLTLRIDLVEGESQIVEIPYLELAANVDRTLTSAAFGLKSTFPTETENKIKRYHQLNRKNKNLAAEEKEEYEQLSLFVQDVKPFSEISQPNSLESRIDALLEERLS

SEQ ID NO: 81769 - protein, 229 aa, Microcystis aeruginosa PCC 9807
MIPVTRISKPPVLAKNAARWLEALESIKSDNKATKSQINKAQNKYSHPQVKEALVKMFNGKCAYCESKITVVTYGAIEHFYPKSQYPNLTFTWENLLLSCDKCNDANHKGTNFPLDDITGNPLLIDPTDGVTDPNTHLEFVWDEMAKLASVYGRDRRGQIVEDLFDLNGMRGRKELINHRSQYIKRLLALLRLAKQGDSEALSLLQEACQPGAEYYAFASIYILPHLPP

SEQ ID NO: 81770 - protein, 455 aa, Microcystis aeruginosa PCC 9808
MWVESIKLENIKCFQNQEIKFISNPDNKRRQDAKPCRWITLLGENGVGKSTILQALALLLAGPEAAKELLPRPTGWICNPKTPGKLTAVLHQEDGDAGKFGTDKTRKTFAYSYFVTGKERLELGGSKDKQTYTEPALIEENSKILSWLRANAFASDSRGWFAVGYGAFRRLTRENQRNVPSLEPPQRSSNFFSQFNEDTSLSSFERWMVYLDYRIAKNPEDSKSKQMKKIGEEAITKLLPSNVEIAEVTADALIQFLVNGQKVPTISLSDGFRSMIALAGDLIWRLLQSFPNLDDPTKASGVVLIDELDIHLHPSWQREIAGWLQEVFPNLQFFVATHSPLIAAGAGEKSLTLRIDLVEGESEIVEIPYLELAANVDRTLTSAAFGLKSTFPTETENKIKRYHQLNRKNKNLAAEEKQEYEQLSLFVQDVKPFGEISQPNSLESRIDALLEERLS

SEQ ID NO: 81771 - protein, 229 aa, Microcystis aeruginosa PCC 9808
MIPVTRISEPPVLAKNAARWLEALESIKSNNKATKAQINQAQNKYSHPQVKDALVKMFNGKCAYCESKITVVTYGAIEHFYPKSQYPDLTFTWENLLLSCDKCNDANHKGTNFPLDDITGNPLLIDPTDGVTDPNTHLEFVWDEMAKLASVYGRDRRGQIVEDLFDLNGMRGRKELINHRSQYIKKLLALLRYAKQGDSEVLSLLQEACQPGAEYYAFASIYILPHLPP

SEQ ID NO: 81772 - protein, 457 aa, Microcystis aeruginosa PCC 9808
MEIQRVILNNIGLFEKLEISLAPTEQNPSNITVFVGNNGAGKTAILKALATSLSWFTARLLTEKGSGNPISEDAIFNTANAGSIEIEVWDSSKSLNNPDQSDIDHYFRWILAKSRKGRKAQYNSNLNDCTRLANRYRDALTHDDKTSLPLIAFYPVERVVLDIPLKIRNKHTFLQLDGYDNSLSQGVDFRRFFEWFREREDTENESGVPEDVLNQLRPIMAETNQDLWRWLNERNASAKDRQLTAVRTAIGRFMPHLDNLRVRRKPRLYMAVDKNGETLNLAQLSQGEKSLMALVGDIARRLAMLNPALENPLAGDGIVLIDEVDLHLHPSWQRRLCECLTETFPNCQFVLTTHSPLVISDCKNVLIYTLANGELRQLPSQYGQDANTVLLDVMNTSIRNEKIDTELNDLLDAIQDSKLTEAQQLLAELSEELPANHLELVKAKLLLRKQELRHGNH

SEQ ID NO: 81773 - protein, 214 aa, Microcystis aeruginosa PCC 9808
MRTISKGAEPCCLTAWKRKNPHGAYDDLDKTEEGKVVRAKIRDYALNEQFYLCAYCCQRIEEINACHNEHLEAQKLNPKRTLDFSNIVASCNTPNQCGDAHKSQHLPLTPLMTECETELRFKISGRVEGLSDRAAVTIRVLNLGDHEKNNRALIEKRKQLSNALLWANGINPDDGLEDDEILNILISNLSQPQQDQMEPFTPVVINILRSWLQA

SEQ ID NO: 81774 - protein, 456 aa, Microcystis aeruginosa PCC 9809
MEIQRVILNNIGLFEKLEISLAPTEQNPSNITVFVGNNGAGKTAILKALATSLSWFTARLLTEKGSGNPISEDAIFNTANAGSIEIEVWDSSKSLNNPDQSDIDHYFRWILAKSRKGRKAQYNSNLNDCTRLANRYRDALTHDDKTSLPLIAFYPVERVVLDIPLKIRTKHTFLQLDGYDNSLSQGVDFRRFFEWFREREDTENESGVPEDVLNQLRPLAETNQDVWRWLNERNASAKDRQLTAVRTAIGRFMPHLDNLRVRRKPRLYMAVDKNGETLNVAQLSQGEKSLMALVGDIARRLAMLNPALENPLAGDGIVLIDEVDLHLHPSWQRRLCERLTETFPNCQFVLTTHSPLVISDCKNVLIYTLANGELRQLPSQYGQDANTVLLDVMNTSIRNEKIDTELNDLLDAIQDSKLTEAQQLLAELSEELPANHLELVKAKLLLRKQELRHGNH

SEQ ID NO: 81775 - protein, 214 aa, Microcystis aeruginosa PCC 9809
MRTISKGAEPCCLTAWKRKNPHGAYDDLDKTEEGKVVRAKIRDYALNEQFYLCAYCCQRIEKINACHNEHIEAQKLNPKRTLDFSNIVASCNTPNQCGDAHKSQHLPLTPLMTECETELRFKISGRVEGLSDRAAVTIRVLNLGDDEKNNRALIEKRKQLSNALLWANGINPDDGLEDDEILNILISNLSQPQQDQMEPFTPVVINILRSWLQA

SEQ ID NO: 81776 - protein, 426 aa, Microcystis aeruginosa PCC 9809
MRIKSIKLINYRGAVSLNIDFHRQLNVFIGVNGAGKSTILDSLAIMLSWLVKRLKNTNASGQQISETEINNGQGTAIIEITGVTEDSQEITWKIVKTRTGYIHAGERSNFSQLNEYTQQIQRQITEHQGEINLPLFVYYSVNRAVLDIPLKIKTKHQFDSLSAYENALTSGSDFRTFFEWFREREDLENENRKYQDYLIKPEGFCFPDPQLEAVRETIERFLPDFTNLSVRRNPLRMEVTKKNEIVTVNQLSDGEKCLIAMLGDLARRMAIANPKNLYPLTGNGVIIIDEIDLHLHPQWQRFVVPKLLEVFPNCQFFISTHSPNIITHVQPESLHFMEQTEMGIKIDPVQESYGKNVDRILEDLMGLETTRPKEIAEALKDIYEQISQNQLEAAKNNINYLRAKIQDDPELIKAEVIIRRKEIIGK

SEQ ID NO: 81777 - protein, 198 aa, Microcystis aeruginosa PCC 9809
MKYIRKRQEPPEFKNWKEQANSDWQPDFKNLAGKPKEILIKALMTEQGEICCYCENRLIDGKWHIEHFKPQSDPTVDPLDYANLLCSCQANLTPSEPRHCGNLKNNWFDENLLISPLNPDCESHFAFNYDGTIKPAQEDDQKAINTIEKLGLNLNKIKELRQKAIEPFLDEEIDNAQFKVFVNGYLCLDDQQISDLIE

SEQ ID NO: 81778 - protein, 474 aa, Microcystis aeruginosa PCC 9809
MWPNKLEFYRLLLFSGGMSMWVESIKLENIKCFQNQEIKFISNPDNKRRQDAKPCRWITLLGENGVGKSTILQALALLLAGPEAAKELLPRPTGWICNPKTPGKLTAVLHQEDGDAGKFGTDKTRKTFAYSYFVTGKERLELGGSKDKQTYTEPALIEENTKILSWLRANAFASDNHGWFAVGYGAFRRLTRVSQVIIPSLEPPKRSSNFFSQFNEDTSLSSFERWMVYLDYRIAKNPTDIQAKQMKKIGEEAITKLLPGNVEIAEVTADGLIQFLVNGQKVPTISLSDGFRSMIALAGDLIWRLLQSFPDLDNPTEASGVVLIDELDIHLHPSWQREIAGWLQEVFPKLQFFVATHSPLIAAGAGPNSLTLRIDLVACELEIVEIHYKELAANVDRTLTSSAFGLKSTYPTDTENKIKRYHQLNRKKKNLAAAEKQEYEQLSLFVGEVKPFGEISQPNSLESRIDALLEERLS

SEQ ID NO: 81779 - protein, 229 aa, Microcystis aeruginosa PCC 9809
MIAVTRISEPPVLAKNAARWLEALESIKSNNKATKAQINQAQNKYSHPQVKDALVKMFNGKCAYCESKIIVVTYGAIEHFYPKSQYPDLTFTWENLLLSCDKCNDANHKGTNFPLDDITGNPLLIDPTDGVTDPNTHLEFVWDEMAKLASVYGRDRRGQIVEDLFDLNGMRGRKELINYRSQYIKRLLALLRFAKQGDSEALSLLQEACQSGAEYYAFASIYILPHLPP

SEQ ID NO: 81780 - protein, 426 aa, Microcystis aeruginosa PCC 9701
MRIKSIKLINYRGAVSLNIDFHRQLNVFIGVNGAGKSTILDSLAIMLSWLVKRLKNTNASGQQISKTEINNGQGTAIIEITGVTEDSQEITWKIVKTRTGYIHAGERSNFSQLNEYTQQIQRQITEHQGEINLPLFVYYSVNRAVLDIPLKIKTKHQFESLSAYENALTSGSDFRTFFEWFREREDLENENRKYQYDLIKPEGFCFPDPQLEAVRETIERFLPDFTNLSVRRNPLRMEVTKKNKIVTVNQLSDGEKCLIAMLGDLARRMAIANPQNPYPLTGTGVIIIDEIDLHLHPQWQRFVVPKLLEVFPNCQFFISTHSPNIITHVQPESLHFMEQTEMGIKFHPVQESYGKNVDRILEDLMGLETTRPKEIAEALKDIYEQISQNQLEAAKKKINDLRAKIQDDPELIKAEVIIRRKEIIGK

SEQ ID NO: 81781 - protein, 210 aa, Microcystis aeruginosa PCC 9701
MKYIRKRQEPPEFKNWKEQANSDWQPDFRNLAGKPKEILIKALMTEQGEICCYCENRLIDGKWHIEHFKPQSDPTVDPLDYANLLCSCQANLKPGEPRHCGNLKNNWFDENLLISPLNPDCESHFAFNYDGTIKPAQEDDQKAINTIEKLGLNLNKINDFRQKAIEPFLDEEIDNAQLKVFVNGYLCLDDQQRYNPFWTTIKYLFSDLIE

SEQ ID NO: 81782 - protein, 455 aa, Microcystis aeruginosa PCC 9701
MWVESIKLENIKCFQNQEIKFISNPNNQRHWRAKPYHWITLLGENGVGKSTILQALALLLAGPEAAKELLPRPTGWICNPKTPGKLTAVLHQEDGDAGKFGTDKTRKTFAYSYFVTGKERLELGGSKDKQTYTEPALIEENTKILSWLRANAFASDNHGWFAVGYGAFRRLTRVSQVIIPSLEPPKRSSNFFSQFNEDTSLSSFERWMVYLDYRIAKNPTDIQAKQMKKIGEEAITKLLPGNVEIAEVTADGLIQFLVNGQKVPTISLSDGFRSMIALAGDLIWRLLQSFPNLDNPTEASGVVLIDELDIHLHPSWQREIAGWLQEVFPNLQFFVATHSPLIAAGAGEKSLTLRIDLVAGESEIVEIPYLELAANVDRTLTSAAFGLKSTFPTETENKIKRYHQLNRKNKNLAAEEKQEYEQLSLFVQDVKPFGEISQPNSLESRIDALLEERLS

SEQ ID NO: 81783 - protein, 229 aa, Microcystis aeruginosa PCC 9701
MIPVTRISEPPVLAKNAARWLEALESIKSNNKATKAQINQAQNKYSHPQVKDALVKMFNGKCAYCESKITVVTYGAIEHFYPKSQYPDLTFTWENLLLSCDKCNDANHKGTNFPLDDITGNPLLIDPTDGVTDPNTHLEFVWDEMAKLASVYGRDRRGQIVEDLFDLNGMRGRKELINYRSQYIKRLLALLRFAKQGDSEALSLLQEACQSGAEYYAFASIYILPHLPP

SEQ ID NO: 81784 - protein, 420 aa, Anabaena sp. 90
MLKELHLQSVGPSPQFDVEFADRVNIFTGDNGLGKSFLLDVAWWVLTGNWVEQPVYPQRNTEKPPEIISQIITLDDDEGKNYSFKFNFSKQKWQDLRVPFHSVPLLKGIIIFVRVDGSFSIFDPARNDEDAYNFTPDTLWNGLKLKGKVICNGLIQDWVTWQNQPQKTPFQLLSDVIKQLAPHPDEWIEIGEPTRVSVDDVRDIPTINLSYGNIPITQASAGMKRILGLAYLLVWTWYEHQKASELKQQEPMNQIVLLIDEIESHLHPRWQRAILPSILSVVNQLKSNITIQALVTTHSPLVLASLEPIFDEEQDKLFLFELQGKEVELNEILWTKQGDTVGWLTSEIFGLKQARSQESETAIEAAEAWMRNDNMNTFPEHLRTQSEIHQQLQRLLPGHDPFWPRWIVTAERRNQKSSDS

SEQ ID NO: 81785 - protein, 194 aa, Anabaena sp. 90
MLKFNPPAEPENFDLKARQPGNNWLEKNTDPKRKLRDYWSNFKSDLADGFSNLCGYSAMYEPVGTVDHFLSCDNHRHLAYEWSNYRFASGWINSSKGTLDQQVLDPFEVENDWFEILLPSLQLIITDKVPLHERQKAEFTLQKLHLRDDERVLRQRQAWYQMYIDGDLTLTGLEKKAPLIARAVRKQQANSQLE

SEQ ID NO: 81786 - protein, 426 aa, Microcystis aeruginosa PCC 9806
MRIKSIKLINYRGVVSLNIDFHRQLNVFIGVNGAGKSTILDSLAIMLSWLVNRLKNTNASGRKISETEINNGQWMAIIEITGVTEDSQEITWKIVKTRTGYIHAGEGSNFSQLNEYTQQIQRQITEHQGQINLPLFVYYSVNRAVLDIPLKIKTKHQFDSRSAYENALTSGSDFRTFFEWFREREDLENENRKYQDYLIKPEGFCFPDPQLEAVRETIERFLPDFSNLSVRRNPLRMEVTKKNKIVTVNQLSDGEKCLIAMLGDLARRMAIANPKNPDPLTGAGVIIIDEIDLHLHPQWQRFVVPKLLEVFPNCQFFISTHSPNIITHVQPESLHFMEQTEMGIKIDPVQESYGKNVDRILEDLMGLETTRPKEIAEALKDIYEQISQNQLEAAKKKINDLRAKIQDDPELIKAEVIIRRKEIIGK

SEQ ID NO: 81787 - protein, 210 aa, Microcystis aeruginosa PCC 9806
MKYIRKRQEPPEFKNWKEQANSDWHPDFKNLAGKPKEILIKALMTEQGEICCYCESRLIDGKWHIEHFKPQSDPSVDPLDYANLLCSCQANLKSGEPRHCGNLKDNWFDENLLISPLNPDCESHFAFNYDGTIKPAQEDDQKAINTIEKLGLNLNKINDFRQKAIEPFLDEEIDNAQLKVFVNGYLCLDDQQRYKPFWTTIKYLFSDLIE

SEQ ID NO: 81788 - protein, 469 aa, Citrobacter sp. L17; identical to SEQ ID NO: 81634

SEQ ID NO: 81789 - protein, 197 aa, Citrobacter sp. L17; identical to SEQ ID NO: 81635

SEQ ID NO: 81790 - protein, 359 aa, Acinetobacter sp. WC-487
MHWNNAIYEKNYIYRGGKIKVNSQKDYLKNKFDQLGASLINFFLRSDRTQDKTSILLEAINLDEKINMYFSFPWPFSPSEIINNKNPKPIADSLNSIRFFKDKGDRIILSQDEEIALIENLKFVLNYYKFNEHNRTEIFDLELNLSNRSKDENTNLLNSLSFLANYDLIELRDIKFSKNNRSFYLTDSSSGELSLIFNLLSIAGEIENDSLILIDEPEISLHPEWQSNFLPLLSKMFSNYQRCHFIIATHSPQILSSTNDKNIFIINLEDSNKLIRSEEISKMSADYQLAYVFKEPGYKNEYLTRIALTTFTNVNKKKLFSEDDLNSLSLLLENMSHLDQNDPLHQLILSLKEMRNLYA

SEQ ID NO: 81791 - protein, 223 aa, Acinetobacter sp. WC-487
MPDIKKQISFSIQIRNFLKKKSKDPDFKYTDWSESDLEEVRKIIRNFYRDEQNGKCSYCRKDISLQSASNCHVEHILPKSKYLKFIFEPKNLCVICADCNEIKREKETFDYSNEILKNTDIKLYPRSSSSFLIVHPHFDNYNDHIKILNGGNYIDLSPKGNRTIGVCKLNKILHKFGWPDEPSTLEEILTTAKKLFENDDPLTQIRVIKQLGVQINSNSDILT

SEQ ID NO: 81792 - protein, 784 aa, Glaciecola pallidula DSM 14239 = ACAM 615
MTNSNNAHEFNSGKILQKLRELQGLSIPELAKVLDINSTDLMKWESDKIPSHKIQACSMYFEVPVSLFNTIFNNKATLNNIVESHLYAQPNDKIQQILKENSISREPQLNLSGLALNRIPPEVFEFSWLQYLDLSNNNIKRLLPSELFQLPQLKTLNISANLITYLPGILIHLDRLTMLDFRDNPMSLQPNLLQSAMNFDAFKNFVYSRNMTLVIFEPTTGIGHTRYDALSAEIEKKQPLLLTTADEAEAQLSLYKEHINSILYLTPSSQPKISAEQLKTLLQPYNCHMIIYTHESNFKEQYDAIRRELILSLPSHTGLIYQTNTLAEFIKLFADIQRGLTMNKPSIEIKFEKLILENIGAYEHLTILLNPKLTVLIGLNGAGKTTILRALALATLGPEHAGVDDSTAADLLRITGNSNALTQWEPKGLIKLEAKVNGKSYTNTINILYNSDTEKVEIKGQRFSSLFDSEGYLINLIIGISEQRNTNLKLSGYSPHDKIRPKVKDLLPLINGEEQACIAQFSSWLSKQAFDISQGDESKQVLIDIIFAVFSALTQEDIKFAGLTDVEPPELWIEHQDPKQRIPLRLASQGYQAVMGWIGFILKRMFEAYEYYQQPLLQSSIIIIDEIDQLLHVKWQQKIINVLANQFFPNCQWIITTHSPMVVNGLDQDQVLTLQQRGGVLTVEACPSDLWLWQYGDVVNYLFNVPQEQPKQQEQQLLQDIAALNDIEISIRTEEQQQELNKLELRLEKTQKSLAFVNELYSEQQRLHEREQELAALIEKLTQK

SEQ ID NO: 81793 - protein, 268 aa, Glaciecola pallidula DSM 14239 = ACAM 615
MHYIKRSELPELLENSTESWTQPWIDYYRWIKSDDPKNVHPVKPTDGHWRKDDIRLKLINDFHNNCGYCGNALPTPSLFADIVDELNEEGERVFASKGDVDHFLPKAIYPEKVYDWINYIWSCKPCNQLKLEFEDIKYPLLNPCEKSDCQQLIYLESSGQYGLKNVMRNNKYWQKRFKNSQIKTLMNAIETGQERALKISVLRQCFESIVVGLTMLKKLQLPEIEKHIDKDVRLIKKTIVSPNFHYLLQEYYQLLQDDYPQVVPLLNE

SEQ ID NO: 81794 - protein, 479 aa, Acinetobacter sp. WC-136
MKYINTILLKNIKIPLNGRNLVLTGKNGVGKTYFLTKLYEQLQFEFRDKYISTDDQFHSSKIYDTVNIFYNEFIAYSDILEINSKYVNSISSLASEKNKKNSNKIKELKELQHIYNEHLKIFLQEVNIFTNSNDSNFKNKSKNYYSTKPEHLIRSNDLLKKALDELTSFQKFFKINFNERETNNSTIFSFFDVNSRLQVPEKYIHMGNMYDVKDLTYYLEELKLNFDSDIEGALERYLLEKREELRNSEDNICEEIYKIFSDIDNDLKLIFDDETTVLSFDDFNNRVLIIQKNENISFGFDELPSGFKSIFKIYSNLLIKSKLIKTRKNKLNGIVLIDEIDSHLHISLQQKVLPFFTKAFPNLQFIVSTHSPFVITSTNDNTVVFDLSNNEFFEDNLSHYSHESIIKELFHVKEENENIKILSDQLLQFIESRNLTQDLNAIQELLNEINKDFEKLSVELQLQYMIAKNKLTKLKHEAK

SEQ ID NO: 81795 - protein, 223 aa, Acinetobacter sp. WC-136; identical to SEQ ID NO: 81177

SEQ ID NO: 81796 - protein, 507 aa, Acinetobacter sp. WC-136
MRIRSISFDDKKYELSDSSVSSEENTFTVLVGRNGSGKSRILQRICNIYINSLGIDGRHILNTPINLNAYNDINNTSSLNYGKITYEQNKNTYEISSRQLNGLYNFHISQFIIEKKIKTSECNIFCDINKIIAVSTSPFDKFPVIERHMHWNSNIYEKKYIYRGGKIKVNSQKDYLKNKFDQLGASLINFFLRSDRTKDKISILLEAMNLDEKINMYFSFPWPFSPSEIINTPNPKSISDSLSSIRFFKDKGERVTLSQDEEKALTENLKLVLNHYQFKEHHRRENFELELNLLNRSKDENIELLNSLSSLANYDLIELIDIKFSKNNKSFYLTDSSSGELSLIFNLLSIAGEIENNSLILIDEPEISLHPEWQSNFLPLLSKMFSNYQGCHFIIATHSPQILSSTNDKNVYIINLEYSNKLIRSEEISKMSADYQLAYVFKEPGYKNEYLTRIALTTFTNVNKKKIFSEDDINSLELLLENMSHLDKSDPLHQLILSLKEMRDLYV

SEQ ID NO: 81797 - protein, 223 aa, Acinetobacter sp. WC-136
MSDIKRQISFSARISNILKQKTKDPCFKYTDWSGNDLEEVRKTIRNFYRKEQNGKCSYCRKDLSLQSASNCHVEHILPKSKYLKFIFEPKNLCVICADCNEIKREKETVDYSNEILKKTDIKLYPRASNSFLIVHPHFDNYDDHIKILCGGHYIDMSPKGHRTIGVCRLNRFLHEFGWPDEPSTLDEILTTAKKLFENDDPLTQTRVIKQLGVQINSNSDIFT

SEQ ID NO: 81798 - protein, 466 aa, Leptolyngbya sp. PCC 7375
MTQRMKILGLRIKNYRQFKDFYLDFTEPNTDQALAQVCLIGANGTGKSSLLNLISSFLQNSQSVWLEKKGPKLKQFVSQLSAIAIRIQLNSQKFWILKHHFNDPVILPDTLTDQEQWLSFWNASTDLELTSAKNQIYRFRISDQEQLFDQIRLKANSSDLAIYATPDGRSHLPTGLPKTSLDKALVFFNDFKAFHISSYDQVEDFWNIIIYQIKKRERDELLFFSDKEVQNLTVLDAKEKFDSNHPEILTELAKQWDLILGKAGLAFDIDHAVIPVQTTENLQAYVKSIRSGHQISYNALSTGIRNFIFRIGHIYSLYFNREIQRGFLLLDEPEASLFPDLLYDIIERYQSIIQNTQFFVATQSPIIAAQFKPEERIILEFDDDHYVTCRRGISPEGDDPNDLLVNDFVVRSLYGKEGLKQWNRYLELRRTIPTIENPQEKRERLAEYARIGNTYNFAEHEISGET

SEQ ID NO: 81799 - protein, 201 aa, Leptolyngbya sp. PCC 7375
MRYLGKRKDSKVIQAAWRYEITKHRPQIRNELLNEQKGFCAYSERYVDPMDACDIEHFDPRKKGTTADDYWNWYAVHHSVNMSKPRKIEHYLPMLCPYSDDVSQRIHYIYGQFEPIDPADQEAKNLIDFLGLNHPNVAESRARHIQRTKSDRERFFKDDLPGFIEHLKAEITNLSYITALEAEFGISLTIPYTKSEFIKPD

SEQ ID NO: 81800 - protein, 544 aa, Cyanobium gracile PCC 6307
MRIDWLWIDEYKNLRDLTINFSQDHLITVLIGRNGTGKSNVLEALTVIFRDLLTNEKIPTIKYRIAYEIRDRWMFIDADPHRKVSYKAKTIRKSDQQKPYPVGASFDDLGGAPISRSKLVGEKSEHLPQFLFGYYSGENKRIKPLFYPYLRGYDFKLRGGINPGPKRMFFAEPVHSNFVLLTFIVNNKRQTEDFLQKRLGLEEGGIESVLFVLKQPYWYKKNAADGDKRFWNSRGIVRDFLARLYELSLAPIRIRRREVYSLGRSRTLEYLYLFLKDIDALKELSKEKTFAEFFRDLESTHVSDLIDEVRIRIKLKKNDGSVTFRELSEGEQQLLTVLGLLQFTSAEESLFLLDEPDTHLNPRWSVEYLQDIRDFLADANDINQTSHVLLATHNPIAVAELVKEQVQILKRDSESQVITAVPPDIHPRGMGYAGVMTSDMFDLSAALDTYTQALLQNKRSISSKQVLSDDDKQELKKLTEELETYGFRYQVRDPAIRDQLMAGMNRSAALSTYSSSDLLDSEEEKADRLIKKALGDLPGSDRDA

SEQ ID NO: 81801 - protein, 260 aa, Cyanobium gracile PCC 6307
MREIKLDSIALPSGWTLRAHTAIGAGHANIHKHSGVWQECKKPLQSLSYDKCYYCETVQERSDNAVDHFRPKSLYPWSAFRWENYRFACTYCNSRRRDIENNRIGGKGDDFPLLDETKRATCLAEEVDECPLLLDPCQPDEPGLIDFDESGQPSPTYSNDESETRHLRAAISIRLYHLDHQDLVDRRMVLATKLVRIIHAAEKLFPYTETGMPAIDVSFEEHLRSLAEAINPEAELSSFSRRILDGYRYNKWIPGLLRTV

SEQ ID NO: 81802 - protein, 418 aa, Rivularia sp. PCC 7116
MKIKRIEMQSFRGIGDMALEFQEDEPNVIIGINGVGKSSILECIAILLSRYTKPVQFPTTSGRLFQEEDISTGSEETRNEITVETDEGEVTWCLSKQRKKRSKTVGSDLSELRKLIDETHEQLKNDSEFNLPVIVHYGVNRAVLEIPLRGRKKNSNERASAYEQSLDSVQINFNSFFQWFRKLEDLENEQRLDDSNFVNHQLEAVRQAIYSLITGLSNLRIRRSPLRMTVKKQDRELNVNQLSDGEKCLLAMVGDLARRLAIANPGLEDPLLGDGIVLIDEIELHLHPRWQRDIIPALKKTFPNCQFIVTTHSPQVISHVRAEGVFILERDEEQGLIIMSPEGSYGRDSNSILEDLMEVPERPQKIKDSLQELFRFIDDGNLEGAKELREELASEIGDDEPEFVRADVLIRRKEILNK

SEQ ID NO: 81803 - protein, 213 aa, Rivularia sp. PCC 7116
MKYIEKGPQPKSLAAYNKKVSANTKWKSFNRSVKNDTYDSILHEQGYICCYCGIKISRRKCHIEHYRPKSKYTHLTFDYSNLISSCQGEDEQRPTKPVHCGHKKGGWFDEELMISPLDPNCSSYFRYTGAGEILPTEDPEHQEAAETTIKMLALDINKLKKMRRKAVEGVIQATQGLSEKEVKQLAEAYLERDGSESYAPFWATIDYVMRQFY

SEQ ID NO: 81804 - protein, 402 aa, Oscillatoria acuminata PCC 6304
MQINQLTLTNFRGFEQAEFEFHPGMNLIVGINGVGKSSVLDALRIAFSRILPKLTACQERKINFNTDDIMIGKDKLTVEMNVDISGIPFRCKFSRGKSHEQELKPNGDQILEPLKQAQNQPLIVYCATRRSIVTEQDLNPNRSSGNQSAAFVDALIPRMLRLREFINWWLVQEENLDEKPQLKRHINAFNDAVTHFLDWCNNVRAIPASNTYKKPTLLLDKNGVTLNINQLSDGERGIIALILDLVQRLLQANPDLENPLKDGKAIVLIDELDLHLHPLWQRLVVHKLTEIFPNCQFIATTHSPQMIGEVEPENIIILDRDKQPYIPDQSLGMDSNWILRFLMETPERDINTQKTLEKIESLIKQRNFPEATEQINSLRELGNFPELVRLQTRIDRIRLLGK

SEQ ID NO: 81805 - protein, 248 aa, Oscillatoria acuminata PCC 6304
MKYIKKEQEPEKLRSWFNNQYDEEGNRLGCDYYDDVPSDVKREVKEHLLKEQGFLCCYTGILIDTENSHIEHLKPYSICRNEKNYEDVNYFNLVTAYPGRNYKSQDDENDEDDEDDELNQPSKNSKKNNKKCPFGAHAKENWYELDNFVTPLQSDCEDRFKFDDFGKVQATNHQDTAAQITIQKLVLNHQRLIDLRKAAIDEAIFPTDIELDASDIQKIANGLYSQKDEEGKFRQFCLVIEQVARQLI

SEQ ID NO: 81806 - protein, 448 aa, Oscillatoria acuminata PCC 6304
MRIDKLIIHNFKKFSEYSLELHPKFTLLIGDNGTGKTSLLDALAIAAGVWLVNPPDSTLSNSKRNILPNEIRLKPIKHAGITRFFECKPVIIQAIGMIHEDYSYYNHWCRQIKINGSRTSNTEAKRVIDSISILFKRDQFGEMIWFPVIGYYGAGRTWLPSNVSRKTAKLEQGINRRWEAFYDCFEERIRLADLQTWFQKEAIAALQRSGKMRPSYDVVKWAILRCIPGADDLWFDGDRAEIVISLEHQPIPFSNLSAGQKMMVALIADIAIKVVNQNTKFLPEVIDPNPEIIPPILQQTPGLVLIDEIDVHLHPKWQRRIVNDLKTTFPSIQFVCTTHSPQVIGQIEPECLRILYEDNTGKICTITPKQGLGMDSSWILQNLMGASARDIKIEQDLEQIFDTINDENYSQARELIQTLKQKVGDFPELQEATSFLDRLELLKDYETD

SEQ ID NO: 81807 - protein, 226 aa, Oscillatoria acuminata PCC 6304
MKRIRKTHPPREFLEWLKENEGLDCSYAALQGKEAHIVLKNHLLREQGFICAYTGVSISEEESHIEHIKPQSVCRTVPNPGKTYLEDVEYRNMVACFPQDGGDVSHGYGAPIKGGWWNEEQFVSPCQEDCERRFIYGWRGKISPSQENDTAANTTIDILELNAKSLKDRRYRAIVGFFGFSSKYKTKELGQREAKALLTIIGKPNSGGKLQEFCFVFEQLSPKYIK

SEQ ID NO: 81808 - protein, 417 aa, Oscillatoria nigro-viridis PCC 7112
MKVNRLKMNSFRGISDLTLEFDTDEPTVFIGINGVGKSSILECLAILLSWLTKRIQTPNSNGRSFNEDDIKNGCKETHNEITISINDWELVWSLTKVRKGRSQDTSSNLVGLKGVVDNIHSQLDANSYAALPLAVYYPTNRAVLDIPLKIRTKHSFEQITAYDEVLTGGRIDFRRFFEWFREREDYENELRLNDSDRYRDRQLEAVRYAFANLLDGFSNLRVRRSPLLRMTVNKQGEELIVNQLSDGEKCLLALAGDLARRLAIANPNPDCNPLEGSGVVLIDEIELHLHPKWQRAIIPNLKKTFPNCQFIITTHSPQVISDLKWVHLLRSTSEGIAIDRVPSFGKDSNRILETLMGTPERPQEIKEDLRELFRLIDKGELGKAREFRQELAHKMGEEDPEFVRADWLIQRKEIINK

SEQ ID NO: 81809 - protein, 211 aa, Oscillatoria nigro-viridis PCC 7112
MKYIQKGKEPQNFSDWKATQMSLGVNYDYKSLSNPEKKAVHISLLSEQGYICCYCCKRVEQSNSHIEHLHPQSKTDLELSVDYTNMLASCGRDPDWPEYCGNKKKNLAIGVSPLQTNCEEFFDYSSTGEILPTANNLAHQKDAQRTIEVLGLNHYDLMQGRIQALEALQGIMTQEEAELLAQVCQQMNAQGRYQPFCNAVLYYLKNYFGVS

SEQ ID NO: 81810 - protein, 407 aa, Oscillatoria nigro-viridis PCC 7112
MLKELHLKQVGTAPQFDVEFADRINLFTGDNGLGKTFLLDVAWWVLTGKWADSPAWPQQGQGNSPEITSLLSNQKKSDKYRSLFSFSEQKWLDIGKYSSFKGLIIYVRVDGFSVLDPARNRLAAYHFNYDSLWNGLINSEGKFICNGLIHDWVNWQRQPDRSQFQLLSRVIKQLSPDADEWMEPGEPIRVSVEDVREIPTLNFPYGNVPIIYASAGIKRILGLAYLLVWTWYEHTMASKLRQQEPLDQIIILIDEVEAHLHPQWQRSILPAILEVATNLENEMKLQLIATTHSPLLLASIEPQFDEEQDKLFLFELQGKNVTLNEVPWTKHGDAVGWLTSDIFGLKQARSREAEIAIEAAYTFMRGESMETFPEYLRTKEQIHQELLRVLPEHDRFWPRWIVSTEVE

SEQ ID NO: 81811 - protein, 191 aa, Oscillatoria nigro-viridis PCC 7112
MMRFTPPPEPADFDRQVRKAGNNWLVKHPGKEPKDFWSSFKPQLAKEFQNLCGYSVMYIPSRMGTVDHYLSKSKAENRHLIYDWKNYRYALQRVNSCKGTYDRQILDPFEVEDNWFEIILPSCQLILTDAIPSHERDRAEFTLKKLQLQNSEWVIEQRQEWYRMYLENELNLEGLEKKAPLIARAVKKQLN

SEQ ID NO: 81812 - protein, 372 aa, Microcoleus sp. PCC 7113
MIHSLCLKNFKPFESEFLEFRALNLLSGLNSTGKSSVLQALLLLRQSYQQGLLPKIGLALNGEWVHIGTAQDAFCERAKENYVGFEIVWKDNNKGIWRFNYDSKKKEADVLNLALEPTDSEVYQSSLFSKKFHYLQAERIGPRPFNDISDYQVQRLGQLGTRGEYTAHFLSLNEDKDIPNNQLSHPMAKSNDLSNQVEAWMREVSPGTRIKINSNPDMGLINLQYFYGDSNPYRATNVGFGISYTLPIIVAALASPPSTLILIENPEAHLHPKGQAKMGELLALAASCGVQVVIETHSDHVLNGIRLAVHDGKLNPKDVQLHYFQRQEKQGQAFTEVVSPHIDRNGRIDQWPEGFFDEWDKSLEALLEPAGE

SEQ ID NO: 81813 - protein, 135 aa, Microcoleus sp. PCC 7113
MTYISESLRRLVQERSGYCCEYCQISADVTFYAHEVDHVIALKHGGETIAENLAYACWRCNRYKGTDLGSFDPQTNQFSFLYNPRTQQWSEHFSLRDDEISGLTPEGRTTVQLLGLNSVERRAERRRAEELKETE

SEQ ID NO: 81814 - protein, 421 aa, Microcoleus sp. PCC 7113
MQLNRLTLTQFRAFEQADFDFHPGMNLIVGINGVGKSSVLDALRIMLSQVLPKFTASKSKPLDFETTDITVGRGALTAELEFNAAEIDFQYLVHKPRQDYVIDISREGEVRDQTYNLVERQDLTPDEKEIPKSLKTRREQPLVVYFSTRRSLYSMAAPSKQFTAGGQAVAFADALKGDRELRPREFAEWWLVQEVLIQEGKTEAQRYFDTFESLVRYFLENCSNLRAVREPQVTLMLNKAGVSFDVRQLSDGERGILALVLDLARRLSWANPKLDDPLQKGKAIVLIDELDLHLHPRWQRSIVEKLTRTFQSCQFIATTHSPQIIGEVSPENILILENGELPYQPEQSLGMDSNWVLSYLMEASERDIETKQKLKRIADLIEDEEYDRATDAIDDLRVEVGEFPELVRLQTRIDRIRLLGD

SEQ ID NO: 81815 - protein, 239 aa, Microcoleus sp. PCC 7113
MKYIRKGSGPRELRQWFRTLPLNENGKPINCRYDDDIYQDLKEKIIKALLEEQGYLCCYTGIRISEENTHIEHLKPQSISQQDENDHDDVMYSNMLAAYPKGDCQFGAQARGDWYELDFFIHPLDGSCETKFHFDMEGGIKPVSQTDLAAKKTIAHLKLAHPLLVDLRKQAIDELLFPEDEVLSEAKLRRIVENGYSIRDKKGRYPHFCFIIEQVARQLLHKVEQDRKRRQAIHKQKRK

SEQ ID NO: 81816 - protein, 459 aa, Microcoleus sp. PCC 7113
MHINKLHIQNFRCLKRIDFNFTPDNIVVIIGINGAGKSSVLDCIASLLIQLETRIIKIEPFEYSEIDSININQKINSFLTVDDINDNAKQVDVSIEISTDFNDSISWKVTRSLIEKGLEGDYNQLNHYIEYLRRKLESNSNFNLPLMIYYRTRRITLDSKSRIILDTKSIDLDNLDSKVYPFKINQLSAYSGSFNPEVNNFQRFFTWFRQEEDYENEIRLREDDKYRNPNLEVIRKALERFLEGFPSSHFSNLRVVRSTSQRNLNFNHSRIPSFLTITKNNQDFKLEQLSEGEKMLLMLVTDLARRLSIANPGLGVEALHGKGIVLIDEIDLHLHPQWQRMVIPSLTQTFPNCQFIVTTHSPQVLSNVKRENVFILEDYKLVEVTPYTYGRDSNSILYELMDVSARPKEVQDKINACFDLINEEKLEEAKSKLQELADLLGEYDSEIVRAKTLINFLTE

SEQ ID NO: 81817 - protein, 216 aa, Microcoleus sp. PCC 7113
MKHIVKGKEPQSLLEHRLKSHADYNNYSEKDDLRQSLLTEQGYICCYCMERIAKNKMKIEHWRSQSIYHNLQLDYQNLLGACQGNQGQPQHLQHCDTRKGEIEITINPTDASRRCENLIKYRGNGQIYSDDVTINRELNEVLNLNLETLTKNRKAVLDAVILGLQKKYPSKSWTVAILSKEIARYSNINEKSQYEPYCQFIIFWLNKRLSVESKKK

SEQ ID NO: 81818 - protein, 416 aa, Microcoleus sp. PCC 7113
MLKELHLKQVGPAPKFDVDFADRLNIFTGDNGLGKTFLLDVVWYSLTGTWIDNPVFPQLTEETPTIYCSFINQKTGGSTTFDSHFDFEKQKWIGRTLPPLLGSLVIYVRVDGGFSVFDPARSLSTAAPLIAYQFSHYTLWNGLRSEGGQVLCNGLIQDWVKWQNQPDRTTFQLLSRVIRQLSPHPNEWMEPGEPMRVSVEDVRDIPTIQMPYGTVPVIQASAGMKRILGLAYLLVWTWYEHLQASKLRKRQPLDQIILLMDEVESHLHPQWQRSIMPAVLEVATGLQKQMKIQAFATTHSPLVLASLEPIFNEESDRLFLFELQEEEVTLNEFPWTKQGDTVGWLTSEIFGLKQARSKEAEIAIEAAEAWMRHDNMNTFPEHLRNQPQIQQQLERLLPGHDPFWPRWIVTVEKRRA

SEQ ID NO: 81819 - protein, 200 aa, Microcoleus sp. PCC 7113
MMRFNPPPEPPEFDQKARQPGNTWLAKNPGKRPKDLWSPFTSQLADGFQSLCGYSAMYQPTGTVDHYLSCKNYPEQAYEWSNYRFASGWINSSKRTVDDQVLDPFEVEDDWFEILLPSLQLMLTDAVPPQERERAEFTLHRLHLQDDERVIRQRQQWYQLYLDGDLTLEGLEKKAPLIARAVRKQQQNSSANESSPHTPP

SEQ ID NO: 81820 - protein, 414 aa, Cylindrospermum stagnale PCC 7417
MLKELHLTSIGTAPQFDVEFSDRINIFTGDNGLGKSFLLEVAWWVLTGNWVDQPAYPRKLTEEHPEIISKIHTKYGVRDYESGFNFSAQQWLSRHLLPELNEVVIFVRVDGGFSIFDPARNHKDAYSFTPNTLWNGLKLKGKVLCNGLIHDWVTWQNRPHKMPFQLLSDVIKRLAPHPDEWIEIGEPTRVSVDDVRDIPTINLPYGNIPITQASAGMKRILGLAYLLVWTWYEHEKACELRKQEPMNQIVLLIDEIESHLHPRWQRVILPSILSVVNELKPNMPIQALVTTHSPLVLASLEPIFDEEQDKLFLFELQEKEVALNEVNWTKQGDTVGWLTSEIFGLKQARSQEAETAIEAAEAWMRDDDMNGFPEYLRTQSQIHQELAKLLPGHDQFWPRWIVTSEKRNSRLFGA

SEQ ID NO: 81821 - protein, 195 aa, Cylindrospermum stagnale PCC 7417
MLNLNPPPEPPDFDAKARQLGNSWLAKNPDTKKRPKEYWSVFKSYLADGFGNLCGYSAMYEPVGTVDHFLSCENYRHLTYEWSNYRFASAWINSSKGTLDDKVCDPFQVGDDWFEILLPSLQLVLTDAVPAEEHQKAEFTLQRLHLRDDERVIRQRQAWYQMYLDGEITLIGLEKKAPLIARAIRKQQQETSLPE

SEQ ID NO: 81822 - protein, 428 aa, Dactylococcopsis salina PCC 8305
MYIKTLTLTNYRGVKSLSLDVDKQLNVFVGVNGAGKSTVLDAMVMMLSCVVSRIGEVIGKQSEDRQIVEDDIRNEADFTLIALCCIDKNRTFQWRIATSRRGDISLEQPTDLTQLETYTEQLKREIIDHQESINIPLFVYYPVNRAVLDIPLKIKTKHRFDLLNAYDESLTSGANFRKFFEWFREREDLENEKVAETREKPLFHNQIPYDPQLQAVRKALNQFLPNFKNLRVRRNPLRMEIEKDGEILTVNQLSDGEKCLIAMVSDLARRCAIANPERPDPLQGEGVVLIDEIDLHLHPKWQRMIVPQLLEVFPNCQFFISTHSPHVLTHVQSEQIFLLKQTEDGIEWSQPDESYGKNVDRVLEDLMELDTTRPTVVSNSIHNIYEMIDKNNLQEAQDQVSEMRSKIGNDPELLKAEVLIKRKERIGK

SEQ ID NO: 81823 - protein, 209 aa, Dactylococcopsis salina PCC 8305
MKYIQKDSEPQEFTDWKNQENSNWKPSYKEMDKSVKKAVKQALMTEQGYICCYCEDRLNDNDSHIEHFQPKSDPAIDPLDFSNLLCSCQNNLKKREPVHCGKLKGDWFDEKQLISPLDPTCEERFAFTADGSIKPADNRDQVALTTIEKLGLNIPKLRNLRQKAIESFIDPSLSDRELEDFVNSYLEPDNLGQFNPFWTTVRYLFGIRE

SEQ ID NO: 81824 - protein, 642 aa, Anabaena cylindrica PCC 7122
MFLSIDQIRESLKYLEKVDSFWGITFLKFKQLQLPVDNTIKISLYSEIQDFLEKNYKPCKESAFSYRCFRLSKNQKRWMELDRYAKFIIQDIRKKTFIEALIDKVFEKEWGWKDNYIEILKSCLSQYDNQVISIFHLAVWIYREKEWTSETTAESIIENLKNVFLLNEQEINQLFDIAIPENINVNQLFQDKVVSWEELKTVIGKPPDVLPEEGTLTYLEIQGVGAASKLCFEPAEQLNLITGDNGLGKTFLLECAWWALTGQWANLPAYPMQTISEDEPKIIFEISGDSESDKESISYDWQLQRWNEIKNRSTIPGLVIYARVDGSFAVWDTAKQYLSFSSRVQDIKKVPLPFVFTKDELWNGQKDENGNTFINGLLQDWIQWQSRPDKYPFNTLVKVLERLSPPSEGDLGILKPGEPVRLPYDAREIPTIEHPYGTVPIIHASAGVQRIITMAYLIVWAWEEHKIQSKLIRIEPQKRMVILVDELEAHLHPQWQRAILPALLDVRDDLAADLQVQIMVATHSPLVMASVEPRFDEKIDKLFSLELVKSDLLGNEVQIEELPFIRQGVVDSWLMSDVFKLRQPRSLEAEKTLNAAKSLQFSDNPDSESVAKVSEELKRYLAEDDEFWPRWVYFAERHGVEL

SEQ ID NO: 81825 - protein, 208 aa, Anabaena cylindrica PCC 7122
MIPVQFQRKPDDFDKKVRNPGLTFLSKVPNPKTEDWKKGAYWQESLDDLCKVYGRICAYSAQWMPRTEGTPTVDHFVPKSAKPEWAYEWDNFRLACLKLNARKRNFLDVIDPCSLQEDCFILDFPSLFIQPNPNILDPLQNRLVTTIKRLKLNEDDNCVKGRLDWLLPYCQKDYPFEYLKSKAPFIAYELERQGLVEVEKIAYIMGVR

SEQ ID NO: 81826 - protein, 446 aa, Anabaena cylindrica PCC 7122
MRVKQLKMQSFRGIGDLTLDFDEKEPTVLVGINGVGKSSILDCLAILLSQMMMRIISPEIGGFGIPFPFIPSTHIGPRENARAIPGNPDIKLRSFGEQDIKNGSNETYQEIGILLESKLLNWSIKKNKISGSEDSKYKQLNTFTENLYLKWVENPRFNLPLAVYYSVKRSVVDIDLEIIDISSFKQIDAYDQALNGIKISFERFFQWFRSIEDLESEMLRDNRDYKDKQLEAVKRAISLLIPEFYNLRVRRYPTLRMTLQKNGEELIINQLSDGEKCLLAMVGDLARRLAIANPGLEDPLQGYGVVLIDEIELHLHPKWQRMIIPSLTRTFPNCQFIVTTHSPQVISEVKPEGIYVLKKTDNGIIAVHPQSSYGRDSNQILEDVMDDFKRQKELQDSLHYLFQLIEKGNLDGARQLSQQIADIIGEDEPELVKARVSIKRKEILKR

SEQ ID NO: 81827 - protein, 213 aa, Anabaena cylindrica PCC 7122
MKYINKNEEPKSFTAWKKLENDDWKPTWGNFSKPQKTDVHNSLLQEQGHICCYCGRLINIDNSHIEHLQPRGGYGQLSLDYTNLLASCQKDTVPKEPLHCGKKKDKWYDKKLMVSPLDINCAEFFRYTEDGQILSTENPDKALAAQTTINKLDLNIDKLKKMRVGAIEAILEGLEDLTDDEREILLQRFSQSDGNGQNQEFCAAIVYILKQYI

SEQ ID NO: 81828 - protein, 434 aa, Anabaena cylindrica PCC 7122
MKIQQLELQNFRCFEHKIFEFSDQFNVIIGDNGTGKTAFCDAIGLIIAVFIYRLAEIRENTFQDKSRIQDSDIRQVRNQKIEWKLPVGLFCKSIINDVQLQWSTTRINSRINSINQSLNILQFADYLREKVNNSQNINLPLVAYYGTGRLWWKSQNNQALEDNQALEDMRNSPTRQSRFWGYTECLDRRSNLILDWFKFEIRFGEGSVTTHPAILNALSVCQIDNWIEIKYDDREDNLVVRSLDGNSQIFNKLSDGVKNMVAMVADIAYRAAVLNPHLESEAARLTPGIVLIDELDLHLHPKWQRRVVEDLKRTFPNIQFFATTHSEHIIQSLRDGELIDLNNPDLIPADEYENKNIEYITENVMHVPHPYRNERYERMMKTAERYYQMLENANNSSPEELEKLKMELDELIEPYSDDVAYHAFLKMERLARGL

SEQ ID NO: 81829 - protein, 248 aa, Anabaena cylindrica PCC 7122
MRPVIRGKNTKVFKDYKNARGDLINQLGEYCSYCEMRIGSSIAVEHILPKAKEQFPDEETNWENLCLACNNCNSTKKGAMDKRWNSSWKHLHITSAKIAARSEFYWIDQDNTFRCVEYSQGGLVTINPSLGIEEQKVAQATIEMVGLDKTPKPDMQMKDRRWINRKDAWDTAEKYLKILRQYNDKESLKQMQDIIVSHAVDKGFFSVWMTVFKDDPEMLKRFIFAFPGTAIDCFDQEGKAIHRPKARI

SEQ ID NO: 81830 - protein, 408 aa, Capnocytophaga sp. oral taxon 332 str. F0381
MRYIHKIHINKIRHLQNIDIPIENDTYPHLILTGKNGSGKTSVLQAIANHLENIVYNSYNFLDLEQNIKYYEDKLNNGDNGVENERWLASYKEQCAFYFGEVKVDFYNIDDFISKYQKGEFIIAFYQATRKVVINEPLNPTKPTIKEVWNTKEIATIEFLNFLSDLKIQEALARNEKLDSEADIIKTWFVDFEILLKKVFQDEALQLLFNYKDYSFQILTQGKTFKFTEMSDGFAAVLEIIIDLILKMQRKDTLTRAYQQKGIVLIDEVETHLHLELQRLVLPLLTQLFPNIQFIVTTHSPFVLNSIGNAIAFDLEHQELVDDLTEYSYESLAEGYFGVRTSSSYAEMQLDKLKKLLEKETLLSSEKSELKSLINDFDKIPEVVSPLIVGEYLRLKNQYIAVINSLEV

SEQ ID NO: 81831 - protein, 216 aa, Capnocytophaga sp. oral taxon 332 str. F0381
MIKVFKKTTPPESLSAQKKYDSEEVKQQLIADHQGKCYLCERVLTTDFQVEHLHSQEHFPEEKYDWHNLFLSCSYCNGKKSNLFDDILNPAQEPIESLITQELDYLNKKAVFKQVGTSASTEVQQTLSLLERIFNGTHKMRKTKEERFFEDFLSKMNAFQKAINNFLMADNEETRLVLQEELTINREFLGFKYWIIQNNPKLLSEFAQDIIWNKNS

SEQ ID NO: 81832 - protein, 401 aa, Enterococcus faecium EnGen0026
MTKISILGDKMKINNLHITNVGNISDLDLNFNPRMNVICGTNGIGKTTILNSIAACFSVQGNNLKKKYGSEVGSVDISIDSQMTNQTGLSIVVNAVEPLEEYRVRNREEYLYRQLINFSIARSINYRELSSLSKYPNRDYWHSIGITQTGLTDDQLKNWLINRYMASGHWDDLEFYEQENFKLMKKVFSIINPDIQFKKADAKKFEILLNNRGNEVYFEFESAGYKAIVFILLGIISEIEFRMLDNKKPAKEFAGVILIDEVDMHLHPAWQREIVRALKETFPNAQFIITTHSPSVLQDLESDEIIPLEIDEKNNVKIRKLNLSKYGLKGWTLEEILSDVMGVEYINSNLYKKTMAEFENALNNSNSINLKEAYHKLDMMLHPQNPLRQILSIQMVGIEDD

SEQ ID NO: 81833 - protein, 248 aa, Enterococcus faecium EnGen0026
MIKLDRIDPPEKLTSIEIEKLTEEFKKTNKSVWGKEYIKEQLLRMSNNKCAYCEAPLDISGSYMEVEHFFPKSKYPDKVVEWENLLPSCKRCNVKKGNHDPNIEGIINPAYHNPKEHLYLKRYNIIGSDELGSSTVSILGLNDMDTLVLNRFKISEELISKLDSIWDDIQICKVTEVKPSRIKKIRNTMESLLKLIQKNKNYSGTLSAILLNEENYRYIKNYFIENNLWDEEFVALEKSAESICLNIK

SEQ ID NO: 81834 - protein, 476 aa, Pseudomonas putida HB3267
MKLNLLRLKNFRCYADLEISLHSQLTVLVAENGQGKSTLLDAVRIALWPYVSSFDLSSTGYNDPANSIAIGDARLQRMSDGSMSRCLPSSVQMTGDYGGGLCSWLRYRDSEAEKTKTKSDGETRRMEQWVSALQQSIRDPQVGSQTLSVFGYYGTGRLWSEKKLTKAQKAKDETQDTDFYIRTFAYRDCLDPASTYKHFRAWFIWASQSYQEQRLKRLDGRDNQEELQQAELRLQVVRKAIDTFLQPATGWHSLEYSISREKTLVLQHDQHGTLNADQLSDGIRSVLAMIGDIAYRCIKLNPHLGAEAARQTSGVVLIDEVDMHLHPRWQQIILSQLQEAFTRIQFIVTTHSPQVLSTVPAECIRVLVAERDEDSGQQRMAVHPVTQQTQGVASSDVLAEVMGTDPVPDIAAARQLSRYMAFIQQNLEGSDEAQQLRAELNQHFGADHPQMLECQRLSRLQALKRRRPLRPSGAED

SEQ ID NO: 81835 - protein, 213 aa, Pseudomonas putida HB3267
MHRLQRGAAPICLARYRHGRDNWSALDGADRTEIWQTLEAMQSQRCAYCEAAIAEGNRHIEHFVQKGRDPRVTFQWDNLFGSCNREDSCGKYKDHGAGAYNPSDLLKPDIDDPDHYFVFVADGTIQLRVGLNDTDRQRASETLRVFNLDAEHGALRHMRQRESAGYVLIAEELWTLLDEFPEDEWKQLLDDELAATTHLPFVSAIRHTLCRMS

SEQ ID NO: 81836 - protein, 465 aa, Escherichia coli KTE124; identical to SEQ ID NO: 81190

SEQ ID NO: 81837 - protein, 243 aa, Escherichia coli KTE124; identical to SEQ ID NO: 81097

SEQ ID NO: 81838 - protein, 465 aa, Escherichia coli KTE137; identical to SEQ ID NO: 81190

SEQ ID NO: 81839 - protein, 243 aa, Escherichia coli KTE137; identical to SEQ ID NO: 81097

SEQ ID NO: 81840 - protein, 465 aa, Escherichia coli KTE153; identical to SEQ ID NO: 81190

SEQ ID NO: 81841 - protein, 243 aa, Escherichia coli KTE153; identical to SEQ ID NO: 81097

SEQ ID NO: 81842 - protein, 465 aa, Escherichia coli KTE160; identical to SEQ ID NO: 81190

SEQ ID NO: 81843 - protein, 243 aa, Escherichia coli KTE160; identical to SEQ ID NO: 81097

SEQ ID NO: 81844 - protein, 423 aa, Escherichia coli KTE94
MKLRNISLTNFRGIQQADVAIADTPTVIVGVNGAGKTTLLDALAITLSQVTSRIYDSAQRARSFSRDDIFIASDYTRAVVDLELENQSVTFALALNKRAGKHPAERSSYFDVLNAVVQPLTERNKNFLESEPTAISLPLAIYYDVHRTVMEIPLRVREKLKNTPAEGYEDALANGGADFKRFFNWYRNEEDLENQAKRRDHYFTDPKLDAVRRAIETFTHFSDLHIDRKTPLRMIVTKKGMELSVNQLSNGEKCLLALVGDLARRLALVNPLSSNPLLGEAIVLIDEIDLHLHPKWQRDVLKKLTETFPNCQFIVSTHSPQIIGEIPPENVLLVRDGCVLGHPSSARGLSSDEVLELIMEGDSRNPAIKQQIESIEACLNEDDVEEAHQQLAQLEKQIGSTPDVMRLQSSIETLELLLNGDRQ

SEQ ID NO: 81845 - protein, 260 aa, Escherichia coli KTE94
MKSLVRGAEPRELLTWKSDNRLTPENLKYGRAGFPSEVLRCALLQQQHYLCAYTLIRLKKPQECSADYQTRESCHIEHILPQTRGELVEKKRSGDEVKEVVNFTPGEDIDFHNMVACYPPSQHKTHCAFGAQHKGHYDPYDNPLFLSPLTPSVESHFSFFSDGRIEAKTERGQETISALRLDHDELCYRRKSVITGAIYPKGSNRDPISASEARRLAAEVLHPAPDGRLREFCIAIHQVALWHANKLEQRARRMAARRRG

SEQ ID NO: 81846 - protein, 465 aa, Escherichia coli KTE174; identical to SEQ ID NO: 81190

SEQ ID NO: 81847 - protein, 243 aa, Escherichia coli KTE174; identical to SEQ ID NO: 81097

SEQ ID NO: 81848 - protein, 465 aa, Escherichia coli KTE167; identical to SEQ ID NO: 81190

SEQ ID NO: 81849 - protein, 243 aa, Escherichia coli KTE167; identical to SEQ ID NO: 81097

SEQ ID NO: 81850 - protein, 535 aa, Rhodopirellula baltica SWK14
MRLDRVYIDGFKNLKDVNVDFDKDRLTTVLIGQNGAGKSNLIEAIVEVFRSVDLKEKAYVPKFVYDIDYRINGQSIRLSNKDGKPTIFAGESVESLKPLSRKAFDDDKANYFPDLVFGYYSGGSRRLESLFDRHQRKYYDAIKLNDDLDACREALVNRRLFYCRPIHGVFALLAFYAYPAPAVANLLEEKLGITQFDSVLTVFRKPWFAKGAKKNALNDALNLWGAKGPAGWCGRKFRDLALHPLALMDRPIDDYRDKGTDEPQFAAFFRNAGPLKELASQYEDDRDFFAAIEAMDISDLIRDVHLWVDRTNNDTGDVSFNDLSDGERQLLMVLGLIRVSRGRNALFLLDEPDTHLNPHWQLTYLDLVQEWTEVASDESDCHIILTSHNPLTIAALDREEVRVMTQREDGTITAQAPYTHPRGLGFTATLTEIFGLESTLDPATQEDIDTRNSLAAIDKRTKGQEEKLIEINDELNRRGFMFEDREPLYNDFLKSWHDVQYANRPPMTPEQLKTRREAMNDLIKKLIAKKAEGES

SEQ ID NO: 81851 - protein, 288 aa, Rhodopirellula baltica SWK14
MIYVRRDSSIIPAEVLNKAEKAQEELEKICDPAKRKEFIKKKSAIWGAFKACLAKMSYGKCWYSESDDPQSFFDVDHFRPKGEAKRSDKHVDDFGYDWLAFSWENFRYSATKSNRLLTNDETGDVDGKGSWFPLVDGSRKAHWGDRCEKNEKPVLIDPCNNDDVKLLDVDANGRIVPSVFAVGTAVQRVKRSAEIYGLNHPSIVGKRKQLMRELSQLLETLADTLVAAKASGTLDSVADTLPVEKQLKFIESKTKRSSPYALTARSYLTDNGYGRLCVSPEEDCESIK

SEQ ID NO: 81852 - protein, 473 aa, Microcystis aeruginosa TAIHU98
MWPNKLEFYRSLLFSGGMSMWVESIKLENIKCFQNQEIKFISNPNQRRQDAKPYHWITLLGENGVGKSTILQALALLLAGPEAAKELLPRPTGWICNPKTPGKLTAVLHQEDGDAGKFGTDKTRKTFAYSYFVTGKERLELGGSKDKQTYTEPALIEENSKILGWLRANAFASDSHGWFAVGYGAFRRLTRVSQVIIPSLEPPQRSSNFFSQFNEDTSLSSFERWMVYLDYRIAKNPEDSQAKQMKKIGEEAITKLLPGNVEIAEVTADGLIQFLVNGQKVPTISLSDGFRSMIALAGDLIWRLLQSFPNLDNPTEASGVVLIDELDIHLHPSWQREIAGWLQEVFPKLQFFVATHSPLIAAGAGPNSLTLRIDLVAGESEIVEIPYLELAANVDRTLTSAAFGLKSTYPTDTENKIKRYHQLNRKNKNLAAAEKQEYEQLSLFVREVKPFGEISQPNSLESRIDALLEERLS

SEQ ID NO: 81853 - protein, 229 aa, Microcystis aeruginosa TAIHU98
MIPVTRISEPPVLAKNAARWLEALESIKSNNKATKAQINQAQNKYSHPQVKEALVKMFNGKCAYCESKITVVTYGAIEHFYPKSQYPDLTFTWENLLLSCDKCNDANHKGTNFPLDDITGNPLLIDPTDGVTDPNTHLEFVWDEMAKLASVYGRDRRGQIVEDLFDLNGMRGRKELINHRSQYIKKLLALLRYAKQGDSEVLSLLQEACQPGAEYYAFASIYILPHLPP

SEQ ID NO: 81854 - protein, 441 aa, Pseudomonas syringae pv. syringae B64
MWIKEFSIENIKCFEQQTLKLDQENTPYQWITFLSENGCGKSTILQSLGLLLAGPDSIPSLLPRPTGWLRDERMAGKISIRVHQGPMDPGDFGEEKRRRVFAYSYHITGDRAVTIRNKIHTAPGVHENPDRALSWLRQNAFTSKGQGWFCAGYGPFRRLTRSHQIIVPTLEPQARHNNFISQFQEDEALAVFERWMVYLDYRIAKDGHEKDRRTLKYGIEAIDSLLPDDVHFDSISSEGRILYSVNGEKVPTLSLSDGYRSILAFAGDLVWRLLLAFPDSKNPAHEQGVVLIDELDIHLHPLWQRDIALKLRCAFPKLQFIVTTHSPLVAAGAGEDALTVKISKGDKGATFHTVDNLHKLSVDKILTTEAFGLVSAYSPQTNEKMEQYSQLFNKPDKTRADKAALKKLQPQIKDLTGIPSGAQELDQRIDKLLASFIDDQA

SEQ ID NO: 81855 - protein, 221 aa, Pseudomonas syringae pv. syringae B64
MIKLKRPLKPKILTQNETTWTADYIAAKASGDTSAIDAAESKYRHKEIKNALRDMHQRKCAFCESFIEHVSYSHIEHFKPKSRYPKMLVRWSNLLLACGVCNGTAYKGEKFPTAAQDGPLINPANENPDDFLTYVFDPVTNVALIGYKHPRGKTTIDTLGLNRPDLARDIRCQVVKKLFALRKIIDQPNVQDDVRQPMLDILFEAADSGQHYSAFAKALLP

SEQ ID NO: 81856 - protein, 431 aa, Pseudomonas syringae pv. syringae B64
MKFQVEAVNVGGEFVQISSETYNYQNVYTLLVGRNAVGKTRALSKIANAYIFSDRRENSAHDVAESPRSVSQPSQVIAVSNSRFDRFPKPNPYFTRERELKGYHYLGLSGFRSSPTSVISKSIANLISRFEIERDRSVRFDYILDYIGFLPRVILELKINSALSSQRNWNSQAYLEDAIRLTESGSKYDFEKEILPAISFFSNGFKTSRASTVRYDFDTGMWGQDGVGEYMHILPVLIENGLLKVFRIHLYDKKTKDRVQLDHASSGQQCMFLMFLGMSSLIKDGSLICIDEPEISLHPKWQSEFIEILQGAFSNYRGCHFIIATHSPQLVSGLTSENGFVADLETSNLLRPEDYAKKSADYQLSEVFHEPGYKNEYLIRTLLVILSKINKGQPLSRLDRSKLRELEYVRGRLDETDPVLHLLDQVKVMAG

SEQ ID NO: 81857 - protein, 211 aa, Pseudomonas syringae pv. syringae B64
MIKVNYEGAIKDFVDAYDKVDHDLWNGTAGPILAVRKYIRDHYLIQQGYRCAYCKIEKKEEHGYTWDIEHILAKSIYPEFLFYPENLAIACKECNNPKDDHDILVGVRSVSYPRGVGRYKIIHPHFDVYEDHIEIAVVDGRRIYRVLNNGKGKATYTLCNLSRFDYKYAGWDSFDSAMVAEFSRFLDNCPADANPAEIKRMLGHLSFVERH

SEQ ID NO: 81858 - protein, 421 aa, Myxococcus stipitatus DSM 14675
MYLKKVVLENIRSMAELEWEPSSHPGWHVVIGDNGAGKSAFLRAVSLALMGRDAAMALRQDWSEWLRAGSPSGSIQVSLSGDSRWDQAGASVSSEVSAELRLQRAGNATQLVPGAASLAAAPALWGTGRGWFSAAFGPFRRFTDGDAGQEALFSSQPRLARHLSMFDASVALRASLGWLEQLETGPDAGLLEPLLAFINQPDFLPHQTRLDSISSRGVRFVDGQGNEVSVASLGDSFQSLLSLTLELIRQLASTYGARRLFAPGDALSLQPPGVVLVDEIEAHLHPTWQRRVGFWFRKHFPHLQFLVTTHSPLICQAAAEGSIFWLPRPGMDEPPSMVTGITRERLLYGSGVDAYGTGAFGDMSTRSPEALAQLERLALLNQKELEGGLSAEERQEQERLRMRTPTAASVLPSPAVERLLK

SEQ ID NO: 81859 - protein, 269 aa, Myxococcus stipitatus DSM 14675
MIRLPEKPLPAEAREGLVKYQRELDAAGDYAERVAQAKKRFSALNKIGNPIFDHVKVTLSAMCSGVRRCAYCEDSVADEVEHIRPKTLYPEVAFAWANYLYACGVCNPRKNDHFAVFAEGTNVLTDVRRERGAPVEPPIPGRPVFLDPRVEDPTEFMELDLRDTYYFVPRGRAGTEAHRRAQYTITVLQLNQREVLPQSRRAAYWDYLAHLGNYLRAKTQGFSREELDLLVKQVRTRQHPSVWAEMKRQHARLPAVLRLFDQVPEALGW

SEQ ID NO: 81860 - protein, 419 aa, Xenococcus sp. PCC 7305
MKVKQLKINSFRGISELTLDFDLNEPTVFVGINGAGKSSILDCLAILLSWFTARVQNPQGSGSYFSDSDINNKSKETHNKITAYTSNLQDISWSLTKVKKGYKKETNTNLSGIKQLADHIKCHHLANHRAPLPLAVYYPTNRAVLDVPLRIKQKHLFEPINSYDLALTKGKIDFRRFFEWFRNREDLENENYKYHPEQGQDKQLEAVRTAIYQILEGFSNLRVERSPLQMTLEKEGQKLIVNQLSDGEKCLLAMVGDLARRLAIANPYSQDVLKEEAIVLIDEIELHLHPKWQRDIISALKRTFPECQFIVTTHSPQVLSHIKPQNIYLLEKNTEGIIFRKPKSSFGRDSNSILEDIMEVSERPQEIKEDILNLFQLIDEGNLGKAQELRQKIAHKIGSDEPELIKAGTSIRRREILNR

SEQ ID NO: 81861 - protein, 215 aa, Xenococcus sp. PCC 7305
MKYIKKNQPPQDFIQWKNLANEHWQPNWDNFQKPQKSSVHKSLLKEQGLICCYCGRRINQTDSHIEHLKPRNKYPDLTLDYINLIASCQGKSDAIHSIPVHCGHKKGEWYEETLMVSPLDENCTSFFRYTDDGQILATADSDKQTAAEETIKRLALDVNKLKKMREKAIEGILDDIDLLSNQDLNNLIDAFENPSDNGVYEEFCSAIVYVLRQYL

SEQ ID NO: 81862 - protein, 424 aa, Xenococcus sp. PCC 7305
MHIEALELENFRGFNKIFLEKIPKKLVIIVGINGAGKSSILDAISCFLSYIIYCLNPEKNLINVPKLLEDKDINNESLFTKLQIKTNFGYCQIHKKKGTQWQDTTVSENSHADLKKHLVFIQKSWQENSQYNIPLFVYYPVNRKVANISLETPKKDYSRQIDAYSQGRKGLVIDFSGFFQWFRQREDIENEFRLNQDNNYRDKQLETVRNAILQLMPNFTSFRVRRSPPPLSLTLIKNGESLVINQLSDGEKSLIAMIGDLAKRLVIANPSLDDPLEGEGIVLIDEIELHLHPQWQREIIPKLLTIFPNCQFFITTHSPQVLSNVQKESIFILEDFKVLAETPHSYGRDSNSILYDLFNVPNRPQHTQEIIDKMFDLMKNEDKYSLSEAKELLRELEASLGEEDTEIIRAKTHLDFVESFNEID

SEQ ID NO: 81863 - protein, 179 aa, Xenococcus sp. PCC 7305
MKPISQDKMRIEHWTPQSDPLLVQNTQLTLEYSNLLAACQGGEGGFKAQYHCDKSKENDLITIHPQDRINLPFQQGKSSGISCEKLVRFNLGNGKISSDNKVINQELNEILCLNNQNLKEARIIVLKEFQELLNKKYPGEWKKDTLEKWLEVYSSKSNGKYKPYCRVIISFLEERLKKT

SEQ ID NO: 81864 - protein, 450 aa, Pseudanabaena biceps PCC 7429
MKINSLKIKDFRGFRDCEITFPKSSNIVVFIGVNGAGKSAILDAMSIILDVLVGDICYRKYTERRTTTNKFNQDDINLNAEKYVLDMEFSTKRYEKYSLSKNQLVNTYTISLMSLTALSLINKISLNGTYNDFTNELELTSPESLNLPILIYYQINRNIINNSKQPTPKHTRKYKYSQCFAYENTFNNNINPFNDFSKWFREEEDLENQEQINLKDFTYRNQRLEIVRNAINNFLNKFEFAKFSDLRVERERIPSKRNNPSEESIVSSLIIDKDSQKFKFSQLSSGEKMMLSLVVDIARRLAIANPSLENKLEGEGIVLVDEIDLHLHPQWQRKLLPALTHTFPNIQFIVTTHSPQVLSHLPKESVFLLEDNKISDREIYTEGRDSNSILLDAFQVPEVDKEYEVEIKEIYNLISKYDVENALKKLENLKEKRGEYDREVMRMQSYIDIL

SEQ ID NO: 81865 - protein, 254 aa, Pseudanabaena biceps PCC 7429
MRYIKKKKEPKSLTAKRNTEGACYDAPQLDWQEQLLDEQGYLCAYCMGRISLKLNKNFEPSIGIEHYLSEQLCRQRGLDSELRWENMLGVCNGASGSKFHCDKTNGTKKGKAYGNIELNILNPLDITKSEKLITYDLFGQILPNTNNEDLQQKIAEDLNCILNLNDEKLRQFRIDAMDLAKKILKEKYPTGNWTPKQIEKEIKEWKSKSKELVKEIDGDSSKKAVIKRGGEYRAYCQAAIWFLEYLKSKPIHKS

SEQ ID NO: 81866 - protein, 440 aa, Pseudanabaena biceps PCC 7429
MHIEKLRMQNFRGFQDVTIDFPSNLAVFIGVNGSGKSSIIDCLDNLLFELVRQVLIVQRNGKGDSLYDLNSSFAEIDISNECRETINELTLSSSDLKQQFSRNLQLLYFFGYPSSSDEEPRRNFELSKFDDAENFKKFIHAQIDSKSNRSIPIVVCYSTKRSVTYYSLSGSDPWSPNRAKPSQLHCYTDATNQNKIDFHTFFAWFKHNEDLEQELKLDGDLNYQDYQLNFVRQAILSILPDYTDIKVKRSRMQIVLKKQDHELVLNQLSDGEKNLLVMVADIARRLAIANPDPTKNALEGEGIILIDEIELHLHPQWQRDIIPRLTSTFPNCQFIVTTHSPQVLSNVKKENVFIVEDFQVYPADSYTFGRDSNSILSELMGVTERPVEIQNKLTECLYKIDDGQIEEAKILLHELSDLLGHNDSEIVKANTLISFLSKVK

SEQ ID NO: 81867 - protein, 209 aa, Pseudanabaena biceps PCC 7429
MKKIIKQSEPRSLVEHRSQANANYDNYPDKDKLRESLLKEQGYICCYCMSRIKLDEMKIEHWQPQTKYISRQLDYRNLLGACMGKQGARPQNQHCDTRKGDSEITINPIEGDKNCERLIKYRPDGEIYSTDESINRDLNETLNLNLEFLKKNRKAALYVVLDQLQKKFPKTNWTANIRQKVINDLSDKDANGYYSEYCQIAIWYLKYKL

SEQ ID NO: 81868 - protein, 551 aa, Escherichia coli O5:K4(L):H4 str. ATCC 23502
MNSKYTKSPNDIRTLLQSYVNKTEDGLEFSKENIPEEVSSLYKEIEDAPFLINKVAISDYKRVRDLFVSIDKKLTVFVGDNGYGKTTILEALFIALSWFRANVQKEDKSGFHIKDGDINNHNDVNYAAITAQFKLKKITSNILVTRVKDGVSQKRNNELLSIKEMASFFRVVNSYYEDVSLPVLAYYSVSRSSNGAGIDNKRNVNNSVRRWTKLDAYEDIEFDRRDFGEFLNWFIFVNNKALSEESLIPEKQRDQLVIDISKLKVSLEVLKSFSDVDRRTLIDIETQIANKELILNTLPSTPNGLSRSKDIVANVKRAIINFLPEISSVELQYTENEVRLVLAKDDLLLDAQQLSQGEKTILTLVGDLTRRLVLLNPKLNNPLQGKGIVLIDEVDLHLHPSWQQNIIEKLQHTFPNVQFIITTHSPQIVSTVPSKCLRILEEIKNPSTGMKELRVLLPSSQTKGTKNSYALLYGMKTDPVPNVKEVAWLSTYKKFIENRQQDSEEAIMIRKKLDKHYGIDHPLLLECDGIIRVLKLKDKVRGESGNKESKQ

SEQ ID NO: 81869 - protein, 222 aa, Escherichia coli O5:K4(L):H4 str. ATCC 23502
MKFLARNPIGPGVLAEFDYNIHDWNAFKRRHKQLVWVGLVEMQGKRCAYCERKIDIHNSDDKHIEHFLRRSQHRHLTFEWSNLFGSCAENNHCGFYKDEQSYQEQDLIKADNDDPTHFFHFAINGNMDIRPGLSRNDERRAEVTIRVFNLNGEKGGVKTERINAISETWSLIERFVSTAEEFIEEGLYDDSVRNELRDEYYKEIDPRPFSTALRDVFDTMLP

SEQ ID NO: 81870 - protein, 465 aa, Escherichia coli Nissle 1917; identical to SEQ ID NO: 81190

SEQ ID NO: 81871 - protein, 243 aa, Escherichia coli Nissle 1917; identical to SEQ ID NO: 81097

SEQ ID NO: 81872 - protein, 452 aa, Pseudomonas syringae BRIP39023
MEIKSFRLVNVGRFSDLEVALAPTEKHTSKVTVLVGNNGAGKTTLLKSVATSLSWLVARVRTPKGAGIRIDEDTIQNGTATSSIRIDAYDDQIIDSLICGPDFYWEIAGTLKGRKATSSTVLGELSILAEGYRSLLTAKSDASLPLLAFYPVERSVIEIPLKVHARHTFDQLDGYDNALGRGVDFRRFFEWFREREDSENETGISTALLNELSQKIAPGTPVWELLAKEHASSRDRQLTAVRTAIEAFMPGFTKLRVKRKPRSHMAIDKDGKTLNVSQLSQGEKSMMALVGDIARRLAMMNPALENPLHGNGIVLIDEVDLHLHPKWQRSLIAQLTATFPNCQFLLTTHSPLVISDSKDVLVYVMDDGELREQDSLYGLDANQVLSSVMDTDIRNEAVQNCLDEMQHFVMRGELDEARTLYRVLADQLPADHIELARASLLIRKLEIRREKN

SEQ ID NO: 81873 - protein, 206 aa, Pseudomonas syringae BRIP39023
MLEKWKRANKGKKYADLVGHDDLKDAIRHACVTEQHGLCAYCCCRITVEKGSACNEHVEAQYLAPHRTLDFNNIVASCTKAGRCDDAHGRQPLPLTPLMIECESELQFELSGLVAGVTPRACVSIKTLNLGDTQASNRGLVGERKRMIDALLFSCSMNPGELLAEEDDVLDLLKDELLESDAQRLLQAFSPVLVNVIRSIQAARHS

SEQ ID NO: 81874 - protein, 454 aa, Cystobacter fuscus DSM 2262
MATKSRGRAQQAKRVRAGSRKQLPSRPLPVYLLSLTLENVRCFGPSQTLRLADAQGRPAKWTVILGNNGMGKTTLLQALTTVEPESTSSGGNFYMPKAFTSQWHPNRHQTDVARLSVEAMMGGLLAGDEQEEPARMECKFGPKGQKYSWKGVFEPYLSLVCYGYGATRRMGAGALSAPKEAQRNDSLFLEDVPLRNAEEWLLQADYAASKASPQRGGAARKRDRIKQLLIDLLPEVSDLRFTPPDASNPDARVEVQTPYGWVPMRGLSLGYRTLIAWLVDLASRLFERYPESPNPLAEPAVVLVDEIDLHLHPTWQRQLIGYLTERFPQTQFIVTAHSPLVVQSATDANIVVLRREGDHVVIDNDVESIRGWRVDQILTSDLFGLETARPPQIEELLKERTALLSKPRLTQKDKARLNELESMIGPLPTGETKTEREALELIQRAAERLKDGRK

SEQ ID NO: 81875 - protein, 246 aa, Cystobacter fuscus DSM 2262
MIRVLKPTEPPEVLRTKGARALRAMRAAHSRAPRSYETGKKSFEFDPGIHGHETVKAALRKAQHLKCAFCESNFAHISYGDVEHFRPKAGWRQKEKEPLGRPGYYWLAYEWTNLFLSCTLCNQQFKRNLFPLKTPKRRARNHKDDVSVEDPLLLDPAADDPETFISFRQEVPYAVEGNKRGETTIRTLGLRREELAEQRRKHLSHVKALRSLIRLGAPEAPEAQTLLQRMQQDSGEYAAMTRAFLR

SEQ ID NO: 81876 - protein, 485 aa, Cystobacter fuscus DSM 2262
MYIRHLKVEHLKRLRSFELDFTHRDQPRMWTVLIGENGTAKTTLLQAIALAAAGYKEVSGLAGSTVKHMSDRRDESRMSIDATFSFGPMSLGGGKAIHPHLPPTSGHKPREPLLRSRVSLEAGSTSLDASSFYGSKPLKQKEQHPDPLAEARAMNTPLWFVAGYGISRALPNALEIPTLARPSIERLEPLFRQIQLVSTGFANHFLQKDQKEGRRLGETSRQFSRMLNQAVQLGGADLFPSLARLELRGKGGARSSTSLIESDRFYQVMARGQAPVAVAGVALSHGYQSTFAWIADLIGHVLLESKTELDTTDMEGLVLIDEIDLYLHPTWQASFIPALRRVFPNMQFVATTHSPVVLSSLAPHEVVRLVVDEETGDIVQGGWSREDGRFHPGIQDTELQPDPRIMTGGELYRTWFGLEGTTPNPIGEKLRRLQILSAHPAPSAEQQRELKRLRDDVRKEFTQRLGAAEGKKAFEELKTNWGTTR

SEQ ID NO: 81877 - protein, 298 aa, Cystobacter fuscus DSM 2262
MGDHSMIRIDRGAEPRGLKIAAPKRLRAAAKVFNRRGALSKALTKKLTGYGTEKTKQALFLAQHEKCAWCERHTDFSSAPVEHYRPKDGAWRHLPKATMKHVDQGHYWWLTWTWSNLLFSCARCNDRAHKANYFPLRPTTVPAAVPTAPLPRPLPSPIVDVSGEQALLLDPAGSEDPLDHITWRPGFTHLHRREWIWSPFGLTEKGEATIEILKLEELAGRAQGHVIDALLPSIEEVEQHLGASRVLQARQRWQRFLEDSLSPRAEWTAFTWHALAYLVPVAYRLQHGLAVPPRPGAP

SEQ ID NO: 81878 - protein, 759 aa, Cystobacter fuscus DSM 2262
MYVRSLTIQNLRSFESVELPLCHPGDGAPPAPTGVPYLDNVTLLLGSNGSGKTSVLRAVALSTLAPVLAMGSGYVPYALVRRVKGRPTEARVKAHVVLHEQDGLGEGTDEEIAATLVASPRGYTDRFLIEDKPPSWHIRLWDEESPAFLVLGYGATRRVETGAGSVEGRAKERILRYRRVAGLFEEHMTLMPLAAWLPQVARKDKKRHQEIVNLMNELLPEGTKMLGKWDDREDPESLFQRGGSVLPFPALSDGYRAFLCWVGDVLYHLHLICKKGQRLVDMRGVVLVDEVDLHLHPEWQRHLVPSLSRAFPRLQFVLTSHSPLVVSTLSSQNVLLLEERERAGGVTATEVMRPGEELYGLSADQILTSQSFGLESSRDERFFERLKDVADKAREGGAEDALRFMRMVAGGAVAEDAPVSELSSRELLVLRGHESRVAEVAWDPTGRRLASASWDKTVRVWDGETGRELSVLQGHEDAVVCVAWDPTGRRLASASWDKTVRVWDGETGRELLVLRGHGDKVIGVAWDPTGRRLASASWDKTVRVWDGETGQELSVLRGHEDAVVCVAWDPTGRRLASASLDKMVRVWDGETGRELSVLRGHEDVVVGLAWDPTGRRVASASLDKMVRVWDGETGRELSVLRGHEDKVIGVAWDPTGRRVVSASWDKTVRVWDGEMGRELSALRGHEDDVIGVAWDSTGLRGASASGDSMVRVWEISSKPGVLKPQKQPAKESSVRKPISRTSTKSAKVKRKASRRPVRK

SEQ ID NO: 81879 - protein, 254 aa, Cystobacter fuscus DSM 2262
MKSVYMALQHHKCAYCERPMAEGAHANIEYDVEHFRPKSRVMPWPDEKTAKELRIRYKVRSGNPKGYPLLAHDPRNYVVTCKVCNSPLKADHFPIDGEPSDEGSDIAKLNAEEKPLLIFPLGVADPSPEELITFEGILPVPTKRGGHDRKRAQVTIDFFRLHLRTELRDGRAHLLVLLWQNLERMQEGTPEQRQRAREVLAAARGNSFPHSRCARAFLDLYERDPAKAKDYYLAAHELMVRKEPGLYGRGASRS

SEQ ID NO: 81880 - protein, 409 aa, Acinetobacter baumannii OIFC047; identical to SEQ ID NO: 81748

SEQ ID NO: 81881 - protein, 223 aa, Acinetobacter baumannii OIFC047; identical to SEQ ID NO: 81749

SEQ ID NO: 81882 - protein, 360 aa, Janthinobacterium sp. HH01
MINLEPSGKNTANQFFYIIGDNGSGKSQYLSDSVARHREEFDKILALPCGIFDRFDPKSSGNYHYLGFKSKRNSVFLSSVGRTITGLVLNLIKNRKFDAIQRILDNLQLKLSFEGAATLWDNRPAKERRASEDQMLLAEAAIEKYRKAKKGWTRFPKKEAALLESCTNLNLKFFAKFKPHNRKNYVHPEDLSSGYVQKLKMLLLIAKEAENNSLILIDEPEISLHVKWQAELPKLFRDAVEGLTGCRIIVATHSAVIISNTTQEHDFIYSIPEDQTLQSEDVAENIETLLFNKFKYLPLSSHIIPDTCAKIIHRVTHGTASVSTCKEEIKELKKNTLSDRDEKLLSKTAEVIEIVEKNIQ

SEQ ID NO: 81883 - protein, 260 aa, Janthinobacterium sp. HH01
MLDDPTGTDKATVEIFDKLRVAASNGKISTTHAWAFFSTGGEVPVLKKNPKDTPQVIKEKKDTTAFLKKLKNGNSRCLKALKEKLKSHLFEKQDGFCCYCKRQLYMHGRAINIDHIFPKNPAEGASQVDILKGKSLCFDIRNLTLCCIDCNTQKNNKLHIYNPNLHEYSDYIDYRIVLTNKIKIVSYKSNTRPVYCDIGDNLLDVFKLVHYEYRNILATLELDAMLKIIESSIINTEDDEELSMKIREFYNSYINEITRY

SEQ ID NO: 81884 - protein, 465 aa, Salmonella enterica subsp. enterica serovar Rissen str. 150
MRIDKLSLLNFRCFRQLDITFDEHITILVAPNGAGKTTVLDAIRLALFPFIRGFDASLYVKDKSLAIRTEDVRLVFRPEALNMEMSSPAMITATGEWESGKTATWMLDKRGEQPPHEDKTAAQLTRWGEQLQTLVREEHNLQQVELPLMLYLGTARLWYQERYEAQPTEQRLDNSAFSRLSGYDDCLSATSNYKQFEQWYSWLWLSYREHQITQLESPSAKLKEGVRVQRMKEAIQAIQQTINCLTQEVTGWHDLEYSSSHNQQLVMNHPQHGKIPLSQLSDGLRNAVAMVADIAFRCVKLNPHLRDEAALKTQGIVLIDEVDMFLHPAWQQQIIQSLRSAFPLIQFIVTTHSPQVISTVKRESIRLLEQDENGNGKALMPLGATYGEPSNDVLQSVMGVDPQPPVKEKADLQKLTAWVDQGKYDEPEAQQLMAALQVALGDQHPQLQRLQRSIARQNMLKGKAQ

SEQ ID NO: 81885 - protein, 198 aa, Salmonella enterica subsp. enterica serovar Rissen str. 150
MTLLLNEQYHLCCYSEIRADLRGLGYHIEHVENKSQQPGRTFDYQNLAASALDSENGLHLFGINAFGGHARGKQEAVDMAKFIHCHLPDCSRYFAYLSDGRIVPADELNAQEMERAEYTIDLLNLNSGFLQTERRNHWEELEQLFEEHIEKGWDLQQLLQLELVPSPDHKLHEFFSITRQFFQQEAEQVLQIHAPALI

SEQ ID NO: 81886 - protein, 410 aa, Salmonella enterica; identical to SEQ ID NO: 81604
  subsp. enterica serovar Javiana str. ATCC BAA-1593

SEQ ID NO: 81887 - protein, 224 aa, Salmonella enterica; identical to SEQ ID NO: 81605
  subsp. enterica serovar Javiana str. ATCC BAA-1593

SEQ ID NO: 81888 - protein, 465 aa, Salmonella enterica subsp. enterica serovar Tennessee str. 4535
MRIDKLSLLNFRCFRQLDITFDEHITILVAPNGAGKTAVLDAIRLALFPFIRGFDASLSVKDKSLAIRTEDVRLVFRPEALNMEMSSPAIITATGEWESGKTATWMLNKRGEQPPHEDKTAAQLTRWGEQLQTLVREEHNLQQVELPLMLYLGTARLWYQERYEAQPTEQRLDNSAFSRLSGYDDCLSATSNYKQFEQWYSWLWLSYREHQITQLESPSAKLKEGVRVQRMKEAIQAIQQTINCLTQEVTGWHDLEYSSSHNQQLVMNHPQHGKIPLSQLSDGLRNAVAMVADIAFRCVKLNPHLRDEAALKTQGIVLIDEVDMFLHPAWQQQIIQSLRSAFPLIQFIVTTHSPQVISTVKRESIRLLEQDENGNGKALMPLGATYGEPSNDVLQSVMGVDPQPPVKEKADLQKLTAWVDQGKYDEPEAQQLMAALQVALGDQHPQLQRLQRSIARQNMLKGKAQ

SEQ ID NO: 81889 - protein, 198 aa, Salmonella enterica subsp. enterica serovar Tennessee str. 4535; identical to SEQ ID NO: 81885

SEQ ID NO: 81890 - protein, 192 aa, Pseudomonas poae RE*1-1-14
MVSTPAGEILYEYLSSGFKSCLSILFGIVKELEFRFKELEVKADEFSGVILIDEIELHLHPDWQAKIAKILTIAFPKSQFIVSTHSPHVIQAAQLDEVIALQTDNGHVFRRTLPETQYGFQGWTIEEVLKDVMGMEDTRTLIYHKTLKEFEKAVDDDNYSDASAAYEKLDSLLHPENHLRKLLAFQLGALKG

SEQ ID NO: 81891 - protein, 246 aa, Pseudomonas poae RE*1-1-14
MIKLERIKKPTFLSNEKAAELTRKFKETGDSVWNQEEIKKPLLQSSHEKCAYCECCVSEESKYMEVEHFKYKNKYQDLVIEWLNLLPSCKRCNIAKGDHDVEDEPLINPYDINPREHLKLKLYKLKGVTELGKSTIDAADLNNSERLVIKRFDIGQQLQTSIETATERLELWINTKTTRRRNKLAGIVETILLECQPSAIYSATTATIALNDDDLLEVIEKMKNHNIWSHHLDILLKSASTLTLST

SEQ ID NO: 81892 - protein, 395 aa, Amycolatopsis azurea DSM 43854
MYIERVRLENIRGFSGARAVDLRLPGPGWVVLAGRNGSGKTSLLRAIAVAAAPDVAWGLLSDAGSWISMDQTSGSIELSVMREEGPAPVEVRWLDSGLLPISGLPPGQPFCAAYGPFRRLAGGSGEAESWMRGAGSLARMASLFHEDASLAEGVTWLINQHLRALEGKAGARELKDTALEILGDGLLPGGYRIRDVDSDGLWVEYRGDRFPLREMSDGYRTVTALVVDLLKQLNGAGLDHESPGVVIIDEVDAHLHVSWQKRMGPWFKAHFPRIQFIVTTHSPYVCQAADPGGLIRLSGPDEEVPPRVVSEELYERVVFGSGDDAVLSDLFGLDTPYSPQAVELREHLAELEFQVASGRADANGVREWERLRGMLSSSPPSRVDEVARRFEADDR

SEQ ID NO: 81893 - protein, 246 aa, Amycolatopsis azurea DSM 43854
MIGIRRIALPGRVVADLEDLTARIPAGDSKEARRLWRVSRAVRRSLRAGLDVMAAGRGYCMYCGDGLGSTVDHFEPIARNPGRAFDWLNHLLACEYCNSHHKRDLFPVDDDGGSLLIDPTAEDPLDHLFLVLSIGTYRALTEKGEQTIKVCGLNRAQLARGRETAVNQVSALVTGWWTARELGDDVKRRAMAWTLLDQPHADVLHAMLRQAGMPGARAVFRADDELIELLRTPELAEDLQLSGDAV

SEQ ID NO: 81894 - protein, 423 aa, Nodularia spumigena CCY9414; identical to SEQ ID NO: 62974

SEQ ID NO: 81895 - protein, 216 aa, Nodularia spumigena CCY9414; identical to SEQ ID NO: 81219

SEQ ID NO: 81896 - protein, 412 aa, Edwardsiella tarda ATCC 15947 = NBRC 105688
MTIERLHVKNIKHFPEVNVRFNERFNFITGPNGCGKTSILAAIAHCLAWNGEYSRHQDDSEYWIDVNEHGERFRFGLGPGFLRVKKYRGDKIHIYITPPSEDGRQSLNLSDVKTRYKLPPLVIGAQRKITYKTINGVTREKDTQGSINEYCDNALSSLYNNSSRDIKQWLINRYFVIDKSWAEEEKANWEHLIKSLPIIGPFNSEFQYLDTGRDLESVFSIYGKKCFLEELSSGFQAVLYIIIAIFEWIEACLPVGERDVTTARGTVLIDELDNHLHPEWQLTVRQGIAAIFPNIQFIVTTHSPHLLASAKENEIIMLPSSYTDEVYEFQPSKKAYSGWSTDLILTELMGVRSLDNKDYEKLVKACYENIKENNLKALKENYFRLESICHPGDTVLIILKTRIAGMEAKAND

SEQ ID NO: 81897 - protein, 252 aa, Edwardsiella tarda ATCC 15947 = NBRC 105688
MIKLTRPPEPQVLCDNRAVWTQGLMALVAKYNEYKKIPPNEKEAALKHYRHDDIRNALKESSFHKCAFCEGIPEETGFAEVEHFHPKSIYTDKAFEWTNLLYSCKACNNNKLNHDTQKQPIINPYDFDPSDCFTYTDIIIEPKAGANHDIAEKTIEVCGLSDKRLFSARGDILVSFRIFEADIREAMEEFDLARTSPNKQKRAGRINDALRTIEELSKPSARLSNFCTYLLANSEIYQEAKQRLQEYTSENL

SEQ ID NO: 81898 - protein, 436 aa, Prochlorothrix hollandica PCC 9006
MELISLELQGFRGLADQTIDLEPEPFRSGGLQPIVFIGTNGSGKSSLLKAILRLLSWFTRRLKNARTNGLPFQPEDIALDRSQVAAALTLVYQDQSYRWNVSRNRPKAFKTHKDSRKTDTKGSFYTELNQLVESFHGLMEQDIQTPLPVLVHYSTDRTVPQARVHLPKKRDNPIPLNAYDRALDEEATTFKSFFEWFRIREDYENQRRSKEDPRYQDPQLEAVRRACTLLTGLTDLQIRRETPVRMTVTKTIDGLPQIFRIEQLSDGEKGLLAMTGDIARRLAIANPHLSDPLQGEGVVLIDEIELHLHPQWQSSIIENLCTTFPNCQFILTTHSPQVITNLDWVYLLEPTPQGTRCQPIRTYGKDSNRILEAIMGTPERSSQVKDHLDHLFNLIDDGKLTEAQKLHLELLNTLTGNEPELTHAEWLIERREALGR

SEQ ID NO: 81899 - protein, 232 aa, Prochlorothrix hollandica PCC 9006
MKYIQKNPEPKELKQWREDQLAQGVNFTYENFKNPEKRITRQSLLQEQGWICCYCCKRISLEISHLEHFDPQSKSDPVLTVTYSNMLASCGPLERDPADRKKSVKWPEHCGYQRGRDHKHNNETIRKNAALPIAPHHDPQCETYFTYRSNGEIQAVKDHPRAADAQEMIKILNLNDPDLIKARQLILRTLQGLTDTEAQILWQRNQNRNQQGEFRSFCPAALDYLRQNFNLP

SEQ ID NO: 81900 - protein, 395 aa, Amycolatopsis decaplanina DSM 44594
MYIERVRLENIRGFSGARAVDLRLPGPGWVVLAGRNGSGKTSLLRAIAVAAAPDVAWGLLSDAGSWISTDQTSGSIELSVMREEGPAPVEVRWLDSGLLPISGLPPGKPFCAAYGPFRRLAGGSGEAESWMRGAGSLARMASLFHEDASLAEGVAWLINQHLRALEGKAGARELKDTALEILGDGLLPGGYRIRDVDSDGLWVEYRGDRFPLREMSDGYRTVTALVVDLLKQLDGAGLDHESPGVVIIDEVDAHLHVSWQKRMGPWFKAHFPRIQFIVTTHSPYVCQAADPGGLIRLSGPDEEVPPRVVSEELYERVVFGSGDDAVLSDLFGLDTPYSPQAVELREHLAELEFQVASGRADANGVREWERLRGMLSSSPPSRVDEVARRFEADDR

SEQ ID NO: 81901 - protein, 246 aa, Amycolatopsis decaplanina DSM 44594
MIGIRRIALPGRVVADLEELTARIPSGDTKEARRLWRVSRAVRRSLRAGLDIMAAGRGYCMYCGDGLGSTVDHFEPIARNPGRAFDWLNHVLACEYCNSHHKRDLFPVDEDGNSLLIDPTAEDPLEHLFLVLSIGTYRALTEKGEQTIEVCGLNRAQLARGRETAVNQVSALVMGWWAARELGDDVKRRAMVWTLLDQPHADVLHAMLRQAGMPGARAVFRADDELIDLLRAPELAEDLQLSGGAV

SEQ ID NO: 81902 - protein, 541 aa, Serratia marcescens VGH107
MNDVKRRVDNVFSDFIEIINDDNFEKSSKFSHTLNLLNESLNKEKLYLKKVAIVDFKRLRDVIVNLEDDLTVFVADNGYGKTTLLDAIAISLSWLRSNIQKKDKPGSYIREIDINNSKDALYASVVATFKVQNLNANILITSAKEGVSFKRSNDLQEVKSLATMYRYVNTFLDNSSLPVMAYYSIVRSVVGGGIDNKRKSNKNKTSWSKFDVYDDFIFDRNDFGEFLSWLMFLSNKSTYENASPTDTLESLEKEIERISNTIEQLKTISNIDSNIINNLTISREEKKLQLKKVTGNDTLSSSSLYKNVINTILKFLPEFESINLVYSENDFRLVLLKNGIELDAQQLSQGEKTILTLVGDLARRLSLLNPTLQNPFEGKGIVLIDEIDLHLHPTWQQKIIERLLTTFPNVQFVLSTHSPQVLSTVSARCIRILEEVEDELGYTSIKATKPRYQTKGLINSDALLYGMGTDPTPPINEVKWLEEYKKNIELDKFDSKPAIILRNNIIKHFGEEHPLVIECDQMIALMKMKRDIRNRKNNKES

SEQ ID NO: 81903 - protein, 219 aa, Serratia marcescens VGH107
MKFLRREYPGPEVLLKYDFNTQNWDNVSSSDKREIWTELVKMQGKVCAYCERKIDFNKAGDKHIEHFKRKGIYKELTFDWGNIFGSCGERKRCGFYKDKQKYNDDDLLKADVQNPNDFLLFVSSGEVVVKPDIIERSKKIAEVTLTVFNLNGEVKAERRSAIEKGMSTMKNYIEIAHELINSGDDINIVREYVRDSYYEHIDKMEFMSARKHVFEAFLP

SEQ ID NO: 81904 - protein, 779 aa, Serratia marcescens VGH107
MENIDERDIDAARFERQILDIWREETNQTPEGGLKLAIFLLFTEQSSKHIVLPWSWADTETIYGLMDAKRRADDWLRLKDSDVTEREWARQSQYVLEKLRHLVSYSGNSTANLHRLDFLVKSLCARRSSNNWARKVESFVADFAHGWSVSGRAIVDMNTMTTGELGVRLKDVQAGDDYVLPAELQPHLFEVCLRLHAHNVQFQLVAEQGADSSWRGVGAAYKFAWPTRYRSEWTNEVRPFELNGLEFAQWFLDHRHGQRITIVVLPTADLRGKGRGAEIRHDLLQRRCVLGVVEIPARVSGRTRLSMLIMAKERSSNDESVLLMNGRAVDGLRDEPLDRLAKFLCAPFLDAMKGDTLSRLPYESDLGDALLNRARKMFGAKLHEVPGFFRYVQLEEILGNQNAVLDPSLWISERDPMVASDLLDGSPVYKLLEERERPCCVYVIGNNGAGKSMLLRQLAKAYVTSGRPVRAIASATSDRFEAKMGVTADYVYLGARTSNMSTQPRRLGRKLAELMVAIHADRDKIAAVSRVLDQLSFAGQHYLLPESATSDVLESVRELGVDGAPSNMNGWKLGFRKNHENSIVPFDHLSTGEQQLLLLTARLVEYARPGVVFLIDEPETSLHVAWQRALPSVFQTISRDFNCQMVIATHSPILISTSRGDDTYRFMADGGVLEAIGEQAASSVERVLFQGFDTYTGNNREVHERCAELVSRAIEFANTERTEMLSSVFDELQQMEEKVTRAVPALGSEVPARHLDLIRRATLAIEELTSSDKSEEARS

SEQ ID NO: 81905 - protein, 241 aa, Serratia marcescens VGH107
MNQLVTAEKDFGKNVLTSVEARAFYREWRKLASSRASPWSAIRAATFMVEGQKDGTGIKIISALRSHLAALQAERCCYCRRRLVGIAYARPIEHILPKNTYGQYTFTYRNLAVACFDCNHVKSKANWSIWPQNRRRYINEKSCNSFFHARLHDYDSHVRYFHLETNGASISVYVGLTPQGRHLCVELLSKSSERTLAESANPRFSAAMDKLRGQVQQMAATTDDTKLLDFMEALELAVDPL

SEQ ID NO: 81906 - protein, 439 aa, Gordonia malaquae NBRC 108250
MSDRNRWAVQRLQLENFRCFDRLDIDFDPDLTVFIGVNGAGKTAVLDALSVMLSTALYELGDDRRGFATSDVRLVADVDSASSVASMEAEYPVSGLLQAELAGRQCWWRRVKTSRSGRTSWAEKKAIDAIVTDAWNAATADDPISMLPVVAMYGVERLVGVRNARGAIPRSRKSAYAAALDGKSDLTRLSTYIQGLTVDDYTATVERGIPDSPESRQLAAIRLACDRVLETTGWRGPYWRQNVGELTMAHDEHGELPLSFLSSGLKIAAGLTIDLASRAARANPAIGGAELLDSVPGIVLIDEVDLHLHPDWQQQIIPSMRTAFPNVQFIVTTHSPQVLSTVPADQIRVLDGDAVSHVDFSEGLRSDVVLREVMGTDPLPDVAVTRRLRKYVELVGDGHGLGDEAQGLRRALDDELGGAAFVPALADADASMTFYDLDE

SEQ ID NO: 81907 - protein, 242 aa, Gordonia malaquae NBRC 108250
MRRIPKGAEPNILREANARGVHYDDWDGKLRTAIRAALHAEQNGVCAYCERPVRVERSDDVSRMVVIEHFHPRSGSPRTGKWKSSQCRAASGATSHESSRTAWSNLLLSCDGSGPHGARTCDSKKGGSDICSRFANPKTTHLDRLVDIGRDGRARPVDSLPPGADAVVDSELNLNAEFLCEARRSYFAVQLREYNKAKTRHRGLSSVQKQILVNRFRERASRPGTPHPSVLLAVANSIEAKI

SEQ ID NO: 81908 - protein, 443 aa, Sinorhizobium meliloti 2011; identical to SEQ ID NO: 80876

SEQ ID NO: 81909 - protein, 215 aa, Sinorhizobium meliloti 2011; identical to SEQ ID NO: 80877

SEQ ID NO: 81910 - protein, 510 aa, Bdellovibrio exovorus JSS
MFVLEKIVIQKHEILGDCTIDFLDNRDSGYINYKTIIIGTNGSGKSTLLYLLTDIFINLDKMRNAVLDKVSKQKYRCDFELSYSVNNNRYVIDCRDEIIAIKKNDKPVMIENIELPSKIIVSTNTVSERFPLKYDRIRFFENHFDEYYQYFGTRSRRGQLVYGMHIRNAFEVFISRSNDTFYRRNIKRLLETLDFQSHIDIRYVIHKLTKYKQGFDEKISKKTARQIVEDAINGRSSYRTSELVRLGYFNDEVLKDKISKTLFEMIECSFRDRGINWRSELKFDLLGGHLELNGKTLNNEMEEFKVLQELGIIRLQDLILYKNGKAVNYREASSGELQQLATFMALLGVVEDDALVLIDEPEISLHPEWQTRLVDNLDQILSKFRGLHYLVVTHSPFIISDVKSDEANILRMEKKNGKILVRQYKGETYGLSVEEIILNTFNMATSRNYYLNDKVGKIFQSLKDHKGIWTSSDRSNIDELLDLTKKLNTSDPIYLLVQKISKAIDGQKQN

SEQ ID NO: 81911 - protein, 214 aa, Bdellovibrio exovorus JSS
MGKNRIENLYTLSNSEKELLKLPESKKKDSWDTHTFQDLKKNLKSHLYVEQENLCVYCKQELSKETRLTHIEHVIARDNNEKFCFALKNLALSCRDCNSAKSAKYVYHNERTEKSLSRYPHRSVRFLIPHPHYDNFDEHVSFFLDFYPIEVNQSSKGIKLIEICNLRRFGLMANKITAEFKNSAGGMEEKIYKLSAKSPEEALAGIDEIIAELL

SEQ ID NO: 81912 - protein, 243 aa, Azoarcus sp. KH32C
MKSTLLGWMINGYGVRSPTKTIMPPDPQQVRNFEGFRDVLRVVLPESLGFEDLEVRDYEIVFCCNGGADEFLLETASGGISALIDIAWQIFMFDTDAKEPFAVVIDEVENHLHPSMQRTLLPNLLKAFPHAKFIVTTHSPLIVTSVEDANVYALRYDHTKKVRSHLLDFKSEVKNAVDVLDEVLGVSTTIPAWAVGKLSSILARHVASDPTTESLAALRTELRDAGLGRLFPDAVARVAEARK

SEQ ID NO: 81913 - protein, 196 aa, Azoarcus sp. KH32C
MRRLHRPPCPNPDALRTNYKHPDNKDALLRASHGKCMYCESQVAHIYFGDVEHIRPKAEGKYPHLEFEWTNLGYCCARCNNAKKDQFDETCPVVDPYSEDPGTHLLAFGTTVRHKAGSERGAITIATTDLNRPELIERRAIRLTQLQNALDACYRTSSEAIRATLLAALKEEGAADKEFSMFAAALINANQPDGAL

SEQ ID NO: 81914 - protein, 465 aa, Escherichia coli KTE39; identical to SEQ ID NO: 81096

SEQ ID NO: 81915 - protein, 243 aa, Escherichia coli KTE39; identical to SEQ ID NO: 81097

SEQ ID NO: 81916 - protein, 465 aa, Escherichia coli KTE201; identical to SEQ ID NO: 81190

SEQ ID NO: 81917 - protein, 243 aa, Escherichia coli KTE201; identical to SEQ ID NO: 81097

SEQ ID NO: 81918 - protein, 465 aa, Escherichia coli KTE214; identical to SEQ ID NO: 81096

SEQ ID NO: 81919 - protein, 243 aa, Escherichia coli KTE214; identical to SEQ ID NO: 81097

SEQ ID NO: 81920 - protein, 465 aa, Escherichia coli KTE220; identical to SEQ ID NO: 81190

SEQ ID NO: 81921 - protein, 243 aa, Escherichia coli KTE220; identical to SEQ ID NO: 81097

SEQ ID NO: 81922 - protein, 550 aa, Escherichia coli KTE234
MTKQYERKAKGGNLLSAFELYQRNSDKAPGLGEMLVGEWFEMCRDYIQDGHVDESGIFRPDNAFYLRRLTLKDFRRFSLLEIKLEEDLTVIIGNNGKGKTSILYAIAKTLSWFVANILKEGGSGQRLSEMTDIKNDAEDRYSDVSSTFFFGKGLKSVPIRLSRSALGTAERRDSEVKPAKDLADIWRVINEVNTINLPTFALYNVERSQPFNRNIKDNTGRREERFDAYSQTLGGAGRFDHFVEWYIYLHKRTVSDISSSIKELEQQVNDLQRTVDGGMVSVKSLLEQMKFKLSEAIERNDAAVSSRVLTESVQKSIVEKAICSVVPSISNIWVEMITGSDLVKVTNDGHDVTIDQLSDGQRVFLSLVADLARRMVMLNPLLENPLEGRGIVLIDEIELHLHPKWQQEVILNLRSAFPNIQFIITTHSPIVLSTIEKRCIREFEPNDDGDQSFLDSPDMQTKGSENAQILEQVMNVHSTPPGIAESHWLGNFELLLLDNSGELDNHSQVLYDQIKAHFGIDSIELKKADSLIRINKMKNKLNKIRAEKGK

SEQ ID NO: 81923 - protein, 216 aa, Escherichia coli KTE234
MRELARLERPEILDQYIAGQNDWMEIDQSAVWPKLTEMQGGFCAYCECRLNRCHIEHFRPRGKFPALTFIWNNLFGSCGDSRKSGGWSRCGIYKDNGAGAYNADDLIKPDEENPDDYLLFLTTGEVVPAIGLTGRALKKAQETIRVFNLNGDIKLFGSRRTAVQAIMPNVEYLYTLLEEFDEDDWNEMLRDELEKIESDEYKTALKHAWTFNQEFA

SEQ ID NO: 81924 - protein, 537 aa, Escherichia coli KTE51
MNDSKKRVDNVFSEFIGLINDGVPEDKLKYSPVLNLLNESLNKDNLYLKKISIVDFKRLRDVIVNLEDDLTVFVADNGYGKTTLLDAIAISLSWLRSNIQKKDKPGSYIREVDINNSKDALYASIAATFKVQELNTNVLITNAKDGVSFKRSNDLQEIKLLATMYRYVNTFLDNSSLPVMAYYSIVRSVVGGGIDNRRRSGKNKVSWSKFDVYDDFMFDRNDFGEFLNWLMFLSNKSAHENPVVTDNPELLRKEIESINNTIEQLSIVSNIDFSIINQLKSSLEEKKNQLNKFSSEGFLSSSVLYRNVINAILRFLPEFESINLVYSETDVKLVLIKNGIQLDAQQLSQGEKTILTLVGDLARRLSLLNPELQNPFEGQGIVLIDEVDLHLHPTWQQKIIERLLTTFPNVQFVLSTHSPQVISTVPARSIRILEEVEDEFGDISIKAVRPRFQTKGVMNSDALLYGMGADPAPPVEEVKWLEEYKKFIELDQFDSDSALKLRQNIISHFGEDHPLVVELDQMTSLMEFKRKIRNKKQ

SEQ ID NO: 81925 - protein, 222 aa, Escherichia coli KTE51
MKFLRRIYPGPNVLSSYDFNTQTWDDVSSSDKKDIWVDLVKMQGKVCAYCERKINLTKEGDKHIEHFKRKGIHRELTFNWENLFGSCGEKQRCGFYKDKQEYNEGDLLKADEMDPEDFFVFIYSGDVIVKPEINERNKVIAEVTLRVFNLNPENGGVKAERRNVLEKGLGTIKGYVKIAQDLIDSGEDAEEVRQYVRDEYYEKISQMDFKTARKHVFEAFLP

SEQ ID NO: 81926 - protein, 465 aa, Escherichia coli KTE53; identical to SEQ ID NO: 81190

SEQ ID NO: 81927 - protein, 243 aa, Escherichia coli KTE53; identical to SEQ ID NO: 81097

SEQ ID NO: 81928 - protein, 465 aa, Escherichia coli KTE60; identical to SEQ ID NO: 81096

SEQ ID NO: 81929 - protein, 243 aa, Escherichia coli KTE60; identical to SEQ ID NO: 81097

SEQ ID NO: 81930 - protein, 465 aa, Escherichia coli KTE67; identical to SEQ ID NO: 81096

SEQ ID NO: 81931 - protein, 243 aa, Escherichia coli KTE67; identical to SEQ ID NO: 81097

SEQ ID NO: 81932 - protein, 550 aa, Escherichia coli KTE119; identical to SEQ ID NO: 81308

SEQ ID NO: 81933 - protein, 216 aa, Escherichia coli KTE119; identical to SEQ ID NO: 81309

SEQ ID NO: 81934 - protein, 452 aa, Escherichia coli KTE143; identical to SEQ ID NO: 81192

SEQ ID NO: 81935 - protein, 219 aa, Escherichia coli KTE143; identical to SEQ ID NO: 81193

SEQ ID NO: 81936 - protein, 416 aa, Escherichia coli KTE45; identical to SEQ ID NO: 81196

SEQ ID NO: 81937 - protein, 221 aa, Escherichia coli KTE45; identical to SEQ ID NO: 81197

SEQ ID NO: 81938 - protein, 416 aa, Escherichia coli KTE46; identical to SEQ ID NO: 81196

SEQ ID NO: 81939 - protein, 221 aa, Escherichia coli KTE46; identical to SEQ ID NO: 81197

SEQ ID NO: 81940 - protein, 465 aa, Escherichia coli KTE63; identical to SEQ ID NO: 81190

SEQ ID NO: 81941 - protein, 243 aa, Escherichia coli KTE63; identical to SEQ ID NO: 81097

SEQ ID NO: 81942 - protein, 442 aa, Escherichia coli KTE115
MKIANIRLTNFRCFDEFSVDFDPRLTVLIARNGRGKSTLLDAVALALGPFLTRLPGIKGLSFKKTDFRIDENGDQPSYMRVSCTSTTGITWDRTERRDLTKKTLGSIPQGAALKALNDYVDTFIDSHNENKHYTLPIFVYYGTGRGVFDIPLRKRAFNKHFSRFEALDGALESKTNFKRFVQYFYFLEEKENRLQKEQRSFEVEIPELRAIRLAVEKLLPEFSNIRSAVPAGIMVDWCKPIGNGETTIQKLRIEQLSDGYRTTLAMVMDIAARMAEANPYSSDPLSSEGIILIDEVDLHLHPEWQREFLPRLINVFPHLQFIVSTHSPFIIQSVKEGMLVDLDKDDISDSPSLNKELSIEDIAEGVMGMEKVQRSELFNKQVAVSDRYYQLLNEGRSESDPEVRKLSAELDKLEEFFGDNPAYVALLRAERRKIMGTQGSKQ

SEQ ID NO: 81943 - protein, 203 aa, Escherichia coli KTE115
MRPVNRPPYNGTVYADYKSFLPSLLTAYGGYCSYCERPDKVDVEHVVPKTHAPLLITDWNNFLLGCPRCNRDFKKSKNTQRIGYVWPDVENTFNLLTYHPDGRVEPKQGLSAGLTAQVQATIDLVCLDDGNQVQKTLNLGRRRYFGLANKAKTLYLSNLLSIDEVMDMAQLGYWSIWYNVFQGVPAVLSALENSYPNTAINRP

SEQ ID NO: 81944 - protein, 465 aa, Escherichia coli KTE209; identical to SEQ ID NO: 81190

SEQ ID NO: 81945 - protein, 243 aa, Escherichia coli KTE209; identical to SEQ ID NO: 81097

SEQ ID NO: 81946 - protein, 465 aa, Escherichia coli KTE218; identical to SEQ ID NO: 81190

SEQ ID NO: 81947 - protein, 243 aa, Escherichia coli KTE218; identical to SEQ ID NO: 81097

SEQ ID NO: 81948 - protein, 465 aa, Escherichia coli KTE223; identical to SEQ ID NO: 81190

SEQ ID NO: 81949 - protein, 243 aa, Escherichia coli KTE223; identical to SEQ ID NO: 81097

SEQ ID NO: 81950 - protein, 763 aa, Escherichia coli BCE002_MS12; identical to SEQ ID NO: 81340

SEQ ID NO: 81951 - protein, 308 aa, Escherichia coli BCE002_MS12
MRHVPRGSAQPPLSLSALDSNGKSELQRAREHYAEPEQAKRFEFKAYSSDDVKWRLNTLFHFKCAYCETFFSASSPVDVEHYRPKSRVSEDAAHPGYWWLAMDWENLLPSCIDCNRKRRQHIVNQSSSLISLLENSRRAATSGGKKDSFPLANRGVRMQPESRDHFEEQALLLNPCEHQPESFLHFVSIGAPSLSLVVPTGDRESPHGATSIHVYGLNRLGLVQDRTRYLRRLEFLGDMMISLGELIDQVDRMALEEVQRDEIIRPLRLLLDKTGKEMTQMARPDQPYSVMAETWIAQFFQQIANRGV

SEQ ID NO: 81952 - protein, 465 aa, Escherichia coli 2848050; identical to SEQ ID NO: 81096

SEQ ID NO: 81953 - protein, 201 aa, Escherichia coli 2848050; identical to SEQ ID NO: 81537

SEQ ID NO: 81954 - protein, 763 aa, Escherichia coli BCE001_MS16; identical to SEQ ID NO: 81340

SEQ ID NO: 81955 - protein, 308 aa, Escherichia coli BCE001_MS16; identical to SEQ ID NO: 81951

SEQ ID NO: 81956 - protein, 583 aa, Stenotrophomonas maltophilia RA8
MQLRHLAIPEFRNLQSVAIDFATQLEPGQGAIPATALEVIRSHALIGQNGVGKSNLIEALITIFRDVDLDRDATLDYTLEYEIRGRSVRIQADTTKQKRPFVWVDGQGQSQGYLLKNRELLPSHIFAYYSGRNERIETLFQEHQRRFNQRQEITTDEVLPEQLLENFTASDADIRALEDTRRRRDARLKHAGDDRLRRLFYCRGGHSQLVLLACLLSDDPVFQKVLKNLHIESLESALFVLKEPHRLRERRRGGKFDENELNEGDPRFWYARGNVVSEFLDKLWQVAWAPIEQEITRQIDFRGRTEKQNQLYLFVPSHAKLKQLGELVGGTDSFFRYAEGAYIGDLIDEVRITVKKCDEHGGKVNFTQLSEGELQMLTVLGLMRITRENHCLFLLDEPDTHLNPIWKLRYFDDIESVLGAGENQVEQGESQILITTHDPMMVGSLKREQVHILRRRGDQTVVEQPDMHPQGMGVTGLLKSDLFGLSSTLDIETERRLFRRNELYVKSPRTLEEDAELSRLSTELADLGFSTADFRDPDYALFVRKMAQHRKFRRPTLTPEEQAEQDHIAGEIIDEILREEADK

SEQ ID NO: 81957 - protein, 285 aa, Stenotrophomonas maltophilia RA8
MIFIDLEHKRPTDNDIPGWMPWTQAQWDAWLATSKQLIERLAALEAAGGREERNVLIDKNKPHWDALKPWLLALSGGKCWFSEVRELYSHYDVEHFRPKKAAKALNGVKRDGYWWLAFDYMNLRLCGNVGNRKKGGWFPLKQGSLCSTYAEPCEESESRYLLDPIDDDDVSLIAFDEEGKVIPVPGASDWERERVSVTVQRLKLNEHVPLAEERRKVWQKVDALIDEFFAAKAKCSTGNNPAAKAKLLEVRSRVREMTQRSAELSAVARWCIQVRNEPQLSRLVA

SEQ ID NO: 81958 - protein, 544 aa, Escherichia coli 179100
MINKMNLETCYVDFLELESHVINEDYLKESVELQKLISTLNESKFHLNKIGIHDFKRIRELQISLEDDLTVFVGDNGFGKSTILDAIAIVLSWLRSNIEKESKPGTYIKSHEVNNSVDVEYASIDANIKLKDFNTSILITKAKEGAYYSRNNELLEVKKLASIYRLVNKYVDNASLPLMAYYSIARSYIGGGVDRKRKNAKTKTVWSKFDVYDEIEFDRNDFTDFFQWLVFLHNRASQEKLSESQTTINALFSDIQSLKATLTQLSAIDNIDSTVIKGLELSLKEKLNYMKSLQSGEHKFNNAVSLYDSVINTILKFLPEFQWIKLVYGDDDYKIILKKGEVELDIQQLSQGEKTIFTLVGDLARRLILLNPNLSNPLLGYGIVLIDEIDLHLHPQWQQTIIERLTSTFPNVQFVITTHSPQVLSTVSSRSVRILQEVEVDGVNDLIVSHPDYQIKGVSNQDALLYGMRTDPIPSTKENGWLEEYKKLVELNRYSSDEALLLREKVIKHFGLDHPLVQECDDLISVLEFKNKINQHFSGSKDVK

SEQ ID NO: 81959 - protein, 186 aa, Escherichia coli 179100
MQGKLCAYCEKKIEHHKSGGKNKVERHIEHFYRKSYYKNLTFEWSNLFGSCGEPQRCGFYKDKQKYNDDDLIKADRQNPDVFFHFLENGDVHIREGLNEKEHKMAEVTLRVFNLNPSSGGVKAERRRAIELSMTLIKELVGCASQLIESGCEIEDVRSMVFDEFKKNVKDRCFTTAIKHVFENRMP

SEQ ID NO: 81960 - protein, 583 aa, Escherichia coli 179100
MQLLRICIPNFRNLRGLDIAFATHLSAALGAPADAQPKPIRSHALIGQNGTGKSNLIEALITIFRDVDLDREAAFDYTLEYSIRDHVVRIEADTVTQKRPYVWVDGKAETQGYLLKNRELLPTHIFAYYSGRNERIEALFQEHQRRFNLRQEITTDEVLSEQLLENFTGSEADIRAVEEAKRRRESRLKQAGDDRLRRLFYCRGGHSQLVLLACLLSDDQVFQKVLKNLHIESLESALFVLKEPHRLREKRRSGKFDEQELIEGDPRFWYSRGNVVSEFLDKLWQVSWAPIEQEATKQIDFRGRSEKQKQLYLFVPNQDKLKQLGELVGSTDSFFRYAEGAYIGDLIDEVRITVKKRDEYGGKGSFTQLSEGELQMLTVLGLMRITREDHCLFLLDEPDTHLNPIWKLRYFDDIEGVLASDEGALVQGESQILITTHDPMMIGSLKREQVHILRRDKGRSIVDTPDEHPQGMGVTGLLKSELFGLSSTLDIETERRLFRRNELFVKSPRSPEEDTELSRLSTELADLGFSTADFRDPDYALFVRKMAQHRRFRKPTLTPEEQAEQDAIADSIIDEILREEEDQ

SEQ ID NO: 81961 - protein, 285 aa, Escherichia coli 179100
MIWIDLEHKQPTDTDIPNWTPWTQVRWEAWLAKSAQLVTDLAALDEAGKRDERNALIDANSAHWGALKEWLLALSAGKCWFSEVRELYSHYDVEHFRPKKEAKALDTTLRDGYWWLAFDYMNFRACGNVGNRKKGGWFPLKDGSLCSTYSAPCEESETRYLLDPIDDNDVALIAFDEEGKVIPIPGSSEWEQERVNETVKRLKLNEHVPLAEARRKVWQQVDRLIDDFAKAKARCCAGNNPAAKAKLTEIRARAREMTNPTAELSAVARWCLLMRNDPQLSRLVG

SEQ ID NO: 81962 - protein, 465 aa, Escherichia coli P0299438.11
MRIDKLSLLNFRCFKQLDITFDEHITILVAPNGAGKTTVLDAVRLALFPFIRGFDASLYVKDKSLAIRTEDLRLIYRQEALNMEMSSPAKITATGEWASGKTATWMLDKRGEQTPHEDKMAAQLTRWGEQLQKRVREEHSLQQVELPLMLYLGTARLWYQERYEKQPTEQRLDNSAFSRLSGYDDCLSATSNYKQFEQWYSWLWLSYREHQITQLESPSAKLKEGVRVQRMKEAIQAIQQAINCLTQQVTGWHDLEYSPSHNQQLVMSHPQYGKIPLSQLSDGLRNAVAMVADIAFRCVKLNPHLQNDAALKTQGIVLIDEVDMFLHPAWQQQIIQSLRSAFPQIQFIVTTHSPQVLSTVKRESIRLLEQDENGNGKALMPLGATYGEPSNDVLQSVMGVDPQPPVKEKADLQKLTGWVDQGKYDEPKTQQLMVALEVALGEKHPQLQRLQRSIARQRLLKGKAQ

SEQ ID NO: 81963 - protein, 201 aa, Escherichia coli P0299438.11; identical to SEQ ID NO: 81537

SEQ ID NO: 81964 - protein, 465 aa, Escherichia coli P0299438.3; identical to SEQ ID NO: 81096

SEQ ID NO: 81965 - protein, 201 aa, Escherichia coli P0299438.3; identical to SEQ ID NO: 81537

SEQ ID NO: 81966 - protein, 465 aa, Escherichia coli P0299438.5; identical to SEQ ID NO: 81096

SEQ ID NO: 81967 - protein, 201 aa, Escherichia coli P0299438.5; identical to SEQ ID NO: 81537

SEQ ID NO: 81968 - protein, 465 aa, Escherichia coli P0299438.6
MRIDKLSLLNFRCFKQLDITFDEHITILVAPNGAGKTTVLDAVRLALFPFIRGFDASLYVKDKSLAIRTEDLRLIYRQEALNMEMSSPAKITATGEWASGKTATWMLDKRGEQPPHEDKMAAQLTRWGEQLQKRVREEHSLQQVELPLMLYLGTARLWYQERYEKQPTEQRLDNSAFSRLSGYDDCLSATSNYKQFEQWYSWLWLSYREHQITQLESPSAKLKEGVRVQRMKEAIQAIQQAINCLTQQVTGWHDLEYSPSHNQQLVMSHPQYGKIPLSQLSDGLRNAVAMVADIAFRCVKLNPHLQNDAALKTQGIVLIDEVDMFLHPAWQQQIIQSLRSAFPQIQFIVTTHSPQVLSTVKRESIRLLEQDENGNGKALMPLGATYGEPSNDVLQSVMGVDPQPPVKEKADLQKLTGWVDQGKYDEPKTQQLMVALEVALGEKHPQLQRLQRSIARQRLLKGKAQ

SEQ ID NO: 81969 - protein, 201 aa, Escherichia coli P0299438.6; identical to SEQ ID NO: 81537

SEQ ID NO: 81970 - protein, 465 aa, Escherichia coli P0299438.7; identical to SEQ ID NO: 81096

SEQ ID NO: 81971 - protein, 201 aa, Escherichia coli P0299438.7; identical to SEQ ID NO: 81537

SEQ ID NO: 81972 - protein, 465 aa, Escherichia coli P0299438.8; identical to SEQ ID NO: 81096

SEQ ID NO: 81973 - protein, 201 aa, Escherichia coli P0299438.8; identical to SEQ ID NO: 81537

SEQ ID NO: 81974 - protein, 739 aa, Mesorhizobium sp. STM 4661
MIKVDRDSVPFPEVLRRGRGGAADEEFQKASAFYSEFDKKRQHSRFEFKLYRHKTVRDALAKLFNGKCGYCESQIAAIGYGDVANFRPKGGVLDAGSTYLPLHYWWLTNEWTNLHLSCSMCNRAKGGRFPLEDEKDRAPVLASASDLLKERPLLLDPCVDDVENVLLFSSNGTVSSSDPRGLTTIEILSLNRVELVKARQQTARAVLSQLEVLLLSEGSPDGPQINTEIVNRLKEMMSPEAPYASMCRQLVSQAIAAKPNGMVALAFANDPLAASVKPFTSGEERAAQTALNKFQADQESYSLEAETEQTVAAYVSTRDRLIESVRIKNLRAIANLDLNVVDGSERAPWLMLLGENATGKSTVLHSIALALVGERYRGKLVDALHLDVPRMVRNGADFGEVSIRLTGATEPRTLRIQADGTITATGREAQLMLLAYGSTRLLPRKPDSEVQGTNYARVENLFDPFIPLVDAQQWLLTAPAEAFDYAAGAIKKALTVDVERELIRQDGEVGIIERGALIPLPRLCDGYQTVIALIADILSVVLPAWKTPDLAQGLVLIDEVGNHLHPSWKLRFVESVRSILPGMQVIATTHEPLCLRGLHHGEVAVLQRGPRGGIHMRADLPAIDGMRVDQILMSEHFGLQSTLDPSLQSLFDEYYALLREDDPSPDDRQRMETLRNDINQKQKLGVNERERRMLEAIDRFLARRIEVPDPIELAEREQSLDAELSSIWSEALVRVEGAA

SEQ ID NO: 81975 - protein, 356 aa, Mesorhizobium sp. STM 4661
MIPIVRDQAVAACAALNKIGSNGLTELEHALWFFGGIAPEKNPLPPKPTKPPAFSVYKEEPVRDALRALFGTRCAYCESNYPHLAQMEVEHYRPKGGYIDEYGVLKKPGYYWLAASWGNLLPSCIDCNRERKQHHRSRDGKIVKSKSGKANRFPILPGTSYATTPAAVALERPMLLNPCEDQPHLHLQFFADGFLQPALTAEERAAGRGKSTIDVCGLARDALVGVRREWALRTKGAMEAVLRADRNRRVYPHDPVMAAQLTDAETNLHTFVDGEAPYHAMTAAMMAAFVEVRSLLDPYFTALEAWRANQSVGNRQALLERATAIQQLRRDARFDEQLVNFLLDKAGASEATPGRT

SEQ ID NO: 81976 - protein, 390 aa, Rhizobium freirei PRF 81
MAPTNLQRLGLADDWPPAEKVAILVGPNGSGKSRFLRELAIQIRGDRDLAIISNTAHDRFLGLRGLKRISAGRGNRSPKSIVKRAIGRTIDQPDSRFYQIGAILDYCGYRPRFGFIVDTDPFSAHLDPRNFLFDPNDYDAVVAFLQRHNPKEVLWVDQGESAFSFSLGREFGAILRSEESLRRQGRIRGIQVFLERRDGEIIELLNASSGELSLISSLVFLISSIGQEPVILIDEPENSLHPRWQREYLEKILAAVSYRNATIIVATHAPLIVTGALGTLPNIVTVFQIRDGEPSALDLKEAKASAANVEGVLWRAFDVITPASHFVSEEMVGVVTGVERGEITRDSAIALVNDMARNSFDEKQRQFFSAVRDLIGQVDAQRREAEKRDG

SEQ ID NO: 81977 - protein, 219 aa, Rhizobium freirei PRF 81
MADPYLPALEDFELNADETAAVAKALEDDKPWDWKPEDQKELQALKSAKDKILAYHLSRHGGNCCYCRLNLNGAGPYMTDREHILPKGKPVYKPFSYSIWNLAAACKRCNMQLKRSGDAFVVDPDDSTKFQDSENYRFVHPNFDAYGKHLIRLQAQADAKNIVIFVKTPGSEKATYTHNFFALHELQVDSFDKAQGLEEENLETELAARVRALAREFDQ

SEQ ID NO: 81978 - protein, 841 aa, Pseudoalteromonas agarivorans S816
MQTHNEINSLARKQAKEIWRLLEYIRGSAPIASYRSLAYMVLFIRYMQDNSGQHFNVPRFYSFDAIGQYIDELVLTCIGLGLFQRELGYIASEFTIDILRKNNRIEGDLVKLLAQSNGVNRDKYIVKQTLDELNRLFAENEMRSGSEFYTPKDINKLVTTLGMQYSPRSVCDPFAGAGSTAFSFYEATNGKVQIDTQEVSTDIYFQLVVTRILKGIYGTDFLEDSISHPKYKSELYDLIVSFPPFGLKIPSSTREAIYKDSLNEWLALTEELPMTRSDWLTTLSMFPSLGSKTKLIIGMSLSSLTRVGSEARIREFLIDKNVVDTIILLPKAIHYSTNIPTVLLIFDMAPQKNTKSVRFVDASLFYEPHRGRNLLSDENIAKIFDATVSDGRFSNTVTREKLARNNFNLNPSLYVDKTIKVSKVKLTNFRGYKDFTVPLHGSLTVLVGENGAGKTSILEAIACGLGPFLTAMPEAKGRLIRKSDIHVGIDGVADFSRISIDTNSSLSWDLVTRGTEKSTQAKIGTQALSDFAKQIVNTDTEYPLIAYYGTNRTLSNTGNKVSISPFEELQRSEGYDSALEAKINYGPLKNWFTKIEVDELKLRDKKKNHDIIHPAKVLVARAVREIVNRVQNVTFDKSINDVVVTWENESGENISLGLEQLSEGYRNMVALTIDLVRRAYLLNPSSKAPLSVVGVVLIDEIELHLHPRWQQVVLEDITKLFPNIQFVVTTHSPQVLTTVRGESIRVVSNSLSFAETVNSPFGGENSRVMKQILHVNSRPITDVSRKLKEYFDLIELGKGEDREALVLREELSKLTDGTEPMLVEADLAIKRVNWMKSRKSQ

SEQ ID NO: 81979 - protein, 251 aa, Pseudoalteromonas agarivorans S816
MSIKNIPEPERLKEFRLANPNATWNQLKSDSDVNNALKVTAIKKTAGLCVYCEHKLIAKTDYQIEHFHPKKGNNNSDFGAGKPNWAINWDNLYPGCLGGTAQVVHFTEQYDIDFRTGANRRNKGRLTCGQKKGEIDPEGLIIKPTELNNRDPIFLFNGADGSISLNVEACRRQNISTELGESQIVRLNLNSQRLKDARLELASSLRTQFDKAFQFDGDAIEELVEDWLALNENEMYELPFISMISSKYERS

SEQ ID NO: 81980 - protein, 389 aa, Eubacterium plexicaudatum ASF492
MEQIFLSEIRIEKVRHLQKITIDISNEKPMHLILTGKNGSGKTSVLEAISKYFDYIMTVNDFENVPAGTVVWKDEFDDDCKIVDGINLTFNRSQKELEETLRKGLFIVAYYKDKRTFQAEPPVHVEKIKLKDQYKITENPGRLFIKYLLDLKVTEALARNNGNFEKADRIKTWFTDFEGLLQRIFEDLSLQLIFEEDTFSFFIREKDRELFDFYSLSSGFAAILDIVLDLMLRMEAHLNRTFDFTMPGIVLIDEIETHLHIHMQRSILDLLTTIFPNVQFVITTHSPYILNSVDHCVVYDLEKNIRIENMSGYPAEGIVEGYFESESYSKTLMDKVKRYKVLIDIAQPTEKERIERANLRMELKQISGDLAREAKDAFEDIERSRGGTW

SEQ ID NO: 81981 - protein, 234 aa, Eubacterium plexicaudatum ASF492
MVKFRRNSTQKAKAAVIALNKAKSSRKSYNTPEVNAALYEMFYGKCYICENKENFSYQIEHLRPHRGNIELEYDWDNLFLSCTHCNNIKNAKYDPILDCSKVDVDLKIAFRKIGYFGTDEQYEFTALEDGVEVKNTIELLKETYYGNTPQKKLEAVHIRRKLRRNLSDFKNLIREYEEAADIDKEDYKHAIREEVSCSAAFAAFKRWLLWDHKERYEELLPFCGMSLESNHNLK

SEQ ID NO: 81982 - protein, 435 aa, Eubacterium plexicaudatum ASF492
MQIERLRIKNFRCFEMLEMQLHPKCNVLVGMNGAGKSTILDALAVALGGYLSGFDGIKSNSILSEDAHYKMYCIGSRIEPQEQFPVEIYAEGIVEQENVIENDLKTKISWQRELNGKDRRTTHGNAKPIVDYARALQNRVRAGDVTCRLPLVAYYGTGRLWLQKRNRTKYKKGEKLNRQMGYMDCIAAESNEKQMMQWFEEMTYIQLQEGMVIAELEAVKRAICNCYLNVNSSVTDAKLAYDVRSQELEIYIYHHDEAVKFPVRMLSDGEKGMISLVADIAYRMALLNSNLLDDVLETPGVVLIDEIDLHLHPAWQKRVMGSLLRIFPNIQFVVTTHSPSILLNLSRENIWILNQNEIYQPQDMTYGRSVEEILREVMDTNVKPDEVVNMQREFEHAIDIEDYYSAKQILDKMKNIMGENANVVIENQIVLDVEK

SEQ ID NO: 81983 - protein, 227 aa, Eubacterium plexicaudatum ASF492
MIYIQKKSEPDLLLEYRYQENARFDNMDAIVKKQLRESLLKEQGYLCVYCMKRIGDTKDVKIEHLEARTPENELQYPNLLAVCMGGEKGPVKARTCDTKKGNRPIFISPLSKSDMQRIYYNNSGEIHSSDTTKYKFEFQDSNGRYHSGYTSPERDIHECLNYENGAPMIGRKTALRKFQKLLHPYKDKKSKRAFLEKMKRTYSVQSEYMEPYVGIIRWYIDKKLSQL

SEQ ID NO: 81984 - protein, 430 aa, Clostridium sp. ASF502
MKLKSITLQNFRGIEKLTIFLDGKTTVFFGINGVGKSTILRAVDLLYANIIAKLIGAGKRRTAELNCEDISYGKSKAGINAVFSFEDGTEMKYSRSIDRAAGKKHDITELKLLVEKFEDSYLVKGHDDGNGNWIEQVDNKNMPVFVNYGVNRIVSDVPLQVSKEQFAKLDAFDKAMESTIDFRNLFQWFRNQEDIENQAKVRENAEYEDKSLFAVKRAMLAMLDGFEDIHIDRSPLAMKVRKESKYLTINQLSDGEKCTIALFGDLARRMALANQGRENPLEGTGVVLIDELDLHMHTSWQRKVLSVLKNTFPNIQFIITTHSPQILGEGDDTFNLMYMFKDEKKISLRSYKSFIGWDTNVILEEVMNTASVNQDIKRMINKMYALIEEKEFDKAEELADILDDKSNGYAEGVAKARVLISRGRRYEKNK

SEQ ID NO: 81985 - protein, 222 aa, Clostridium sp. ASF502
MKRINKQESPQWFEDWKRNFKAENNRNAHYKNDFSADDADGINRRRRLRESLVNEQGKICCYCMRRIYTDSSHIEHFLPKDFFADQDLSYENLLASCNGEGTMATEDEHCGHRKDNWWREDMISPTDIEVEKIFEYLPNGKMNSVRGRATSNIAQEMIHNLGLDSFHLERDRRQAIEASEVFDDVEYSEEEIRSFIEYYSNKDNGVYVPYCKAIIDCLEEML

SEQ ID NO: 81986 - protein, 393 aa, Escherichia coli SWW33
MKIQKIDIKDIGGIKRAIINFDSSMNIICGPNGIGKTTILDSVAHSFISTNSYVLKRHAQSTDGQINIVLNDCDNIRESHISLANFDPEDCSFVHGLSEAGRKVIYLNVSRMFKYVSLSNISKDEERQDHSIYTLLTDGISVADMKNWFAKRCLFVNTPEALSENNKVNLELAKKCFSLLNAEYKFSRVDAKKFDVFVSTPNGEIWYEYLSSGFKSCLSILFGIIKEIELRMPDEECLAQHFDGIVLIDELEMHLHPEWQSKIVSVLRDTFPATQFIVTTHSPHIIQNAEPNQIIALGTDSNGYTYVRELPSNEFGYTGWTLDEVLKDVMGMEDTRSQKLQSMLAAFDQAIDEENKIEAERIYKELDRALHPANVLRKMLSIDLSSIIEEDNK

SEQ ID NO: 81987 - protein, 248 aa, Escherichia coli SWW33
MIKLERNFTPLFFSPQNVSRLTEKFKSSGTHVWHHDDVKNSLMELSDKKCAYCEVKLGEKSTYHEVEHFKDKNDYPDDVIEWNNLLPSCRHCNGSKGTHDVVEEPIVNPFEELPAEFFYIKNFRMKGRNEKGILTIDVLNLNDREHLVKPRCETGSIIAEKIEDSLTLFEGYLLNPTSKNKRKLIGTVRGILKECQRSAIFSAVSATVLHTSEDYLTLRDNMMAHKLWDEDMENLHIMSSNIQLPTTA

SEQ ID NO: 81988 - protein, 336 aa, Marinobacter nanhaiticus D15-8W
MAKIFLSLITSAQEDISRPERICDVLEYLGYSPILTARYHFDIPIIKVRELFNSNNPVGHFIDEFLADNERSNPIRRSRFRSFYSDNNELSIEKIERFLDIYKRLDFSINKPRLEVVLMRDGVFLSADSITIQDDLVFLIESGLARLRNINLEKSKSHEAFRIGDASSGEQSVVMSILGIASQITDGALICIDEPEVCLHPEWQEKYIELLINTFRDYKQCHFIIATHSPLIVSKLEDENCYLMKMEDGELVHGSLVNNQSVDFQLANTFKTPGYKNEYLSRELISMLSSFGESGELDPDIIKNIKKILLLKDMLNDSDPVKKLMDMAEEVMGEVS

SEQ ID NO: 81989 - protein, 231 aa, Marinobacter nanhaiticus D15-8W
MTGRLVKYSDDIKAKIDAYNSLEPMEKKGSYWDKTDDSELTKAKKHIKDHYILTQDYTCPYCRQRNEVDHNAVWDTEHIIPKDQYPQFMFSPLNLCVACKDCNQSKTNKNVLKNPTRKTLPTKSEDYIFVHPNLDEYKNHIKILKSSLFFIPLDSKGKETIEICGLLRFLYRFTDYGNISLEVKNKIGLLHKELMDAKTGIEEHFILSCIEDVVLRGKEIAKTSHLEAMSS

SEQ ID NO: 81990 - protein, 230 aa, Aeromonas diversa CDC 2478-85
MTEEQLHNLEIAKKAFSLLSEGFSFKKVLASSNEIMIDSPSGEIYYEYLSSGFKSCLSIIFGIIKDIELRFKSPCIKADEFDGIILIDELELHLHPEWQSKIAGILVDVFPQIKFITSTHSPHILQNAKPNEIIALAANEDGVYRRQLSGGSYGFQGWTVEEVLIDVMGMEDTRTDTYKDKLSEFERAITEENYSAAEAAYQELDKLLHSENYLRKLLKLELISIREVGE

SEQ ID NO: 81991 - protein, 247 aa, Aeromonas diversa CDC 2478-85
MIKLQRAPAPPYLSAEKVAELTAEFKSSGKSVWNQHHIKEPLLASSFGKCAYCECPLETESNYMEVEHFEDKKNNPEKVVDWENLLPSCKKCNGSKGAHDVVADPIVNPYRDDPKEHLALRLYRLRGISEIGVCTIQVTNLNHSDRLVFSRYKIGEKISELIETAFDRWQVYQEAGDTRSKNRLLGVVEGLLKECVPQASYAASTATMLLTDSSFLELIDEMKAASVWSEDLENLLQNALPIVLDCA

SEQ ID NO: 81992 - protein, 457 aa, Acinetobacter calcoaceticus NIPH 13
MPFRIKNFLFANKVIELSKDQTSNSEHTFSLITGINAVGKSRLLTSIIQSYLINGKKYEMFKVDSILIDHPIKMPNKIIAITNSLNDKFPLKNSKSYIYEYFGNKSNGNIIYDRYAFIKKLITRKDVNHHCICHTFYYLGFLPFLEIYFKHTLKKSTLSPLEIQEIYNRNANFFEKENLNLNIENPSEKELLLLYTLRKIYYKKKSIKQSEFQLVYNIFLGNNYINFNKFSMKCYYNYPARASSLSHEELNILLDNDVLKITDVNLHNYTEEDIFKNKINENNLINFNNLSSGQQALLNIFLSLSSCIEDNSLICIDEPEISLHPEWQLELIIKLQELFLTYEGCHFIIATHSPQIVSGLCSESGYIIDLENNITYSKYEYSKKSSDFQLAKIFNTPGHNNEYLIRIALTILSKITGKIDLNKSDVDNLNLLNNSLNELPENDPVSFLIEQINALVK

SEQ ID NO: 81993 - protein, 218 aa, Acinetobacter calcoaceticus NIPH 13
MKVYNYNPSEQSIIDTYDKEDHNFWSFKVKELAPLRLNLRTHYLAEQKNRCCYCKMLKQEKHGNTWDVEHIVPKALFPIFLFEKQNLSLSCKECNDEKSNKPVFSNNSHEYKIYPTESDRYSIIHPHFDKYSEHMSIHMSPNGQIMHVPITEKGVTVFHHCKLVRFTMQFYNVQDLNTNLLITFSDFIEQVPNLTPDVAKAFFTASLPRVLSPDFIDC

SEQ ID NO: 81994 - protein, 418 aa, Acinetobacter bohemicus ANC 3994
MKYIKHISGIVPHANKNIDIPINFKNLIITGNNSSGKTQFLLALKEKLDIYIKEKLIQEKDKIISRINGYKKDLESFQKGSSDYSNRERWLENELNKLNKIDSGITIEIPEILDITYKFEKKVAIIITFDAMRTSNISHANQTTSISNEINNAQNNFTNNLGNKLEQHLYNITVNQSLSLTHKKDSSLFEKYTNWFKSFDENLKFLFENESTHLFFEINDTENKYYIVKDSQKFSFQNLSSGYQAIFNIYSDLLMRTEFFNIAPSELEGIVIIDEIDAHLHISLQKLIFPFFTRSFPKIQFIVSTHSPFVITSTDNDTVVYDISSGDFFEEDLSRYSYESVIKGLFHVNPISSDTKNSIEILKNLLNENPSNYENIRSIVKSLIELEKNDLLDKSLKNLYLQAINLLADNNQLEDLDV

SEQ ID NO: 81995 - protein, 229 aa, Acinetobacter bohemicus ANC 3994
MFKVSKSARPTDWTTKDYKDPVVVKQLKKDFYGKCYICEQKHFPNLNVEHFIPHLDDETLKLDWNNLYYACSRCNSIKNKYYDDMLDCCNENHLVEEWIKVYYRMPDEDIEVINACPDDHSYREKAETSKALIARCFNNANSGIQEVSKEDLREKIIEVHNEFLDLRREFFKEIDNWQDEDKIKKADDIKHRLKSHYAFSAILRGYLEKDSKWKNSLDEIEQLKLKQSA

SEQ ID NO: 81996 - protein, 440 aa, Acinetobacter sp. NIPH 236
MQIQSFSLKNIGRFQDLSVSLAPTQRYPSNITVFIGNNGSGKTSLLKSVATALTWFVARLKHDKSNGTPIPESVILNTANAAAVEIIVNDKNLQQQSQAYTWRITKNRTARKAEFTTHLTELNQLTDHYKQWLGEDDQSSLPLIAFYPVERSVIDIPLKIREKHQFLQINGYDNALDNAVDFRRFFEWFRDREDVENENFKNMVQAYKEASIEVVHRAYMYEDDQLNAVRRAIEEFMPTFRNLRVQRKPRLHMSVDKNDKTLNVNQLSQGEKSLMALVGDIARRLAMMNPSLENPLHGKGIILIDEIDMHLHPQWQRSIIQRLQTTFPNCQFILTTHSPLVISDTQNILVYDLDGQDITALPSLYGQDANTVLLQYMDTNYRNPKVAEQIIQAMDAIQNNQLEQASQLIETLKSELGSDQLDVMRLVAMLKKRTIAKQGK

SEQ ID NO: 81997 - protein, 215 aa, Acinetobacter sp. NIPH 236
MQQINKGSEPTELTEYKRKNPTHRYDDLGDDPEQIRLAIRQACLAEQAYLCAYCCRQVGVKDHDCMNEHILPRQGYPQFSFAFNNIVASCTTKGCCDDAKENQEIAISPLSPRCKTEFNFNLSGTVTGLTDDAKQTIDVLRLGDSLQQNQKLVDMRKQAIANFLFTQSINIDDLIEDDELLTLLIDDLHQVSDGKLQPFAPVISKALQNWVDGNK

SEQ ID NO: 81998 - protein, 475 aa, Acinetobacter sp. CIP-A165
MPSIEKIIYNEITLPLKGKNLIITGNNGSGKTCFLTEVSNNLRGLKSSFYNDLLRKKLISEIQFGAKNFHSILNFNDIENEFIEELLADARTLSFNELYEFLKFFSNILKNRYQIFKGSNSDLQEKGQIEKIAKINEKLSNNYFYIKEPQHIDNYFNNTNKLINSYINKENNLEIIGNDLNKDMIYYFDAARVSVKDFSFDQFKTYDEYAQEHSITDIEGALEAYLLLNKLALLSLSRSIKINSINNQKIYKLERWFKKVESDLKWIFENNSTKLIFTRTGNKVLIQQDSNFFNFDELSSGFKAIFNIYANLLMRAQIKDLAPESLIGIAIIDEIDVHLHISLQKKVLPFLIKAFPKVQFIVSTHSPFVITSTDNETVVYDISSGDLFEEDLSFYSHDSIIKELFHVNPESNETINISKFIIEFVEKDMHRDNLLEIKNVLDRIEVDLPKLSIESQLQYIVAKNKLAKLSQEGLN

SEQ ID NO: 81999 - protein, 224 aa, Acinetobacter sp. CIP-A165
MFSVSRPNTVPKSLTGTNKDYRSEEVVVTLKQMFHGKCYLCERANILDIEVEHLDPHRGDVIKKFNWNNLFYSCSRCNNIKSHTHTNIVDCSLINDDVSRYLILDCPITNNKSIKVTVKESGITSQQPINFTVMLLDECYNNTSTGIRGISRSELIKDIQRYSFQLQKLKNELLFPTEPLAQSEIDLKIEKLKAMCSPQFSYSAFWKWAITLDEDLSQLVGNVF

SEQ ID NO: 82000 - protein, 521 aa, Acinetobacter seifertii
MSARHLLNNAQDGNFEAAVQVFLNYKNGTKDFEKSQEKTQEAFEAIIKILDSDFFLNTLNISNFKKISDLKINFNKNLTVFLGENGVGKTSLLESIRKNLMWIAATTRKENSNGGTIDKDEINNQIKEEGAFIDCEFQIGSSYKFKGRIARSPEGITSDLKSELTQYRTIGRYLRILNEYKSLNLPLLAFYGIDRLPKDITKAKFSDSDKIDGYDGSLNSKASFNIFNEWLIKLLKTRNSVGNDSEKLKVQAQVDFLLQTGADKKNHPMNELYQELITVLKFYPDNTKNKSKNVIEFLEELFRKIYPDLSRIELINEDDGNDKVACHLKDEIIFLHQFSDGQRVLLGLLGDIARRLLLLNDTSELPFRGRGVVLIDEVELHLHPSWQQKIILILKESFPNIQFIVTTHSPHVITTVEPECIRSIYMDSETKKFGYHIPTFTKGAESNVVLEDVFDVNARPKDVDEVQWLERYTELVNADQWDSQEAKNLRFKLDQWGKNKEIELDKLDIEISLKKFKRSKK

SEQ ID NO: 82001 - protein, 240 aa, Acinetobacter seifertii
MKHITKSECPEGLARYLAENPDATWEDFKNEDQVSYKNVCDIIKNDQSGICCYCEIDFEISDESPIKDFRVEHLYPKSKTPIPITLENAHLTWSNLLGCCHGGSMNHIDDNRYTAPHLHCDAVKGENIWTEQILNPLKIPQNEKLFTFETNGKIILSDQCPEDFKEIAQGSIDKLNLNEKSYLLKARGKVRDTLKAEFARKVREGGLSEQQALDELKTELALNTYSGMKFYTCKLDFVSY

SEQ ID NO: 82002 - protein, 484 aa, Acinetobacter seifertii
MKYIQSINAKLDFLNHNVNIDLKGRNLILTGKNGVGKTRFLNQLNNTVLSKLIHDIPHIFQHHYMQKVNIINILKSETSDLENSFYYKNHIENLKNNINPLNLLNFLEELLGKSDSYNPQETEEFIKKATELKNIILEYKTFLQNSNLNYLPIHSPIYNIDYLINEIGSTHNQENISLAVNGIGNLNQNIQASKVTFNFFPAHRQSQITPSTNTTDLNQYINSAKHEYSSKLGQFLEQYLLNIRIEKSLALSEENDNEHADQIDSWFQKFDEDLKFLFEDESTKLKFDYKTRKFSLMQSHREFTFQSLSSGFTAIFDIYSDLLMRSRLLNILPNELNGVVLIDEIDAHLHISLQKKILPFLTKSFPEVQFIVSTHSPFVITSTNNDTVVYDISSGEFFEEDLSLYSHESIIKELFHVKEENENIKILSDQLLQFIESENLTQDLNTIQELLNEINKDFEKLSVELQLQYMVAKNKLAKLKHEAN

SEQ ID NO: 82003 - protein, 223 aa, Acinetobacter seifertii
MFSVTRPTTFPKSLTKSTKDYRAADVVEVLQDIFFSKCYLCERKGFSDVNIEHRDPHEGDLIKKYDWNNLFYACVRCNGIKANIYKNIIDCCQTLDVAQAIELHCPIVNNDDHKVIVTVGSLASTIEIESTIKLLDQCFNDTNTALKGISRHTLIKQIQKYQTKLLIIKDELLDDSLILTSSEKNLRIEKLKVMCDPEFPFSAFWKWYITRDVDLSKIVGNVF

SEQ ID NO: 82004 - protein, 520 aa, Acinetobacter nosocomialis NIPH 2119
MKVDKLHIRSRFKNLENVKVDFDENHLMTVVVGRNGSGKSNVLEALVAIFRNLDLGEAPPFSYQLNFQLGEEGGIKWYDIKVDADPSRGALSKQYQVSVKDKHNSEAGFTSIPFSKVKRDKKTKQAEYLPNFLFAYYSGPSDRLEKYFRKHRDNYYRDLLYNKVDLKADIRSLFYAKPYYSQFVLMAFFLSEENSPQRKFIKEHLGIEGLDSIHFVMRQPEWATQKGELFWGARGVVRRFLDELIQYTLSPIKVTRQEDTSLTGSNIRNEFFHLFLPDLKALHEFAKDLSADELFKMLESTLLSEIISKVSIRVKVSTSKEPLTFSELSEGEQQLLTVLGLLKFTGGKDSLFLLDEPDTHLNPSWAVKYLKFLHEFVPNHETSHLLMVTHHPLAIAELEKEQVQVMKRDDKNQISATMPDENPRGMGINLILRSDMFGLKTTLDDDTNQRLIKRNALAAKETLSKDKIVREHGFPAEDEEQYFARLNSELEDLGFNLATDDPDYLDFLRNKYHARHEENH

SEQ ID NO: 82005 - protein, 269 aa, Acinetobacter nosocomialis NIPH 2119
MRWICKDEIEECLTQVWRDLAEQAKAELMAAPDEAARKVILKRVTSSNVWRDFYDLLPEPLKRKCWYCEAEEIRSDMPVDHFRPKNKVEDDKQHDGYWWLAFDWTNYRCACTFCNSRRVFDETEGGKACRFPLENPDERAFTPADQIKLDNERPYFLDPFNPDDEKLLWFDPDGKPTYNPLATTEQQIKVQNSIEIFHLDQIKIVRARNKIRLEVERQVSKIKNNEDVQTAKARLRRMVRDTEMLSRAAIVYLRMHRDIPEVKNILNLD

SEQ ID NO: 82006 - protein, 429 aa, Acinetobacter guillouiae CIP 63.46
MKFKSIQLSEWQQFKKIQITFHPKVTIITGANGSGKSTILKLLSKHFGWYLPFLGTPYLVKDQGVFKYKSIFRPLITYTFGSIQADHTLNQTLGFIYYSNNKSSTINIQNQNVDHPQYEINFSMMQIVDGLHINSHRPMPKYEQVQNIPTNPMDAHNAYERYSSVTKELLSNNYVSFSPTYRMKEAIISMAAFGPGNRFVQPNEKIENIFSGFKDILRRVLPKELGFKDLSIRVPDIVLVTETGEFVLDACSGGIMSIIDLAWQIFLYAHDKKEFVITIDEPENHLHPSMQRSLLNDFVEAFPNGQFIVVTHSPFVVSSIKDSHVYALKYEDFNDLEKPEKIVKKVVAHKLDLNQKAATAHEILKEVLGVPVTLPQWAEQDLQRICSNFTQHDVTKAGLAQLRSELHQAGLGEFYSQALNNIVESNFHD

SEQ ID NO: 82007 - protein, 222 aa, Acinetobacter guillouiae CIP 63.46
MIKLIKLDKPAVLIKHSNKWKAQLLKNLDAGIASTNYLLSRYSDPEIKHKIIEETAGKCAYCESKLLHIHHGDIEHIFPKSLDQSQRYEWNNLTLACEICNQNKSDKDPNLRNILNPYLDEPEKSIIFFGSFAKNVNIKGFCTIKYLELNRSDLISERNDRLLDIESIINKLTDERIPLDMRKAIYQDLITTETNYSKKYAAMVRSAIRCFDIGIPPEVKVL

SEQ ID NO: 82008 - protein, 300 aa, Acinetobacter lwoffii NIPH 715
MQQSRKDQVFVFDASRVKNDRLIMKVFKDYEDYRLNKNRDNIEEALEAYLISKKSQLIQFSEQQPKLQELKREASKLLHWFKKVEKDLKFILENPDIRISFNHQSDQVLLVDSQKQSFFTFDSLSSGFKAIFKIYASLLMEAQLKNIKPIDLSGIAIIDEIDVHLHISLQKKVLPFLIKAFPKVQFIVSTHSPFVITSTDNDTVIYDISSGEFFEEDLSLYSHESIIKELFHVKDDNENLKQLSDQLLQFINSEDSIQDLNTIQGLLDEFNKDFAKLSVELQLQYMVAKNKLAKLKHEGH

SEQ ID NO: 82009 - protein, 223 aa, Acinetobacter lwoffii NIPH 715
MFSVIRPPTFPKSLSTSTKDYRASDVVEELQDIFFAKCYLCERQGFPDVNIEHRDPHLGDSTKKFDWHNLFYACVRCNSIKGDTHINILDCCQSIDVSQAIELHCPAINNENHKVIVELGNLPTSLEIESTIQLLDRCFNETNTSLRKISRHSLIRDIQKYQTQLLNIRFNLLYPKRPLTQITKHKLVNELKVMCSPDFPFSAFWKWAITRDADLSRVVGNVF

SEQ ID NO: 82010 - protein, 507 aa, Acinetobacter baumannii NIPH 146
MRIRSISFDDKKYELSDSSVSSEENTFTVLVGRNGSGKSRILQRICNIYINSLGFDGRNILNTPINLNAYNDINNTSSLNYGEITYEQNKNIYEISSRQLNGFYNFHISQFIIEKKIKTSECNTFCDINKIIAVSTSPFDKFPVIERHMHWNSNIYEKKYIYRGGKIKVNSQKDYLKNKFDQLGASLINFFLRSNRTKDKISILLEAMNLDEKINMYFSFPWPFSPSEIISTENPKSISDSLSSIRFFKDKGDRITLSQDEETALIENLKLVLNHYNFKEHHRGEKFGLELNLLNRSKDENIELLNSLSSLANYDLIELIDIKFSKNNKSFYLTDSSSGELSLIFNLLSIAGEIENNSLILIDEPEISLHPEWQSNFLPLLSKMFSNYQGCHFIIATHSPQILSSTNDKNVLIINLEYSNKLIKGEEISKMSADYQLAYVFKEPGYKNEFLTRIALTTFTNVNRKKLFSEDDINSLDLLLENMSHLDKNDPLHQLILSLKEMRDLYV

SEQ ID NO: 82011 - protein, 223 aa, Acinetobacter baumannii NIPH 146
MSDIKRQISFSPRISNIVKQKTKDPCFKYTDWSGNDLEEVRKSIRNFYRKEQNGKCSYCRKDLSIQSASNCHVEHILPKSKYIKFIFEPKNLCVICADCNEIKREKETVDYSNEILKKTDIKLYPRVSNSFLIVHPHFDNYNDHIKILCGGHYIDLSPKGHRTIGICRLNRFLHEFGWPDESSTLDEILATANKLFENDDPLSQMRVIKQLGIQINSNLDVFN

SEQ ID NO: 82012 - protein, 399 aa, Acinetobacter sp. ANC 3789
MSIQSIKLKNFKSINELNIEANNQSQVICFVGENGSSKTSLLSLIVDSIISNLNISFPDYDPEDGKRFRSISHMEIHDDKDYYFLNLKYSSGDEINNYERNVFKITKNQNNVDIYNSAEWEGISLNQFHQEKNSPYQDKNSNYLINNIFLYRPSYRYEPDALEVNDLNDSYVFKISTQKKKQTDYPFPFKVAHSGTDLESLIIELLLDNFIGFENSINAFSGIPKILNTVTNKDYGNFQISRHPYRKLWSSTQGLITSLSQGELDLLVTITSIVTRQLYIYDNNEELRKKYKSFHDVPGLVIIDEVDLHLHPKAQENYLKVLTTNFKNIQFLVTTHSPFVVRGLPTDSIVVQLPSGTVIEENFSLMDIDSITNRIFNYKGRFSDNIENDLKKFKELITK

SEQ ID NO: 82013 - protein, 283 aa, Acinetobacter sp. ANC 3789
MRQVDRNLVNAPNNLSNLSAIQLGHLSNHKNIRQDIYAHDDVKQALKALYHDKCYICECYVGDSYDVEHFLPKKHFPNLGYTWENLHKVCTPCNLAKESNQFLVKDTSGNVTDILLLDPSSPSYSIHDYLSFNINGETVLVNKGTDSTLKHKADITAKYLNGELKKTQGKPFEHASKLNHLRSSRIAAFERSLRENRFMSFQQNIMNIHLTLSNYMVKTNLLEIQHDRETYDFLAKIFESFLNEHCPFCSVIREYCFVAFKLSFNDLKAVSECLRLSYGLPIY

SEQ ID NO: 82014 - protein, 588 aa, Acinetobacter sp. ANC 3789
MRLDYLKIGSAKDSPTHQFKNLKDVFIDFNEHQSITVVIGWNGTGKSNVLEALAIIFRNLIQKEKIPAFAYELKYEIGSGINKKYVTIQADPDLEKDKFVFSYIPFQAVLEPSAKEQSYVNLVELKQSDLFEADHKPNIDPKEQSTDLPKPISVSFTKFTAENSEFLPKFVFSYYSGLSTRMKEIFDPYIEKFDKKLRNGKTPEEVGFKHMFYALPIHSQFVLLAFLFKQDEIIKSFLENQLGIDAESGIESILFELRQPSWTNKNDDGDPRLWDAKGVVREFLSELYDLSLAPIKFTKSSKSSLWNKKTREYQYLFLKDMTSFQRLMEHKEAQILFRDLESTYVSELIEAVHIRVKLKKNLDAVTFKELSEGEQQLLTVLGLLRFTNEDESLYLLDEPDTHLNPKWSVEYLKYLEDFMKNESSGVRTNSHIVLTTHNPIAIAELKKQQIQILHRDLDQSIKSKEPDIDPRGMGYAGIITSDMFGLNSSLDTYTQKLLERKNIFTVKETPLTDDERTELMQINNELEDLGFRFSMRDSQYERYLKALHNHEKNKLQQDNQPYSDTSEQLKIAEEIIQAILNQNNEDQT

SEQ ID NO: 82015 - protein, 260 aa, Acinetobacter sp. ANC 3789
MRWIDLTKLNVSTDWLNRATITQATIDSDPDLNSSNYPNIWTELKEELKALSHGKCWYCEARENRSDNAVDHFRPKSKYKWLTYNPNNFRFACTFCNSRRTDHATGQKGGKGNYFPLFDPTTKAKNHAELRSEKYILLDPCDPSSSSIMMFDDEGIPKPSFLATEIDKQRLEESVQYYHLHHSELVEMRKQLALQINEWINEANDYFSTINEPVSRTAFTNKLKDLCRLIKPESPLSTFARCIIQGHKDKPWIDLLFQMM

SEQ ID NO: 82016 - protein, 487 aa, Acinetobacter sp. ANC 3789
MNYINIIIYNDSEIHLNQRHLIITGKNGVGKTRFLNDLRTELEKDKNTESHIQEILREQISELLKKGINNYPLSLNFKNQEIKNINKFRNNYDSEINYKNHLLDIQNLISNKYKFFNKKKKSYFLKTDSTTQYEHLKIENPDSILENYYYYNNPHHIDNFYNSLIKLIDNYLTNTKRISAYPINHSKNIYYFESSRVSSNLFTMTVFQSFESFKNNQQKHDVEDALEAFLVDQRMAFYNLIKFREPQEHNEGALSTRFFDTNEIERWFLKIEKDLQTILENPTIELSFTKKGDQVLIIQKDKDISFSFDSLSSGFKAIFNIYANLLVRAQFQEVAPEELIGIAIIDEIDVHLHISLQKKVLPFLINAFPKIQFIVSTHSPFVITSTDNDTVVYDISNGEFFQEDLSLYSHESIIKELFHVQDETENLKKLSEQLVQFIESEIPLQNLDKIQSTLRNINKDFDKLSVELQLQYMVAKNKLAKLKHEGN

SEQ ID NO: 82017 - protein, 223 aa, Acinetobacter sp. ANC 3789
MFSVERPSEFPKSLTKSTKDYRAADVVEELQDIFFAKCYLCERQGFPDVNIEHRDPHLGNETKKYDWHNLFYACVRCNSIKGDIHINILDCCQPIDVSQAIELHCPLVNNEAHKVTVQLGNLPNSLEISSTIDLLDRCFNETNTALRGISRHSLIKEIQKYQIQWCILKNKLLYPDLPLTSKAKAEIIEQLKAMCDKEFPFSAFWKWAITRDDDLSKIVGNVF

SEQ ID NO: 82018 - protein, 423 aa, Acinetobacter sp. NIPH 817
MKFEKITLTEWRQFSKIDIEFHPNVTVITGANGAGKSTILKLLSKHFGWDHPFLGTPFFSKEQGAVQYKSIFTPLVKNNEAYHYYGDSLGKIIYSNNAVADICINQQIQSEVQFNLNLTDQLQINGVHINSHRPVPRYERLQNIPTNPMDASQAFDSYLRETFNLFNNSYTQHSPTYRMKEAIVSMAAFGPGNQFVQKNEKIEKQFYAFKEILKHILPIELGFKDLSIRMPDIVLETDSGDFLLDASSGGIMSIIDLAWQIFLYSHDKEEFVVTIDEPENHLHPSMQRSLLNDFVKAFPRAQFIVVTHSPFIVSSIRDSNVYALKYENFKDDNVNKVIKKVVSQKLDLDQKAATANEILRDVLGVPVTLPKWADEDLQKICSMFTVDDITVDGLRRLRNELNQAGLGEFYPEALNNIVEGQKL

SEQ ID NO: 82019 - protein, 222 aa, Acinetobacter sp. NIPH 817
MIKINKLNEPTVLVKNAYKWKTRLLKIITEDKTPTQYLLSRYSDPEIKKRLIEETHGKCAYCESKLLHIHHGDVEHIFPKSLDESKRYEWENLTLACEVCNQKKSNVDPNLNNILNPYTDSPEASLIFFGVLAKGADNKGESTRILLDLNRTALVERRQERLDKIILIIKELNNSGLPIKARQAIYQDLIQNEASNKQEYASMVRLAIKCFEGGIASEIKAA

SEQ ID NO: 82020 - protein, 418 aa, Acinetobacter guillouiae NIPH 991
MPFITKFHFDEKDINLLPNKNLKTTNAFTVVIGKNSIGKSRLLGAIINYVLNEPSLQNKKVIAISNTFYNKFPKIKEEMPNYTKLLPLPTNESISGFGIRSFYYEEKIIDDFINYSENSTLNKEFKSNIYMDVKKLVPKLLLKIKGNSRFIYTNLAQVLNFLKLDNSLRIRLVIKKNLFEKIKEINKNDIKNIDIIKKMEAINYSELSLEELAYLDPVIIDLILLKVIDIFRIYLHDKSLNKKINYRDLSSGQLAILSMGLALICELEDNSTICIDEPEVNLHPQWQEKIISLIESLSQNYKNCQFFIATHSPQIISNLTCPNSYILDLNNNNLKSTIELRNRSADFQLTEVFSSPGNNNEYLLRKLLIILNKINCNDILDNDEKNTIDLVKRIYFENKFHDNDKVKTLVEVLLDLED

SEQ ID NO: 82021 - protein, 221 aa, Acinetobacter guillouiae NIPH 991
MNVFIIPNELHTYINSYDQKNYTYWNRECSEILELKKLVRSHYLTETNNMCFYCKHQIPSQHGRYWDIDHILPKSLYPKFLFLPENLIVSCIECNTAKGNKNPHKSKNKKIQKIPKGSDKFTFIHPFYDNYEDHIQIKKTAQSNHHFLLKKTEKGAKTIEFCNLNRFFQTYTDWGNVSFKTIEITDELISSPQTLSKQDILKLIKTHNKKSEELTELLVEL

SEQ ID NO: 82022 - protein, 417 aa, Acinetobacter bereziniae NIPH 3
MNQTQNKLGKISIECMMNSSNNNGLDTMKVKSLEIKDVGGVSHLKLENLNERMNIICGANGVGKTNILDSIVYVFSEYDPKSVVNKSVGSTKGNIELETDAFENVLIKSINEYEPSNHRHSSISSEPTIFTELLNVIYLKVNRVFDYRFLDSISFSEKKLQKRLKSLVNGIDGEDLKGWLVSQLLLSTSPNALDLCDLENIEELKKSFSVLDSGIKYKSLKNNEIIVSTPTGDIYFEYLSSGFKSILFIILNIFRELSERAIYVTTSHKLFNGIILIDEVELHLHPEWQGRICTILKEVFPNAQFFITTHSPHVVQTAIKGEVIALERKNGVVERRELPESEYGYQGWTIEEILEDVMGMPDLRTKKYNEIKARFDKALDEQNKDDAKKAYHELDKMLHPQYPLRPVFKMQLDSLGE

SEQ ID NO: 82023 - protein, 239 aa, Acinetobacter bereziniae NIPH 3
MIKLQRGEKPEYLSVEKVHELTERFKKDKTKVVWKDESIGNPLLLSSSNKCAYCECKLQIEDSYMQVEHFKDKDSYPDNVVDWENLLPSCGRCNRKKWTLDVEKFPIVNPYVDEPKAHLCQESFRLYGKDEKGKATITKLFLNDDDRVVLPRFLACNEVNRQLSKLALNLANIDDTKDSVTNLLLSCQEDKAYSAFLTSTLHSSSDYQEIKHHLESINAWDQDMEDLHQNSFNLILDKR

SEQ ID NO: 82024 - protein, 427 aa, Acinetobacter baumannii NIPH 190; identical to SEQ ID NO: 81756

SEQ ID NO: 82025 - protein, 222 aa, Acinetobacter baumannii NIPH 190; identical to SEQ ID NO: 81757

SEQ ID NO: 82026 - protein, 507 aa, Acinetobacter nosocomialis NIPH 386
MRISSISFDNKKYKLSDTNVSSEENTFTILVGRNGSGKSRILQRICHIYLNSLNNNNPHGFYNINKLNSYNDINNTTDLNCGEIIYEQNNNIYEISSTQLRGLYNSYNDYYVLEKKNKTSQTENFVDITKIIAVSTSPFDKFPIIERHMHWNNAIYEKNYIYRGGKIKVNSQKDYLKNKFDQLGASLINFFLRSDRTQDKTSILLEAINLDEKINMYFSFPWPFSPSEIINNKNPKPIADSLNSIRFFKDKGDRIILSQDEEIALIENLKFVLNYYKFNEHNRTEIFDLELNLSNRSKDENTNLLNSLSFLANYDLIELRDIKFSKNNRSFYLTDSSSGELSLIFNLLSIAGEIENDSLILIDEPEISLHPEWQSNFLPLLSKMFSNYQRCHFIIATHSPQILSSTNDKNIFIINLEDSNKLIRSEEISKMSADYQLAYVFKEPGYKNEYLTRIALTTFTNVNKKKLFSEDDLNSLSLLLENMSHLDQNDPLHQLILSLKEMRNLYA

SEQ ID NO: 82027 - protein, 223 aa, Acinetobacter nosocomialis NIPH 386; identical to SEQ ID NO: 81791

SEQ ID NO: 82028 - protein, 590 aa, Acinetobacter brisouii ANC 4119
MRLDYLKIGSAKDSPTHQFKNLKNVCIDFDEHQSITIVIGWNGTGKSNVLEALAIIFRDLIQPPKDKIPAFAYELRYEIGSGITKKYVTIQADPDLEKDEYIFSYVPFQPILEPSNIDKSPINLFELKQSDLFSEKTIPNTENKDDASESTKPINVSFAKFTADNSEFLPKFVFSYYSGLSTRMQDIFTPYIEQYDKKLRGGKTSEEVGFKRMFYALPIHSQFVLLAFLFKQDETIQSFLENQLGIDAKSGIESILFELRQPSWTNKNEDGDPRLWDAKGVVKEFLSELYNLSLAPIRLTKSSKSSLWNKKTREYQYLFLKDMASFQRLMEHKEPRILFRDLESTYVSELIEAVHIRVKLKKNNGTVTFKELSEGEQQLLTVLGLLRFTNEEESLYLLDEPDTHLNPKWSVEYLKYLEAFMKGETNGSRTNSHVVLTTHNPIAIAELKKEQIQILHRDLDQSIKSKEPDIDPRGMGYAGIITSDMFGLNSSLDTYTQKLLERKNVFTVKDTPLTNAERTDLMQINNELEDLGFRFSMRDSQYERYLKALHNHEKNKLNQNSQSYSDTSEQLKIAEEIIQTLLKQNNEDQS

SEQ ID NO: 82029 - protein, 260 aa, Acinetobacter brisouii ANC 4119
MRWIDLTKLNVSTEWKNKATAAQTTIDSDPDLNSSEYPNIWSELKEELKTLSYNKCWYCEARENRSDNAVDHFRPKSKYKWLTYNPNNFRFACTFCNSRRTDHATGQTGGKGNYFPLLDPTTEAKDDAGLRSEKYVLLDPCDPLTPSIIIYDDEGIPKPSLLASAIDKQRLETSIQYYHLNHSELVEMRRQLGLQINEWVNEANDYFLTINEPSSKTAFTNKLKDLCRLIKPESQLSTFARCIIQGHKDKAWIDSLFQMM

SEQ ID NO: 82030 - protein, 441 aa, Acinetobacter junii CIP 64.5; identical to SEQ ID NO: 81162

SEQ ID NO: 82031 - protein, 218 aa, Acinetobacter junii CIP 64.5; identical to SEQ ID NO: 81163

SEQ ID NO: 82032 - protein, 390 aa, Acinetobacter junii CIP 64.5; identical to SEQ ID NO: 81480

SEQ ID NO: 82033 - protein, 243 aa, Acinetobacter junii CIP 64.5; identical to SEQ ID NO: 81481

SEQ ID NO: 82034 - protein, 420 aa, Acinetobacter johnsonii ANC 3681
MKYLFNISGNIPHAKIENIKIPLEGRNLIITGKNGSGKTSFLKLLEQKILLHLDKKAYLTDGQISSIRHYEDIINSHHKGSIEYSQAEYQLNYLYQNRKNIEEGLILKLENELDFLALHDELKAIFVYFKAMRIASITETKHTSSIEDEKNIAIQNLKNRNSESFGNKLEQHLVNIKVNQSLALTEDKNQEQANQFQEWFDNFDNHLKFLFEDDNAHLVFYRQNFKFKISLENREFDFQTLSSGYLAIFEILADLLVRSEFFEITPNELQGIVLIDETDAHLHISLQKKILPFFSKLFPQIQFIVTTHSPFVITSTDNDTVVYDISSRELFEEDLSRYSYESVIKGLFHVNPISSDTKNSIEILKNLLNENPSNYENIRSIVKSLIELEKNDLLDKSLKNLYLQAINLLADKNQLEDLDV

SEQ ID NO: 82035 - protein, 229 aa, Acinetobacter johnsonii ANC 3681
MFKVSKSARPTDWTTKDYKDPVVVKQLKKDFYGKCYICEQKHFPNLNVEHFIPHLDDETLKLDWNNLYYACSRCNSIKNKYYDDMLDCCNQAHLVEEWIKVYYRMPDEDIEVINACSNDHPYHEKAETSKELITKCFNNANSGIQEVSKEDLREKIIEVHNEFLDLRREFFKELDNWQEADKIKKADDIKHRLKSHYAFSAILRGYLEKDTKWRTALEEIEQLKLQQSA

SEQ ID NO: 82036 - protein, 519 aa, Acinetobacter haemolyticus NIPH 261
MKVDKLHIRSRFKNLEDVKVDFDENHLMTVIVGRNGSGKSNVLEALVAIFRNLDLGEAPLFSYELDFQLGEKGSDKWYDVKVDADPGRGTLAKQYQVSVKDKHNNADFKLIPFSKVKRDNKTKQAEYLPNFLFAYYSGPSDRLEKYFRKHRDNYYRELLYNKLDLRADIRSLFYAKSLHSQFVLMAFFLNPELKRERIFLQKELGIESLDSIHFVLRRPAWERDKEDRFWGADGVVRSFINLLYPHALAPVKVNRNEDTSLTGKNKKNDFIHIFLPSVETLHEIAKQLTPSIFFKMLESTVLSEIISEVHIRVKVTYAQDPITFHELSEGEQQLLTVLGLLKFTGGKDSLFLLDEPDTHLNPSWAVKYLKLLREFVPNPETCHLLMVTHHPLAIAELEKEQVQVMKRGDENQISAKMPDENPRGMGINLILRSDMFGLRTTLDDDTNQRLVNRNALAAKETLSKDKIVREHGFPPEDEEQYLARLNSELEDLGFNLATDDPDYLDFLRNKYHAKSEESN

SEQ ID NO: 82037 - protein, 269 aa, Acinetobacter haemolyticus NIPH 261
MRWICKDVIEECLTQAWRSMADQAKAELIAAPDEEARKAILKKAASSNVWRDFYNLLPDSLKRKCWYCEAEDIRSDMPIDHFRPKNKVEDDKQHDGYWWLAFDWENYRCACTFCNSRRVFDETEGGKACRFPLENPGERAFTHTDQIKLNNERPYFLDPFNLDDEKLLWFDNDGLPIANPSATSEQQTKVNNSIEIFHLHESRIVRARNLIRLEVERQVRKIRNKDDVQAAKAKLRRMTNETEKLSRAAVVYLSAHREIQEVKDILALD

SEQ ID NO: 82038 - protein, 389 aa, Acinetobacter baumannii NIPH 601
MKIHSIELKDVGGIPYLKLENLNSKMNIICGENGVGKTNILDAIAASFSQFDKNHVRKRAGSDKAIITIKHDKKGSPDIYVDITDFEPNESEYFLINNKNYEENKHLMLYIKTNRGIDYKKVKAIIADPDSTHRMRNNSSGVKNEDIKDWLLNRVLHSKHYDHLTETQLKNLESAKACFNLLNPEFKFKRLNTSNEIFVDTPTGEIFLEFLSSGFKSTLFILLGLIKEIDFRFDKNRIAAKDFEGIILIDEIELHLHPEWQGRIINILKELFPYAQFFIATHSPHVIQSAFAGEVIALERQNNEIVLRDIPNPEYGYQGWTIEEILEDVMGMVDLRTKLYKSVKDRFDEALQERNRDKAYEAYCELDKMLHPNYPLRPVFKLQLDSLGE

SEQ ID NO: 82039 - protein, 240 aa, Acinetobacter baumannii NIPH 601
MIKLERGKKPAYLTAEKVEELTNKFKATKASVWKHAEIGEALLDSSSFKCAYCECSLQIEDSYMQIEHFKDKDTYPDSVVDWENLLPSCQRCNRKKWTLDVVVEPIVNPYVDYPKNHFSLEEFRLYAKDLKGETTISKLDLNDDKRLVLPRFLASNEIASQLDSIFRNIINLDEARKSLSKLLNSCQADSPYAAFLSTCLHGKKEYQILKELLKSEEINLWDDEMEELDFRSKQLTLDRR

SEQ ID NO: 82040 - protein, 472 aa, Acinetobacter sp. CIP 53.82
MKYIQKISAKLDFLNHDVNIDLKGRNLILTGKNGVGKTRFLNQLNSVALNKLIHEIPHLSQQHYSCKERIINIISSEIQNISPNLIFQQHLEELTKLLIKTDSYNIIENRKFVEIAKKLKAIIIQNQGLSNDENYRYKHSQIHEIEHYFNELGYMNSHENIDLVVTGIGNLSENIQASKVTFNFFPAHRQSQITASTNTTDLNQYINTAKHEYSSKLGQFLEQYLLNIKIEKSLALSEEQDTDHADQIDEWFTKFDEDLKFLFEDSTTQLKFNYKLRKFSLLQSYREFTFQSLSSGFTAIFDIYSDLLMRSRLLNILPNELNGVVLIDEIDAHLHISLQKKILPFLSQSFPEIQFIVSTHSPFVITSTNNDTVVYDLSTGEFFEEDLSQYSYESVIKGLFHVNPISSETKNSIETLKKLLNQTPTNYEYIRSLIKELIPLEQNDLLDKKLKNLYLQAINLLSDHNQLEDLDV

SEQ ID NO: 82041 - protein, 229 aa, Acinetobacter sp. CIP 53.82
MFKVSKSSRPTDWTTKDYRDPVVVKQLKKDFYGKCYICEQKHFPNLNVEHFIPHLDDETLKLDWNNLYYACSRCNSIKNKYYDDMLDCCNEDHLVEEWIKVYYRMPDEDIEVINTCPNRHEYHTKAETSKELISKCFNNANSGIQEVSKEDLREKIFEVHNDFLILRREFFKELDNWQDEDKIKKADEIKHRLKSHYAFSAILRGYLEKDTKWRNALEEIEQLKLQQSA

SEQ ID NO: 82042 - protein, 390 aa, Acinetobacter sp. NIPH 298
MKIKTIELENVGGIQHLKLENINKQMNIICGENGVGKTTLIDSIGHVFTNQHTYVLKKNVQSEKGTIRSNILDDTEHPHAVQLYIDKHKPNENSYISGFGHYSKKLILLKVDRTFNYQMLSSINKDELKDDGHTAHQSMSGIGYHDIKSWFLHRHLYSAHPGALQSEQIHNFELSKRCFSILNKNFSFSRVDPNENEIMINTPSGEIYYEYLSSGFKSIISIVFGIIKEIELRFKNPFLHADQFDGIIEIDEIELHLHPEWQGKACSILKETFPLAQFFITTHSPHVVQTANQGEVIALERKDDRVLQRELPNSEYGYQGWTVEEVLRDVMGMNDLRTEKYEVIRNEFLLAFKNRNRADAEIAFDKLEKMLHPNNELKTIYQMQLDSIGE

SEQ ID NO: 82043 - protein, 242 aa, Acinetobacter sp. NIPH 298
MIKLERGNKPSYLTDAKVEALTQEYKENGKSVWNKDQIKTPLSESTSHKCAYCETDLNSPSIYMEVEHFLPKSKYEDLVVIWNNLLPSCKRCNGTKNDDDILANPIINPFDKDPREDFYFDHFYIFGKTELGENTESTLNLNDEVLFLKRCKVAGIVKNDLIQMSREFSKLSQLDGHKRRKLRAVLLAAQPDRPYSAFVATIIHNTREYSLLKQRFIEEAKWTEELTKLHNTSFNLILPLRK

SEQ ID NO: 82044 - protein, 514 aa, Acinetobacter sp. NIPH 298
MKYIQKIEGTTKGLSSKINIPLNGRNLIITGQNGVGKTFFLNQVNNTITKELLSKIASLSEESFKAKRTFMLRLNSILDQNPQLNSIIDSVDLKKLISLSKNKSEFNVKNNNQFYTISKSILNDIYMFNKNNIYTRNRYSHDINTNNIIIDSNSKYIDHIFPEHITDSLFEKNILSETHDLIYNLEKMSNILNNFDIFTTIGSDLKVKIESIDELNRDIRSTKITFNYFSAFRQTQITHSTNTCSLDDYINSAKTGYDTNLSQAFEQYLVNIKIERSLAITEKSDYLYAKKIDQWFKKLDNDLKFIFEDDSTSLNFDHKTKKFLINQTQKIFNFQNLSSGYSSIFTIYTELLMRSQLLDILPDELNGIVLIDEIDAHLHISLQRKIFPFLIKSFPNIQFIVTTHSPFVITSANNDTVIFDLTDGSFIDENLSTYSVEAITQELFHVHTESLDLKKTIDYIYENLNSENVNFQTLSNELKKLQPYKSKLNIEAKNIYMQALNFLIDNDELGDLDV

SEQ ID NO: 82045 - protein, 223 aa, Acinetobacter sp. NIPH 298
MFEITRSLPAPTDLSRNKYNTTQILDALSEICHSKCYLCENDKVQEVEVEHFLPHAKHPTLKFEWDNLFYSCKRCNRIKGDNYEYILNPCDVNHKVFRNLRFIPPSRVNDPILIENLCPSSDPYYPNAITTVELLKKCFNDVSTAARRISRRELVNNLLDELNDILVIRSKLKSKKLSNFEEEQEIQRLIKMISPNYAFSAFWRWYVLDDETLNSKMSSYINF

SEQ ID NO: 82046 - protein, 411 aa, Acinetobacter sp. NIPH 1867
MSQNYISSFYAENFRQFSKVSMKFNEKFNFITGPNGCGKSSILAGINHCLNENWQSSRLNQDSIFYIGVVKNTEFYYIGLGKNSFSGLGTYRRNNIIAYNSPHIEYDIGPYKIYTPHYREYKIYPLFIGTKRNIEYKKVDGLSRELDTEQAKAEYSKRGIESNISDVKQWLINRYFIIDKNWAVEEKENWNLLLENLPRIAPFGSNFSFVKIGRDLEPLFTLYDQECYLEELSAGFQAILSIIANIIEWTEKTNIDGARNIQQACGTVIIDELDLHLHPEWQFNIRDGLVALFPNLQFIVTTHSPHLLASAKANEVIIMDRKTGITEYSFEPTNKTYSGWSTDQILEDVMGVKSLVNKEYERLITNALEAYDKKDKQALKSLMVTLEGITHSDDTILQVLKMKMASLELDQ

SEQ ID NO: 82047 - protein, 249 aa, Acinetobacter sp. NIPH 1867
MIKLSRAEEVPQILIDNQTKWTDNLLALVAQHGTYKDIPKDIKEAALKHYRHQDIKDVLFGTTSNKCAFCESFPADSGNIEVEHFNPKSLYPNQAFEWNNFLPSCRKCNGAKDDHDTISEPIINPYDDNPEDYLEVDTIQLKGKNEKGNKTIEVCGLSGIRIWRPYADLLVQFKTYELNVTDAMQDYNEAKTSSNKRRKLQALQNSIDTINDLRNPKSKYSFFCNQMVSKSEVFAQAESLLKEHEASQV

SEQ ID NO: 82048 - protein, 464 aa, Acinetobacter sp. CIP 64.2
MGFYMLLQKMTLENFRCYESLEIDFRERTTVLVAINGQGKTTILDAIRIALWPYISRFDLAKTKFADPANTITIDDVRTIKKNDSSQLEMARKLPSSISVTCDFKENKFSWKRTRDSEAKRSQTKDDSDTKKLKDYATQLQARIRDFGQESRDLPVFGYYGTGRLWKEKRLVESKRDSRTNIINTRIRTSAYIDCLDPASSFKQFEDWFIAEYKHDFDKRMIAVERGATNLPKVNDTILVVREAVNIILETVGWENLAYSQQYESLVLEHNLHGIMKMSQLSDGIKNMIGMIADIAYRCVLLNGHLGKDAARLSKGLVMIDEIDMHLHPQWQQVVISSLEKAFQNIQFIVTTHSPQVLTTVSSASICIIEDGQKYDAPKGSRGAESSRLLKRIFNVNTRPDNLEITNKLETYAKYVYDDKWNLQEALALRIELDEAFGDEEPLLSELDLYIENREWELEFEKNQ

SEQ ID NO: 82049 - protein, 262 aa, Acinetobacter sp. CIP 64.2
MKKINKSLPPNPLTVFYSVSEHKHLDWEDFRLHLKAKSYDQLKEIIFQDQGFLCGYCEDSVINIDKSKTQIEHFHDKSDKDLTITNWALDWNNVFGVCNAGVDEKEAHALPRNLSCDGHKNHIKNKSKKSASMEGEYLNPLEIPYDLLFTFDKATGFLNPNLDICQTLHSYTPNNYRSFAELVQNTIDILNLNCDRLAQKRLTVLHEYNRLLKNARINKNPQLLEQLPQQWFQKKWPSFFTVRRCLLGVRAEKYLKENGYGL

SEQ ID NO: 82050 - protein, 418 aa, Acinetobacter sp. CIP 51.11
MTKANKSEMTNYFIKSFNAENFRMFSKISVKFNEKFNFITGPNGCGKSSILTGIHHCLHHDFNSSRLTSESSFHIEVVNGGELIFLGLAKESFREGNAYRETQMKNWFPPRIENVTQPYRVFVPDGQNKEIIPLFLGTKRSIDYVRVQGAQREEPRQNSIDIYRQRNLEYSNSNVKQWFINRYFYIDKDWAYEEKINWDILLENLPRIAPTGSDFQYLRTERDLEPIFRLYGQECYLEELSAGFQAIFSVIANIIEWIEKINPQGHRNIQEATGTVLIDELDLHLHPEWQFNIRDGLEALFPKLQFIVTTHSPHLLASAKEGEVIIMNRETGKTEYYFKPSDKRYSGWNTDQILEDVMGVKSLKNKDYERLIDEALDAYESKDKTKLLSVMEHLKNITHSDDTIVQVLEMKMASLELE

SEQ ID NO: 82051 - protein, 250 aa, Acinetobacter sp. CIP 51.11
MIKLEKQNDIPQILQDKQREWTDHLLALVSKYGTYKNIPKEEKASALSHYRHKDITTPLFASSHQKCAFCEGSPKDSGNIEVEHFYPKSIYHDKAFDWDNFLPSCRKCNDSKLTHDVGVEPILNPYDEDFDPSQQFEFVLARMKGKTEIAKRTIDVCGLKSRLYDPYSKLIKVFCEYEQTLEEALEELNEKDTNRKRLNQIRRISDSIDRIESLMKPNEKYSYFCSYIIRSSEVYNEAKRILSLELQQVG

SEQ ID NO: 82052 - protein, 479 aa, Acinetobacter sp. CIP 102136
MNKISFLYYQSKKIELKERNLIITGKNGSGKTRFLRQLEDNLINNRYSEYQDLERENLLKDIKYGIDNFPKSLDLKNNEIKIYYDLKNHNFNEHEFRKNLSQLYKILLQKVEVFRKNAKSYIINTNEDLKKSHREEINPNKISEEYYYYNNPEYVIEFINRLTISIDQYYKVSELFKISPNNFSKDQVFVFDASRVKNDRLIMKVFKDYEDYRLNKNRDNIEEALEAYLISKKSQLIQFSEQQPKLQELKREASKLLHWFKKVEKDLKFILENPDIRISFNHQSDQVLLVDSQKQSFFTFDSLSSGFKAIFKIYASLLMEAQLKNIKPIDLSGIAIIDEIDVHLHISLQKKVLPFLIKAFPKVQFIVSTHSPFVITSTDNDTVIYDISSGEFFEEDLSLYSHESIIKELFHVKDDNENLKQLSDQLLQFINSEDSIQDLNTIQGLLDEFNKDFTKLSVELQLQYMVAKNKLAKLKHEGH

SEQ ID NO: 82053 - protein, 101 aa, Acinetobacter sp. CIP 102136
MFSVIRPPTFPKSLSTSTKDYRASDVVEELQDIFFAKCYLCERQGFPDVNIEHRDPHLGDSTKKFDWHNLFYACVRCNSIKGDTHINILDCCQSIDGQSKT

SEQ ID NO: 82054 - protein, 470 aa, Ruegeria mobilis F1926
MSFEFKGTHQKFRLISDEERRAGNFFTLISGENGVGKSVLLRALVDAALTPASQSFSNNRTSKASARFSGGQPTRILALSGTINDRFPNNSGADLRLSVNKFDVSNFYYFGPRHAGGIASSARAASSISQSIVSFMISGGGWSKGAHHLLNYLGLTGSVVVKLQPHPRVRKNVDGYIEEMMRRLTGITEKFEGDQKERIDSAKFALSILQQVDEKDVFRIPENWPMRLRFESRSGDIIMERDQGYLFESLLIEHQEDWPKLTLGLISIGLLKADVEFIKFDNEHDSVNLDEMSSGQWQLINCLFNLAASVRDNSLILIDEPENSLHPQWQKNYISLVREIISHTKGCHVLIATHSPMLVTSLLPHDGALLSLTKEQDSSQVDAEIEGSAYGWLPGDALRDRFDLDTQRPPELTKAINIALSAIRRNDGRSSDLKNAKRRIAHLRSSLPVDDPLNLTLDAIIEFKVDTRDE

SEQ ID NO: 82055 - protein, 267 aa, Ruegeria mobilis F1926
MNEDVGDDAEKNGVGILWEGLVNFEHPDELSELLQECLDQNREWGSSASQHAKVSLRKTLLVAQKAQCAYCRRRIKDELGHVEIDHILPKSAKGDIAKSTSNAEADRFCTQGYPQFSFEKRNLILTCKRCNNKKGSYDSRSNRSIAADPGYTLNSNYYSWVHPYTDQYSEHISLHKGLIYTPLNGSIKGDALIRICKLDSISAVEALARELIAKSAGGYIKAIMKLLGGVNETGWEVLTDSVIEAFPDIDPDIIARKVDEFRRASGE

SEQ ID NO: 82056 - protein, 547 aa, Streptomyces fulvissimus DSM 40593
MELLQLRLPDYRGLRNFSLDLEDAVDKGQAIAVLIGPNGGGKSRVLHALAELFGALYRCALGHSGRADFGYEVRYQLRNTTVEIVQPSAEADPVMWVTDATGSRDVTPRHDWLHHLPDHVFGYQVHGRVPWGSEFERHVHFAEAELAAWREQWTESWFAWQDRPENEDGVWAEQLQLPIACPLYTPGFLCTPDWLPLVLLSLATQWADVFGDHLRERARVDGVVSAVLHLRAPASVGEELSTLPYWGLGGPPRALFAEAAASGRFGPVPESDPLYSAGTPEDGFALTMSSADDVLALRNLFDSDLSMFGLLSTLQMAGYLTVDVRVCKADGSVVGADQLSSGEQQILTVLGLLRLQRGQESLFLLDEPDAHFHPEWSRRWYSSVQRMLGDGQRSQFIAATHEPLLVSNMLRQQIRVLGTGADGQTTVLTPDTNPRGRGAGGLLTSDLFHLRSQLDEHTQDLIDTQYHLIPVAEDDPAARQKLQEVTDRLDGLGFATRHRDPVLSSFLAELHRRRTELIERARSGDAMSEEIETTARFLFDERFTRGV

SEQ ID NO: 82057 - protein, 394 aa, Streptomyces fulvissimus DSM 40593
MILVRHVDNTKLTPPQQWTDRAAKELEKLHEDAVDADKKFLFSEMWREDAIRDRLIALMDKCWYCETSFVRSPYHVDHYRPKSAVAGEAKHRGYWWLAYDPANYRLSCHHCNSGGARYGNQSAGLGKGARFPLLGQRAPEGGSLDRELPVLLDPVASEDAELVGFDRQGFARRRPEQPYSGHEVAQDLCRVDETIRMLALNSDLLTEGRSTLIGSVIELVQLYLIRRDDAVVAQYARKQIDSLTQTTAEWSAAAASAERLALLAHDRSGDDAPPAGETEANAAEGADGGTEPQTATADGHRVDLRTLVAALPPAAFSAGGIALTGRGKRGPAKATLLEDGRIMCFRQPMNTPTSAARMAAGDDTVDGWAFWSLTVDGKARTLADLRDTLIAQRG

SEQ ID NO: 82058 - protein, 408 aa, Pseudomonas putida LF54
MAPHIQKIGGQIPDSGMPLDIPLNGKNLIITGSNGAGKTWFLKQLNGNLLSKLMVIDPPLSQLRRELSELINQGDPGGYSDLHHNHNQKLNYLRQQIEYYETHIYLDVDQESPITGHQVVMFFEADRKSSIGPASSITSVETSKAQWRGNVDQNVVGSALEQHLANLKSRAAIVARYEKNEAYAQGIDEWFATQELNLKLLMEDDSTKLVYDPKKDSFTITREGKRDTTFQSLSSGYSSVFSIYSEILMRTEVFDISPAEFEAVAFIDEIETHLHVSLQRLILPFFKNAFPKVQFIVTTHSPFILTSTTDAVVYDISTNAVIDADLSLFTYAAVMKGIMHTRPTSVILESIVKNISNIINTDPIDKSKLRLELNKLHESFELLDNRAKTFYRLGEKVLADSEGDNVQS

SEQ ID NO: 82059 - protein, 222 aa, Pseudomonas putida LF54
MFKVERPHDAPECNERTGYNTPEIVKALEKMFLGKCYLCEQDALSDPEIEHFQPHEGNTKLKFDWNNLYYACSRCNSLKGSTHTDLLDCCDPDTDVFSPIKLVLPSRYDDDIHVTLTENEPSEKAVNTSRLLNRCYNEDATGLRGITRAVLVEKMHGEWHQLVGYRNIVTSIRFSDEEKHIPMGRIKAMLQTKYPFSVFWKWWVLGDSKLLEVMPELKELAK

SEQ ID NO: 82060 - protein, 548 aa, Plesiomonas shigelloides 302-73
MKLDKLWISEFKNLKDIEIDFDQNELVTVVIGWNGAGKSNVIEALVIIFRDLDLYKAPSFSYKLEYLCRGNRVIVEAKKTAVKRDQYKVLVHVEGSPEKFITDKHTDFFKDETRQFLPSNVFGYYSGPSDRLATHFYEHQRKFRDQLLYPEKYGLNETTLPLRPLFYAQKVHSNFVLLSFFLGADEKVKRFLREKLFIEEIESVLFVLNKPDWTSKSGDPRFWNASGVVRPFLDRLFSASLAPMRRTIKVPHPMKKNADNVEALFLYLKDLSALKQVGEKTSDKDFFKLLESIYFSNLIHEVRIRVKVRDKNGSDESLTFRELSEGEQQLITVLGLLRFTRDDESLFLLDEPDTHLNPAWSMEYISFLKEVAGFNLDANKEKVDSTAVDNSHIVLATHDPIVISTLKQEQIKIMKRDEDSLRVFAASPLYEPKGMGFSGILMSDMFGLRSDLDTKTLEKLDEHAILLAKDERTDEEEFRYKELQKHLDNSGFLQAYSDPYFSAFVKAWVRQHGDKLFTQTFLSDRDRQQLADMTSEILAELDAEEAGE

SEQ ID NO: 82061 - protein, 305 aa, Plesiomonas shigelloides 302-73
MRYIDLDEVEADLPGNRQEQVDAAWVYVNRKMDESEAKVRAEGARNNWSEAEITGKVELARISARKAAISAKNNLWSDLSDLLAEQSSGKCWYCESKELRSDNPIDHFRPKGQVVECSEHPGYWWLAFDWSNYRYSCTYCNSRRVEAESAGGKHDHFPLFTPPDWNKSNTDNNAERPMLLDPTNANDCKLLTFNQNGEACPNESDSSSDNFKRAKISIELYHLNHKNTTRVRKQIHQEIRQLVAATNELLDAGADPRSLAIEANIKNLLRKIRSTCKSTQFNTAARLYLSQFDCHQWVKDILDLR

SEQ ID NO: 82062 - protein, 445 aa, Bacillus cereus MC118; identical to SEQ ID NO: 81680

SEQ ID NO: 82063 - protein, 210 aa, Bacillus cereus MC118; identical to SEQ ID NO: 81681

SEQ ID NO: 82064 - protein, 418 aa, Bacillus cereus BMG1.7
MILKNLQIKDWNQFERVDIDFHPRLTVLTGANGAGKSTILRMFSTQLGWGYNETAIPSKESTTSLKYKSGGRRKIQPREQQDKINIGSLECFNGKTANLFVPDLTPSANYCINYETPGLNYYTNNSLDLKGINIPSHRIAYSYKPVGNIPVRPASREEAFSLFNHSLMNKLFESYGDSPSFQMKSTLISLALFGEGNSHVNENKEALDLFLGFIEILKVLLPPTLGFKKISIRDGEVVLETNSGDFLLDAVSGGIGAILDLAWQIYMYDGDKYEPYIVLIDEAENHLHASMQRRLMPSLLQAFPNAQFIISTHSPLMVNSVRDSSIFVLKYNENHLVVSELLDFENKASNASEILRDVLGVPITMPLWVENKLEEILKSFKGYEITPESYSRLKDELATVGLRDHLPQALGILQGGIY

SEQ ID NO: 82065 - protein, 215 aa, Bacillus cereus BMG1.7
MISLIKSSKPTILVEKEINWTNELLSFEESGEKVPNYIKGRYRHEEIKEALLKETYSKCAYCESKILHIDYGDIEHIIPKSIFPQKTFSWDNLTIGCAKCNQSKSNYYDDTLPLLNPYIDSPENQIIFQGPIPFAKPECRSAYKTIKQLKLDRIELIEHRSDLIKKIQPLIWQYENTEDDMLRKMILDDLKSFTNKDQEYSLMIKQLLDSLAITA

SEQ ID NO: 82066 - protein, 418 aa, Bacillus cereus HuB13-1; identical to SEQ ID NO: 82064

SEQ ID NO: 82067 - protein, 215 aa, Bacillus cereus HuB13-1; identical to SEQ ID NO: 82065

SEQ ID NO: 82068 - protein, 705 aa, Bacillus cereus VD214
MIRIYKNGAINWLSNELSALGLQYILNEKGELEKLISECFNGKCSYCENSMERIDIQIDYYRPINGALNTMDGIFHEELYNWLENDIDNLFSICVECNRAKSNRFPVEGEMASFNASQKELTKEKRLLLNPYRDYPEKHFSYSSDGSIYPRTKKGHISIEILNLNRDSLRKARREEAEQFVEMCNFYIESSGMLRRHGEGMGRIIKEINQESIFAGLKRHILSELILNGSMKYTEELDEYLKGIMTKSELHYFVAANKDNFIESTKRKYYDTEKKINLYNVTDDNDISKYFSVQRFIEKIEISNFKIIKDLKLDLTLSKSKDAPWLMLLGENGIGKSSILQAIALALMGKKERDKLLWKINKSPNEYLRHNASEGYIKVYLSGMMEPISLHFNKYSREFRGENHQEPRILLLGYGSTRLLPRDSMEEGMNITWARTGNLFNPFIPLVHVEEYLLSLSDEDFFNVRRAIESVILEDVRVVRNKSKRLLLFRLPNSTVELEELSDGYQTVIALATDIMMVMKNRWRSFDAEGIVLIDEIDAHLHPRWNIEIVSRLKKAFPKIQFIATSHNPLSLRGLIDGEIAVLLEDEDKNPYITQKLPSQKGFNVEVLLTSKFFGLYDTMPELNELFDRYYLLLSNPEPNSEEKQEIRYLKNKLEKYDKTGTTIREQKFYEVVDEYLAKSRDRNSNYNEQDFKKMIKETIEYFEG

SEQ ID NO: 82069 - protein, 292 aa, Bacillus cereus VD214
MIYVKRGKLPKELDLTNTNSIGSTELAEAITYFQTQTRKFDFSAYKNPSVVKKLAKMFHGKCAYCESEIRAISYEEIEHFRPKGAIRIKVKENLKYPGYYWLAMKWDNLLVSCPKCNKIKGNFFPLVNENNRTANPNQISQEAPLLINPCEEAPEDHIKYTEKGYIESKTDKGKLSIRHYGLYRKDLTKLRERLAKDIFLKKRQILTGFKNNIYFKKHLDTDSEAKERLEEQTLEILDNYDFILEYINNPEMPYRQMVIQLTEKFRKDYGTELEELRIGYEKSVRKKKLAYK

SEQ ID NO: 82070 - protein, 418 aa, Bacillus cereus ISP2954; identical to SEQ ID NO: 82064

SEQ ID NO: 82071 - protein, 215 aa, Bacillus cereus ISP2954; identical to SEQ ID NO: 82065

SEQ ID NO: 82072 - protein, 164 aa, Bacillus cereus B5-2
MAPARLNKLCSTLEAATGVLIRLKGLNVYPAAVQLLHDILTELLRKKITVQFTISSVHTNHFCRIRVLDSTVFQLLDAFADKYGDVHTAGVKIQFIATSHNPLSLRGLIDGEVAVLLENEDENPYVIQNLPSQEGFNVEALLTSKFLDYMIKQEQQLGNKNFMK

SEQ ID NO: 82073 - protein, 158 aa, Bacillus cereus B5-2
MFHGKFAYCKSEIRTISYEEIEHFRPKGAIRIKAKENLKYPSYYWLAMKWDNLLVSCSKCNKSKGNFFPLVNENTRATNPNQIPQEAPLLINPCEEDPGLHIAFTKEDCIQYKTDKGNLSIRHYDLYRMELTKLQERLAKDILLKERKILTGLKKYVF

SEQ ID NO: 82074 - protein, 395 aa, Amycolatopsis orientalis HCCB10007
MYIERVRLENIRGFSGARAVDLRLPGPGWVVLAGRNGSGKTSLLRAIAVAAAPDVAWGLLSDAGSWISTDQTSGSIELSVMREEGPAPVEVRWLDSGLLPISGLPPGQPFCAAYGPFRRLAGGSGEAESWMRGAGSLARMASLFHEDASLAEGVTWLINQHLRALEGKAGARELKDKALEILGDGLLPGGYRIRDVDSDGLWVEYRGDRFPLREMSDGYRTVTALVVDLLKQLDSAGLDHESPGVVIIDEVDAHLHVSWQKRMGPWFKAHFPRIQFIVTTHSPYVCQAADPGGLIRLSGPDEEVPPRVVSEELYERVVFGSGDDAVLSDLFGLDTPYSPQAVELREHLAELEFQVASGRADANGVREWERLRGMLSSSPPSRVDEVARRFEADDR

SEQ ID NO: 82075 - protein, 246 aa, Amycolatopsis orientalis HCCB10007
MIGIRRIALPGQVVADLEELTARIPPGDTKEARRLWRVSRAVRRSLRAGLDVMAAGRGYCMYCGDGLGSTVDHFEPIARNPGRAFDWLNHVLACEYCNSHHKRDLFPVDEDGNSLLVDPTAEDPLEHLFLVLSIGTYRALTEKGEQTIKVCGLNRAQLARGRETAVSQVTALVLAWWTARELGDEVKRRAMVWTLLDQPHADVLHAMLRQAGMPGARAVFRADDELIDLLRAPELAEDLQLSGGAV

SEQ ID NO: 82076 - protein, 414 aa, Fusobacterium nucleatum subsp. animalis 4_8; identical to SEQ ID NO: 81168

SEQ ID NO: 82077 - protein, 188 aa, Fusobacterium nucleatum subsp. animalis 4_8; identical to SEQ ID NO: 81169

SEQ ID NO: 82078 - protein, 465 aa, Escherichia coli ATCC 25922; identical to SEQ ID NO: 81190

SEQ ID NO: 82079 - protein, 243 aa, Escherichia coli ATCC 25922; identical to SEQ ID NO: 81097

SEQ ID NO: 82080 - protein, 251 aa, Yersinia enterocolitica subsp. palearctica YE-149
MNLGNEFENHLVNLKTRQSFAKTFDNNESLYESMETWFINLEKSISFLMEDESFKLIFDPDKFKFHLQQDSKPPYTFQTLSSGYSSIFNILSELIMMTEANHISPSDLQGIVLIDEIDAHLHVSLQRKILPFLTRTYPRIQFIVTTHSPFVIGSLDNAIIYDLSSQQEFSDLSNYSYETIIEGLLGVPVVSISLEKDTKRLSALLVEENVDNAAITELVEKLSPHQENLDDESAVFLLKARRVLREDKETK

SEQ ID NO: 82081 - protein, 218 aa, Yersinia enterocolitica subsp. palearctica YE-149; identical to SEQ ID NO: 81441

SEQ ID NO: 82082 - protein, 412 aa, Yersinia enterocolitica subsp. palearctica YE-P4; identical to SEQ ID NO: 81440

SEQ ID NO: 82083 - protein, 218 aa, Yersinia enterocolitica subsp. palearctica YE-P4; identical to SEQ ID NO: 81441

SEQ ID NO: 82084 - protein, 251 aa, Yersinia enterocolitica subsp. palearctica YE-P1; identical to SEQ ID NO: 82080

SEQ ID NO: 82085 - protein, 218 aa, Yersinia enterocolitica subsp. palearctica YE-P1; identical to SEQ ID NO: 81441

SEQ ID NO: 82086 - protein, 251 aa, Yersinia enterocolitica subsp. palearctica YE-150; identical to SEQ ID NO: 82080

SEQ ID NO: 82087 - protein, 218 aa, Yersinia enterocolitica subsp. palearctica YE-150; identical to SEQ ID NO: 81441

SEQ ID NO: 82088 - protein, 403 aa, Bacteroides massiliensis dnLKV3
MKIENLHIKNIGPFKEAVIEFATEYNEATGEQPVTIITGMNGAGKSIVIDAIRAALSGQELERDIVADTNDFSIEMDVVLNGSTTHLSTSTLQNGHIRGVDYINIGQALTYGYDIPGPVNHWVIDYWSSKSPSDSFKIANMKNIQHEKALMGVMLGKKSNLDLINFICHIDYLRTSEMPVEKELGNMMYEKMKDVINQCLDNGLFKYVRRTDLTPIIEQNGIELSFDKLSSGNLFLIEHLLLLMCKMYSISILNKLPPMQIFNIPGLLLIDEIETHLHPKWQKKILGIIRSLFPHLQMILTTHSPFVVASMDGARIYTCVPQTGYSELRDETERYGHMPVEEILVSDIFGVQPFNEDITNLITTRKQLIENGEKEEARKVAEKLYEINPEYFSYLNIKNEFRK

SEQ ID NO: 82089 - protein, 229 aa, Bacteroides massiliensis dnLKV3
MRHIERLPEPAILKQKHDEWQDKFEQAKKQNPKARPDSTKYGNPGIRKNLEDCSYGKCFYCESKLSGASKEIDHFIEVAIDSKQAYTWTNLYLSCSNCNDKADHNTIPVNTALDPCRDSDEEIQANITFEDECICSQHGSQKGLNTIKKYHLGTELLDMKRGKWLRHIMKDIIDIQNRMITDERSLPTKDEQQRIKRYMQPDQPYSLMSKVFLEKNFDHLLEAAYENQK

SEQ ID NO: 82090 - protein, 386 aa, Bacteroides massiliensis dnLKV3
MSNFITDIKVQKVFHLKDFCIPISETEKKHLIITGRNGSGKTILLNAIAAFFNEMYSFASVKSIAGKYMLENRFVAEKQVGLYCNDAETLLKKYRKQDFIIAFYADERKSRFEESRNPVKPDLKVNKENVGQSKVDQFLNFMVDYKVQEALARNEGKNEDADYIRQWFISFQTILGRIFDDPQLNLKFNYKDYSFFIETDGKSFKFTELSAGYSAVLDIVTDLILKMQEGNNIVRAYEKEGIVLIDEIETHLHLELQRVILPILTTIFPHIQFIVTTHSPFILSSLPNAVAFDLERRESIEDLTEYSYEALAEGYFGVSTDSSEIQMRLQQLESLIQKEKLSVSEEKELEMYLKDFENIPEVLAPNVKARFYELKRIWNSKAWKYD

SEQ ID NO: 82091 - protein, 210 aa, Bacteroides massiliensis dnLKV3
MIRIKKSLEIPLGLDTKYNAEDVCKQILEDQYEKCYLCERYLGTDYQVDHLRSQANYPLLVKEWSNLFIACSYCNGKKGVSFDGILNPCLHNIEEIIEHSVLFMEKKVVFNSSQLSKEVRQTIQLLTILFNGKNGLRTCREQRFYDEFIRKINVFQYAVDEYMLGKKEEYRPMIEELLDIHGEYLGFKHLIICGNPVLKKDFEEFLGWNK

SEQ ID NO: 82092 - protein, 324 aa, Lachnospiraceae bacterium A4
MYIQISETGVIKRQKVDIDSDVSIIYGYNNSGKTTLLKALDQAFANRQMEKFILGQSGDQALYIPTNRIVVSEHSTEQPQLKDCEDWLHYQKDSYKDYSLHLKRLRDHILSNEIVHQFICGAIHKIFDIKVNELNSRYSDGIENIINIYLSIIWAMMWNTDFSVLSEKAFFDELSQKQLYVMIDEIEMYLHVNIQSKLIGSIKQDFPACHLIMTTHSPLLLTRYKQCLIYKIQAGKLKMIEEDMYYEDLNIIYDQLFDVDELPKKFQKDINLLGNAVMKNRVDDTEKIQSMIKHMREEYPNLSRRYNAIITKAENIGDKNDQNT

SEQ ID NO: 82093 - protein, 214 aa, Lachnospiraceae bacterium A4
MIKIHRTHNPAVLEKTNKTFQTEIAGMNEKEAYDFYKKHSRVYLYNTNETKTHFKIMNKERCSFCTKFIQDFDDEMTVEHIQLKRDAPQLIFEWNNLLCSCRTCNTKRSTKAHSSEKYLDPTNITDIEKYFCYELDGKVYPNQELSRQEQQQAAYMIKLYQLNRKGLVCKRREFMKQIMSDDDFYNSLKTMDEASQNIIFLSVFAYYKRQRMPS

SEQ ID NO: 82094 - protein, 432 aa, Lachnospiraceae bacterium 28-4
MNLKQLVLHNFRCFEKLEVEFHDRLTVIVGANGAGKTTVLEAAAVAAGTLLYSFDGIRLRTIDKNDAHNKYYSMGSVIDVQPQYPVEVFAYGNIDGKMTPWMRALNGENGKTTVVDAREMTDISGAYRKKLMNGDASLILPMIAYYGTGRMWDYHREKKSDTFKKNTRTNGYIDCLDGTANVKLMMNWFRKMARRDLDEKIPSPEFSAVRGAMERCFALMTGITDVKVKLDLDTSEIVIIYQDEKEGKVKIPLNQLSDGYKGTISLIADIAYRMAVLNPQLSERVLSETDGIVLLDEVDLHLHPAWQQRVIYDLINIFPKVQFIVTTHAPAVIQSVKSENLMILKDYQIMNAGSQVYGKEVNAVLNEIMGVTERPPEVSKLFKSFYSLLEKKEFRLAEQILDKIDKLRDYHDPEVAGCRVKLKLERIRGGQK

SEQ ID NO: 82095 - protein, 246 aa, Lachnospiraceae bacterium 28-4
MIAIQKKSEPEGLAQLRRKAIDEELSPKEAYALLKNPLKEQVRDRLVEEQGQICAYCMCRIPRQDADPVITPIILEHMVPRSPGDGRNIGQGLDYHNFVAVCHGNRGAHGSRTMSDLTCDGHKGNDEFRKVNPCRPETLTSITYTIDGKIDAADPDVRFDLIHTLNLNCPSSPLIAERKAALESLIDEMGQVSDDDLVVYCSGVLKDFQAETNPRTPYVGILIWYLQSMISAMNNSGSHSELRGAE

SEQ ID NO: 82096 - protein, 430 aa, Lachnospiraceae bacterium A2
MKVNTIQISNFKGIRSLELPFDGKSTIFFGINGVGKSTILRTIDLIYANIISMLVSSKAKLAQLELDDISYGKTRADIHATFKFPDGSLKEYTRSISRAEGKKHNPGELRNLVNLFETLYIEKGYDDGNGNWIEKEDTKNMPVFVNYGVNRSVFDVPLRVTKSEQFTKLSAFDKAIESKIDFRTLFMWFRNQEDIENQEKVRKSAAYEDRSLSAVKKAMLAMLDGFDDIHIDRKPLAMKVKKDGQSLKINQLSDGEKCTIALFGDLARRMALANPQLDNPLNGQGVVLIDELDLHMHTSWQRKVVRVLSQTFPNIQFIITTHSPQILGELGDTFNLFYLSRENNTVTLQKYKSFVGWDANVILEEVMKTDSVNIGIKRLVEQLYCHIEKKEYEQAEKIADTLDNISNGYVDGVAKARVLISRGKRHEKNC

SEQ ID NO: 82097 - protein, 222 aa, Lachnospiraceae bacterium A2
MKKIVKEQPPTWFETWKQNFKQTHGRTAHYKNDFSSDDSQGTARRQQLRGHLIKEQGHICCYCMKRISLQNSHIEHFRPKTRFPQNDLDYQNLLASCNRDGMVSLDGHCGHKKEDWWEDNLVSPTESKIEEMFQYSLDGNIHSIQKKPFTNIAQEMIGHMGLDSYHLIRNRRAAIESSEVFDENEYSNEDIRNFIDFYSNKDGEAYVPYCMAIVACLKEQLG

SEQ ID NO: 82098 - protein, 545 aa, Streptomyces albulus CCRC 11814
MRLLRLNLPAYRGLRDFHLDLTDAVDGGHAIATLIGPNGGGKSRALHALAEIFGALHRPKYSAAFPFDVQYELRGTTVRAVQTARSAAPELTVVAQAGREPTRVPRAHWPHHLPDHVFGYQAYPHAPWTAEFDQHRRFATRRLGDWRRQWREDLDAWLASRSPEDAWPEQLTLPIRCPLYTPVFLCTPAHLPLLLLAQTTHWADSFGTYLREHSYIQHVASAVLRVKAPRTVRGAPLAALPYWGLGGPARTLFAAVAESGRFGPIPDSDPVDGAGSPADGFRIVLGTTEDVRAFRNLFDSDLSMFGLLATLLDAGYLTVEVRLHKTGAVMLGLDDLSSGEQQLLTILGLLRLQRAQESLFLLDEPDSHFHPEWSRRWYSSVRTVLGTHQDSQFITATHEPLLVANMTRQQIRIVATDQEGQATAVIPEATPRGQGAGGLLTTDLFGLPTQLDEHTQELIDRQYALLPVAGHDAVLQSELREVTAELDALGFSTANRDPLVAAFLAELHRRRRALVEAATGANPLPPQVLEALVAELFNEHFSSVI

SEQ ID NO: 82099 - protein, 369 aa, Streptomyces albulus CCRC 11814
MSGLTTPQAWAAKTERTLDVVRAAMASNTKRRFTEHWTDDEVRDPLVALLGPKCWYCETTIQRADITVDHFRPKSEVLGEPGHDGYWWLAYKIANYRIACKHCNSSGARFDGMREGRAKGSRFPLLAGLRAWRQRDGLDLEQPLLLDPAQIGDPDLLGFDTAGYARRGRTPYSQAETQHGVCRADETIRILALNATQITEQRSDLMKEVTALAQLPGHPVIQDMIDKRVRPTAQWSAAAATALALQRACDRQLDTPARSAAARPVTTGSTPGHSNVDLHDLLEHLDPVELQAGISLTGRHRNTVHRAVLLHDGRISVWSRPWGTPNSAARAATGSDDIDGWGFWRLTIAGVEQSLAEFRAAHTTPDPPV

SEQ ID NO: 82100 - protein, 418 aa, Eubacterium sp. 14-2
MEQLFITNLTIRNVRHLKDVSIPLSSEQRKHLIMTGKNGSGKTSVVEALAEHLNHVFTDQNFGLREAGLRAAEELRSKAVQNGEDRDKLLQLERSVKQQTKFLEDSRKGLEVQFNHKSESIIALSEKYHYILAYYPADRIFQAEQPKHVEKVQFKDYYELQEFPRNEFVKYLLDLKMTEALARSNKKAEKADEIGVWFEKLEQLLKQIFDDETVRIIFDEDTFEFHILQQGKEPFDFNTLSSGYQAVLDIVLDIIMRMQHQTKRSFDFNLPGIVLIDEIETHLHLELQRNIVPLLTTVFPNIQFIMTTHSPFILNSLEKVVIYDLENHFLVENGLDDVPYDGIVEGYFGAEKMSGILKEKFERYKTLTGKKNLTDDELCEIAEAEVYLDEIPDYLAIGIATEYRRRKLEFNSREETDG

SEQ ID NO: 82101 - protein, 222 aa, Eubacterium sp. 14-2
MVKVRRSFPAPESLAEEARKKTGRYDKPDVIERLKKDFHNKCYICEMKELQDPNVEHLLPHKNGKYPERKFDWENLFWSCAHCNSVKNNEKYDTGIIDCCKQDPEKCLNFRIESEDVEISVKNFEDELQRRTASLTEEVFSLKNTGMRTYTSDMRLKLLQKEMNVLYRQLEKIHNNPESKIAGRTIRSLLRRESAFAAFKRCYVREHAAEYPELQQYVEIES

SEQ ID NO: 82102 - protein, 452 aa, Escherichia coli KTE24; identical to SEQ ID NO: 81192

SEQ ID NO: 82103 - protein, 219 aa, Escherichia coli KTE24
MREITKGQPPASLQQWVRAKPRDKNANQWFQELYAQKKWDIVGDLSQQCAQEQFYLCAYCCDRVTGTNRDTVNEHVEARDLAPARSLEFTNIVASCKTKGQCDDSHKNQPLLLTPLMPECETEFIFKISGRIEGTTPRAIDAIKVLNLGDSERNNRALIEKRKQLSDSLLWANGIDPSEGLEDDDLLQVVIDELLTPVNGYLAPFAPVVANILKNWMTA

SEQ ID NO: 82104 - protein, 452 aa, Escherichia coli KTE36; identical to SEQ ID NO: 81192

SEQ ID NO: 82105 - protein, 219 aa, Escherichia coli KTE36; identical to SEQ ID NO: 81193

SEQ ID NO: 82106 - protein, 452 aa, Escherichia coli KTE37; identical to SEQ ID NO: 81192

SEQ ID NO: 82107 - protein, 219 aa, Escherichia coli KTE37; identical to SEQ ID NO: 81193

SEQ ID NO: 82108 - protein, 452 aa, Escherichia coli KTE38; identical to SEQ ID NO: 81192

SEQ ID NO: 82109 - protein, 219 aa, Escherichia coli KTE38; identical to SEQ ID NO: 81193

SEQ ID NO: 82110 - protein, 423 aa, Escherichia coli KTE185; identical to SEQ ID NO: 81844

SEQ ID NO: 82111 - protein, 260 aa, Escherichia coli KTE185; identical to SEQ ID NO: 81845

SEQ ID NO: 82112 - protein, 465 aa, Escherichia coli KTE226; identical to SEQ ID NO: 81190

SEQ ID NO: 82113 - protein, 243 aa, Escherichia coli KTE226; identical to SEQ ID NO: 81097

SEQ ID NO: 82114 - protein, 550 aa, Escherichia coli KTE64; identical to SEQ ID NO: 81922

SEQ ID NO: 82115 - protein, 216 aa, Escherichia coli KTE64; identical to SEQ ID NO: 81923

SEQ ID NO: 82116 - protein, 452 aa, Escherichia coli KTE69; identical to SEQ ID NO: 81192

SEQ ID NO: 82117 - protein, 219 aa, Escherichia coli KTE69; identical to SEQ ID NO: 81193

SEQ ID NO: 82118 - protein, 452 aa, Escherichia coli KTE70; identical to SEQ ID NO: 81192

SEQ ID NO: 82119 - protein, 219 aa, Escherichia coli KTE70; identical to SEQ ID NO: 81193

SEQ ID NO: 82120 - protein, 452 aa, Escherichia coli KTE74; identical to SEQ ID NO: 81192

SEQ ID NO: 82121 - protein, 219 aa, Escherichia coli KTE74; identical to SEQ ID NO: 81193

SEQ ID NO: 82122 - protein, 452 aa, Escherichia coli KTE98; identical to SEQ ID NO: 81192

SEQ ID NO: 82123 - protein, 219 aa, Escherichia coli KTE98
MREITKGQPPASLQQWVRAKPRDKNANQWFQELYAQKKWDIVGDLSQQCAQEQFYLCAYCCDRVTGTNRDTVNEHVEARDLAPARSLEFTNIIASCKTKGQCDDSHKNQPLLLTPLMPECETEFIFKISGRIEGTTPRAIDAIKVLNLGDSERNNRALIEKRKQLSDSLLWANGIDPSEGLEDDDLLQVVIDELLTPVDGYLAPFTPVVANILKNWMTA

SEQ ID NO: 82124 - protein, 583 aa, Pseudomonas aeruginosa PAK
MQLLRISIPAFRNLRDLDISFATHLLPGEGAPADVQPKQIRSHALIGQNGTGKSNLIEALITIFRDVDLDREAAFDYTLEYSIRGYAVRIEADTAKQKRPYVWVDGKAESQRYLLKNRELLPAHIFAYYSGRNERIEALFQEHQRRFNLRQEITTDEVLPEQLLENFTGTEADILAVEDAKRRRETRLRQAGDDRLRRLFYCRGGHSQLVLLACLLSDDPVFQKVLKNLHIESLESALFVLKEPHRLREKRRGGKFDEQELNEGDPRFWYARGNVVSEFLDKLWQVSWAPIEQEATKQIDFRGRTEKQKQLYLFVPSQEKLKQLGELVGSTDSFFRYAEGAYIGDLIDEVRITVKKRDEHGGKVSFTHLSEGELQMLTVLGLMRITREDHCLFLLDEPDTHLNPIWKLRYFDDIEGVLTSEDGTLVQGDSQILITTHDPMMVGSLKREQVHILRRNGSRTVVDIPDMHPQGMGVTGLLKSELFGLSSTLDIETERRLFRRNELFVKQPRTPVEDAELSRLSAELADLGFSTADFRDPDYALFVRKMAQHRRFRKPALTPEEQAEQDAIADSIIDEILREEAAE

SEQ ID NO: 82125 - protein, 292 aa, Pseudomonas aeruginosa PAK
MIWIDLKNKYPTTAIPNWDPKATAQQWIPWTQERWDAWLARSKQLVAQLAALDAAGQREERNALIDANSGHWGELKDWLLALSAGKCWFSEVRELYSHYDVEHFRPKKEAKALDSAVRDGYWWLAFDYMNFRACGNVGNRKKGGWFPLKDGSLCSTFADQCEESETRYLLDPVDDDDVDLIAFDEEGKVIPMPGTSEWDQQRVQQTVTRLKLNDHVPLAEERRKVWQKVDGLIEDFKAAKARCGGNNPAAKAKLLEVRSNIREMTSRTAELSAVARWCVLFRNDPLLSKLVS

SEQ ID NO: 82126 - protein, 266 aa, Pseudomonas putida H8234
MVLEDLIDKRRLNGVDLNDVFSEQARVWMTSLFGKNYPFSEMSVEQAGELLKFFSFTPNVTCEIRKNNSFVSYANLSSGEQNRIALAVKLLSHADDRMLVLIDEPELSLHVQWQAEFHRFLGRLLAGYKNYHVVVATHSPVIVSEAAKDMPGESRSIILLEESEVSDASDISCRVASADDIKSFDQTVLDYFKLATYNSPYIDMKIAEIMLEAANSNGLTQEVERNIDELDALRAVKKVTDETDAAILEAIDLIQRHFAHKTERAS

SEQ ID NO: 82127 - protein, 234 aa, Pseudomonas putida H8234
MKTMGSSDANRVLSDLESLVDAEAITVTDAWKVFKSPGLKHEFKKISLRLTPIEIEAVESLLAAVKSRLRTGARKRCAYCRRPMGTHKMSWHIEHIKPKSRFPELMFSMSNLVYACIDCNFTKNTEIDNPKVYLFDIIDPGSTGFSYSAHLSYLQVTTEHLHFLKYSPISPEGTKTYERLLLQRIEALEVVSGLNGHIRDLSHRIDDAVVECNDDDNGEIGLFLTKLKLKIVTR

SEQ ID NO: 82128 - protein, 456 aa, Delftia acidovorans CCUG 15835
MLNNCTYNNRKLSFQAGDYSDSLHAPNKFTVIVGRNGVGKSRLLREICMAYVDIEQIDDARISYRGAQVSREKFDIDSHRAPSSVIALSTSPFDRFPLQKMFGPICTDYQYLGLRGLSSRNLSLAFLSRTIGALITSVVDDPNHINTINEVLSHLGYYPFLEIRLVASLSPAKLEKALESNNFIEYLINNNNRVNAMSERWRYHMTKLSAYEVSRFEAACRHWASVGVKPRLDLKITKDGLIDLQRGSSLDLNFLLLIQMGFFQLRDVGVIKNGLPNPIRITDASSGEQCVVMSLLGIASHIKNGTLICIDEPEICLHPAWQEQYVSLLMNVFSKFKGCHFIIATHSPQVIAQLKDDNCFVLDLENGVTTQAAEYNLRSADYQLARLFKAPGFKNEYLSRTLIDALQALSGGVKYDQLKSHEVHQILHLKNVISPDDPIKRLMDICEKALKASQEK

SEQ ID NO: 82129 - protein, 239 aa, Delftia acidovorans CCUG 15835
MISSSYVLTAAEQRLVNEFKILPHEKQRGYWEKTDVDGPLSELKAAIKEFYLKAQNFKCVYCQQRIVVEHHGAWDIEHIIPKDVRPEFMFECANLCVACKDCNGDKWNKNVLIDNKRKTFPKNKEAYKIFHAHFDIYEENIKIIELAGFYLPLNEKGRATVEMCGLLRFLFSFAGYACADAAVAGRIHEMNVHLMNTKNPIEQSFWLQAISDFSAEAAKMQREAHMSTCFLHGGEQASA

SEQ ID NO: 82130 - protein, 507 aa, Pseudomonas syringae pv. syringae SM
MWLRWGRGQQVDYGFRRRSGDLMGTQDNMASAGINSLRLSRLRLRDFRSFETIDIDFHPRLTVLVAANGTGKTSILDAIAVAFGPYVGAFDEAVGKHLEPSDIRQFRARRTTTNEMEYAPQGARIEATGVIPGSLPDQLSDDLLPTIWRRHLSSTTKTKTSIKDAKELVNYGKRMQEAARTPDTEVVLPLIAYYGTGRLWQQKKLTDAKNIQRTSRTVGYTDCLDPASSYKSFVQWFRYWSLNAKEAQLKALEAGVSIVKTEFDDYIQSVSRAVNACIQPAGWSGIQYSFTRDTLVARHEQFGELPVEWLSDGIRNMIGMVADIAFRATKLNGHLGAQAAQETPGVLLIDEVDMHLHPEWQQVVLLNLTEAFPAMQLIVTTHSPQVLSTVSSNSVRILRTEIDPETSSRITSVSEPQWQTRGVASSDLLARIMGVDPVPNVPEASWVSDYQALIQQNLHEQTEGVELRTKLESHFGADHPIIRECERQIRLQAIKQRLPRDLGNREY

SEQ ID NO: 82131 - protein, 214 aa, Pseudomonas syringae pv. syringae SM
MRRLCRQDEPPSGLRRYRHGKDKWTRTCPTQEERDGIWASLELMQGPRCAYCEGPIAPKNRHIEHFRQRDRYPQGTYDWNNLFGSCERVSTCGKAKDRCGIYPPEVLIKPDIEDPDAFLVFTPGGTVEPRAGLSEGDHLRACETIRILGLGGALNEIRRAELSGYLQTLEYFVEIAEAFPEDEEWIQELQQEVSNAAQLPYATAIRHVLTRQSE

SEQ ID NO: 82132 - protein, 426 aa, Microcystis aeruginosa SPC777
MKIKSIKLINYRGAVSLNIDFHRQLNVFIGVNGAGKSTILDSLAIMLSWLVNRLKNTNASGRKISETEINNGQGTAIIEITGVTEDSQEITWKIVKTRTGYSHAGEGSNFSQLNEYTQQIQRQITEHQGQINLPLFVYYSVNRAVVDIPLKIKTKHQFDSLSAYENALTSGSDFRTFFEWFREREDLENENRKYQYDLIKPEGFCFPDPQLEAVRETIERFLPDFSNLSVRRNPLRMEVTKKNKIVTVNQLSDGEKCLIAMLGDLARRMAIANPQNPYPLTGTGVIIIDEIDLHLHPQWQRFVVPKLLEVFPNCQFFISTHSPNIITHVQPESLHFMEQTEMGIKFHPVQESYGKNVDRILEDLMGLETTRPKEIAEALKDIYEQISQNQLEAAKNKINDLRAKIQDDPELIRAEVIIRRKEIIGK

SEQ ID NO: 82133 - protein, 210 aa, Microcystis aeruginosa SPC777
MKYIRKRQEPPEFKNWKEQANSDWQPDFKNLAGKPKEILIKALMTEQGEICCYCESRLVDGKCHIEHFKPQSDPSVDPLDYANLLCSCQANLTPSEPRHCGNLKDNWFDENLLISPLNPDCESHFAFNYDGTIKPAQEDDQKAINTIEKLGLNLKKINDFRQKAIEPFLDEEIDNAQLKVFVNGYLCLDDQQRYNPFWTTIKYLFSDLIE

SEQ ID NO: 82134 - protein, 430 aa, Pseudomonas putida NBRC 14164
MLKNLTFEGVGPAERLAIDFKPRLNFLTGDNGLGKSFVLDIAWWSLTRTWPRDGLATPRKGASQSSIAYCYEGSTGEFAYKSSFDHESQQWSVKQSRPAIPGVVIYAGVDGSFSVWDPARNYWKGDRGEPAAPNRPRSFDFSPDAVWNGLLSSDGKTQLCNGLISDWVLWQEGSKPAFDDLVKVLEALSPSGVEKMKPGEPMRVGDSVRDIPSLRMPYGQDVPLTQASAGMRRIAALAYLLVWTWREHQLAYERYRVQPAREIIFLIDEIECHLHPEWQRRIVPALLNVMNALTGSREVPVQLLAATHSPLVLASVEPDFDGSRDCIWDFDLVGTEVQASLYPYSRKGDVNAWLSSDVFNLKEPSSVAAEEALGRARTFLREVSLQKVPLTAEQRSTLSDIDSALRNSLSDVDSFWVRWSNFREQRLGNA

SEQ ID NO: 82135 - protein, 229 aa, Pseudomonas putida NBRC 14164
MIRVEPADEPESFDEIVRKPGHRAIAELVGEEGLPARRGRPRTVVALTREDIPADKFPPVWTHALPDLMEAYGRLCAYVCIYIERVTGGGSVDHMLAKSRAWQDVYEWQNYRLACTLMNARKNNYQDVLDPFEVEDGWFRLELVSYQVIPGEGLDPVIEARVLATIKRLNLNDHDCLKVREEYATAFFDGDIKLDYLRRRAPFLAREIEWQGADAPMERQVELGRNHVD

SEQ ID NO: 82136 - protein, 469 aa, Pseudomonas plecoglossicida NB2011
MKLSRLRLHDYRCFESLDIDFHPQVTVLVASNGVGKTSILDAIAVAYGPFVGAFDEAIGSHFEPRDIRQFAVRKTSSNEMEYAAKGVRMEAEGNIPGSLLDSLDTGLTSAWRRSLSSGTKTKTTVKDAKELSDYGKRLQEAVRTPGSEVLLPLIAYYGTGRLWQQKNKKRESMPLQRTSRTVGYTDCLDPASSYKSFVDWFRYWSMSAKEYRFKAMELEEPSRPSEFDDYIKSVSTAVDICMSPAGWQGIEYSLTKEALVSYHPEFGQLPVELLSDGIRNMIGMVADIAFRATKLNGQLGAFAARETPGIVLIDEVDMHLHPEWQQAVIPSLTKAFPKIQFIVTTHSPQVLSTVDSESVRMIRSVRDPESGRMVTLTERPQWQTRGIASTDLLARIMDVNPVPDVPEAHWINQFQALVQQNLQDSTEGTALREKLKQHFGAGHPIMLECDRLIRLQSFKQRLPKAIGKE

SEQ ID NO: 82137 - protein, 170 aa, Pseudomonas plecoglossicida NB2011
MQGKRCAYCEADINHEKRHIEHFRQRDRYPQGTFDWHNLFGSCNRTSSCGKHKDNCGVYRQEVLIKPDVEDPEAFLVFTPNGSVQPRANLSANDRTRAEQTIRILGLDGALTQIRLEQIRGHLDTALMIAELAKEYSQDEWLPFLADELSLIADLPFATAIKHVLTPQDE

SEQ ID NO: 82138 - protein, 486 aa, Acinetobacter indicus ANC 4215
MSSIHTIFFNEKILFLEGKNLIITGNNGAGKTRFLNHLTDNLKGNSNTDNKPLRDKIISEINFGIMNFHSALEFKKSENEHLKYILNSEMHTQVEYIFSKEIAEFKKQLKKKFDNFNKNKDNYFKNNSNKIKSSENGKLVIKISKELEKKNEKYFYYYAPEHIENYVKNLNSMIDSYIANKKIVEVALHSWDKNSIYFFDSSRVSRKDISIDQFKTYDEFLKSGSLTDIEGALEAYLLFQKLELLSLIKHRKASGTKIKQINEIEKWFIKVENDLKWILENNTTELIFTKNGNRVLIKQSRTTFSLDDLSSGFKAIFNIYANLLMRAQIQKIAPEHLKGIAIIDEIDVHLHITLQKKVLPFLIQAFPNIQFIVSTHSPFVITSQNTNTVVFDLTTNELIEEDLSRYSYESVIKGLFHVEIQSEKLESEIKAIAEILNNEPNSYEKLRNVLRNITPFVKQIDVESKSFYFRALNHLLDNQELGDLDV

SEQ ID NO: 82139 - protein, 200 aa, Acinetobacter indicus ANC 4215
MFKVTRSDKPEDWTNSDYTDPVVVKQLKKDFLSKCYLCEQADFGNVNVEHFVPHLNKSEELRTDWNNLYYACSHCNGIKGSRHKELLDCCEESHNVDTAISLEAPSVPNGKIILTNTLTNDSDLFELTNKTIALLEQCYNNANSGNQQISHQYLKEKILEEHAYLQNLRFELKKGLNRLIQREKDDLVERISNMLKRACK

SEQ ID NO: 82140 - protein, 429 aa, Acinetobacter guillouiae MSP4-18; identical to SEQ ID NO: 82006

SEQ ID NO: 82141 - protein, 222 aa, Acinetobacter guillouiae MSP4-18; identical to SEQ ID NO: 82007

SEQ ID NO: 82142 - protein, 531 aa, Agarivorans albus MKT 106
MKVDFLKIRDGFKNIHNLEIDFDDKELLTVLIGRNGSGKSNVIEALVRIFRALDLGDEQAPFSYKLIYLLGADNEKMIEVDASPDYGSTPHQQHKIKVAIKQEDNTYSKLEPVALSKVRRDTKGGSEYLPQHLFAYYSGPSDRLEDLFKPHRIKFYNQLLKNKVKIEDEVRPLFYAKPFHSQFVLLAFFLNQQHGVGREFLAEQLGIKDFHSVHFVFRRPDWGKNNKRDTFWGARGVVREFLDRLLPYSYGPVKSTREEATSLTGKGVDNEFVHLFLPDIHGLKKVAKGLKPKDFFKMLESTLLSELIDSVNIKVKLHNDEIVSFSELSEGEQQLLTVLGLLEFTVEDDSLFLLDEPDTHLNPAWAAKYHTFLKRFIPNQKFCHILMVTHHPLAIAELDKQQIQVIRNNQEGQSIAEVPAESPIGMGVNGILTSDMFGMATTLDRHTSGVIEKRRTLLEKESLSENETKKLRKLNGSLERLGYGYTHPDEDYRQFLISRKRAMDAMDSKGIDDTQYRLKIIENILKTKGLV

SEQ ID NO: 82143 - protein, 292 aa, Agarivorans albus MKT 106
MRYIDINLIDACKPANWDVNATQWLTDIQNAQDRSAEFKRLGSKWSPFKDNFINQFGDKCWYSEVKRSNTDFNIDHFRPKGAVKRTKGAYATRFFGGKPQKHSGYWWLAFEPKNYRYSCQYANQPRDNGGKHDYFPLQNETARVWGRCSLTNHNVEAPVLLDPCELADVQLLSFEKSPGMVHSRYDLATDKAKYERVKTSAKCYNLNHKTVKGDRLKVITSVQQDLVLLESIHGLPLASKQVMQVNVNNAENRLVDACNRKSPFSAAAVAFVKPKKAEPWLANILPRLDLTD

SEQ ID NO: 82144 - protein, 771 aa, Pseudomonas sp. CFII68
MIFVDRKSVQNPFEDAALASKAALEVARAGAEVMGASSQRRLLFTAYKHPTVKAALSALFHDKCAYCETRIVGSFADIEQFRPKASVSEARDHQGYWWLANSWENLLIACQSCNRKSLSAANKSEGQGPIGKYNRFPLIDESKRAFTPSMDLSMEQPLLLNPTFDDPTSHLTFSDEGLVFSETERGNSTISILGLNRPNLANERHKTAKNYRNLFERVIWAMDKDVDLSKQLLDELLEMAASEASYAGMIQQFLRRDKARLEQQINNHKLTKVIEDDAIKRNLRSLESKAPISGPASVKRAARTTKAYRGRMANYSLADEEGIKRYKSQRRSIETISIRNIRALGSFYIDLATQGSGAGRWLMLLGENGTGKSTVLQAIALVLGGSAYISKLIKEQRIRIPELVRFRCRSGEIAVKMSGFDTPHRLKVFKDRLEFTSPSKETVCIMLDGEVRGTAWEPQTVMAGYGATRLSPRISNDSPSGGDFARVENLFDPFVPLMDAQKWLASLTRKDFNRVAIILKDLLAIDPDAYLDRSRGNIFLHASGENVSLSSLSVGYQTIVAATVDMLEILSRVWSNPLEAEGIVMIDELDAHLHPTWQMQIVNSLRQALPGVQFITTTHQPLCLRGLSEGEIVVMHRGANHEVEIITDLPSPADFRVDQLLTSPFFGLNSTTDPDVERLFDRYYALLAMDTRDEQNEVELTELTKQLERRKQFGESQREGLYLEAIDRLLARQKSLPDLAHEEIREKAVSEISAIWDNLIGDIAETGEEQI

SEQ ID NO: 82145 - protein, 327 aa, Pseudomonas sp. CFII68
MIYVSRSSDAEKLPLYTKATVKAADGKIKVTRFERERAAAISFFTNVANYHNNEKLGEKSFSFKVYKDKALAKVLASDFRSKCAYCESKFGAVSSADIEHYRPKASIGSGTTELKPGYYWLAGDWDNLLISCQHCNRVRNHEVPGQSANILLGKGSQFPLSDESKRVRVHGGNIAAEADLRLLLHPCVDQPTEHLAFDETGLVRAIVNGVESPRGKASIDVYALQRKDLVEARRDQINELRSKIDDLQRLVRQHNRMANSADFPDDGHSENLDHIAKTVMGIRTMMLPEAVYIAAKRGWVRGAYERGEFKTLEKFGVKLEAFLLFAT

SEQ ID NO: 82146 - protein, 242 aa, Pseudomonas sp. CFII68
MVKINEILTQRRAIELRANFSESRLSLGEYTADSTIIRAIIVLMDVGLIRLMDLILNKKGFGKLSLKKASSGEQCLLVLILGIAGHITNGSVVLIDEPEISLHPRWQEEFMTLLMSSFSGYYKCQFIIATHSPQVIARLSGKGCYIASLSRRELYDAEEFHEKSADFQLAELFDAPGIMNEYISRLAFNLLAKVKHSKKFDSDSLAELIRLQKFDQQLDENDPVKELIRSVSMLCESYADNR

SEQ ID NO: 82147 - protein, 201 aa, Pseudomonas sp. CFII68
MPIIDNPIVLSDASLVLIEQKKATANFSHANWGDEDLQPVRREIREHYRNVQRLVCVYCLGSVSAHSAAGAPVEHIVPKSQHLHFMFEPENLCVICPDCNEFKSNRESLVNPVLTANRVNYPRNSALYRIVHPHFDSYDNHIAKFNRLYVECSDKGGYTIYICNLNRFFRRFGRCDELVNDVALAEQAERFFEDGIAPEQP

SEQ ID NO: 82148 - protein, 422 aa, Pseudomonas syringae pv. theae ICMP 3923
MRLDHLHLQNFRCYEDAHFDFQPGFNLVVGVNGSGKTSLLLGVAECLIPYGNAMGQGQEILSKEDVRFVIDRHEGRSRFERKFPVFIRADGDIFDLPNWRAVRLLEPWEGGVDPSSLSHLSAVLARNNAGEQIDFPVLAFYRANRRWSSARISAEFAAQQRTSRFDGYANWFDAVADLRDFESWLIARTLERLQDRLDSTSTVEREDELEWVNRAIRLAIPDAHDLRYDLRLQSLLVDMGEGNAVPFHELSDGQRSLIALIADIARRMCVLNPHIGKDVLANTSGIVIIDELDIHLHPAWQRNIAPTLKKAFPKVQFIATSHSPQVIGSLQPGEVILLNNHDGSHPRATYGLDSSSILEEVMGVSQREPEIEALLDELFSALENNELEKARLQLDALKKKAPDLPEFAGAEALLKRKELIGR

SEQ ID NO: 82149 - protein, 214 aa, Pseudomonas syringae pv. theae ICMP 3923
MRRIIKGTEPASFTEWKASANEDWMPTYPTLQNPQKRELHNSLLQEQHSSCCYCGREIELESSHIEHFKPQEHYLPLALEYSNLHASCLRETKPGNPLHCGHHKSNWFDETLHISPLADDCEQRFRYLLTGKIQNTESADLPAATMIEKLALDIAYLTRRRQEAITGIFDEQFILSASEAELTHLVQSLRSGDAGKQVAFGHVVARYAEQLLAS

SEQ ID NO: 82150 - protein, 148 aa, Pseudomonas syringae pv. actinidiae ICMP 19071
MTTAVLANTSGIVIIDELDIHLHPAWQRNIAPTLKKAFPKVQFIATSHSPQVIGSLQPGEVILLRNGDSSHPRATYGLDSSTILEEVMGVPQRDPEIEVLLDELFSTLENNELEKARLQIDALKKKAPDLPEFAGAEALLKRKELIGR

SEQ ID NO: 82151 - protein, 214 aa, Pseudomonas syringae pv. actinidiae ICMP 19071
MRRIIKGTEPASFTEWKASANEDWMPTYPTLQNPQKRELHNSLLQEQHSSCCYCGREIELESSHIEHFKPQEHYLPLALEYSNLHASCLRETKPGNPLHCGHHKSNWFDETLHISPLADDCEQRFRYLLTGKIQNTESADLPAATMIEKLALDIAYLTRRRQEAITGIFDEQFISSASEAELTHLVQSLRSGDSGKQVAFGHVVARYAEQLLAS

SEQ ID NO: 82152 - protein, 451 aa, Pseudomonas syringae pv. actinidiae ICMP 19071
MQNYRCFGEFEIDFDPHLTILIASNGGGKTTILDAARVALWPFVKGFDLGGQTGKSATIQIEDVRLAQFGSGNMESQVPSVIEAKGVWWESAVESSWLQQRVSLKKSTNTIGDAGSKALTLYGKSLQDSVRSDAHVTLPMMTYLGTSRLWFEGRFSSAAAQTTLDKSEYSRTSAYLNCLSYSSSFKTFTAWYIWMYRSYREAQLIALERGEEVSDTGQRFEKIISAVKEAIDRLIKAPTGWHRLEYSASHQQQLVMHHPDQGILPVEMLSDGLRNTIAMVADLAFRACKLNPHLGERAPLQTPGIALIDEVDMFLHPFWQQTIVGSLRAAFPAMQFIVTTHSPQVLSTVRRENIRVIGKDAQGRLIASRPLAMTYGEPSNSVLRSVMQVDPQPPVDEKPGLLQLTEWVDKGRYDEPQAILLMQQITEALTEQHPQLQRLQRSIKRQKALRG

SEQ ID NO: 82153 - protein, 189 aa, Pseudomonas syringae pv. actinidiae ICMP 19071
MCCYSEIRPDRVGLSFHIEHVENKSQHPQRTFDYNNLAACALDSQSDLEVLKIQGAEVFGGHASGKSKGVDMARFVSCHMPDCSRFFAYLSDGRVVPADGLSLDEVDRAEYTIDLLNLNSPYLQDLRQSWWDELEGLFEDHVDQDMSLHCLAGIDLIPVGASLSQFFSITRNFFGGIAEEILDQEAGRW

SEQ ID NO: 82154 - protein, 451 aa, Pseudomonas syringae pv. actinidiae ICMP 19073; identical to SEQ ID NO: 82152

SEQ ID NO: 82155 - protein, 189 aa, Pseudomonas syringae pv. actinidiae ICMP 19073; identical to SEQ ID NO: 82153

SEQ ID NO: 82156 - protein, 422 aa, Pseudomonas syringae pv. actinidiae ICMP 19073
MRLDHLHLQNFRCYEDAHFDFQPGFNLVVGVNGSGKTSLLLGVAECLIPYGNAMGQGQEILSKEDVRFVIDRHEGRSRFERKFPVFIRADGDIFDLPNWRAVRLLEPWEGGVDPSSLSHLSAVLARNNAGEQIDFPVLAFYRANRRWSSARISAEFAAQQRTSRFDGYANWFDAVADLRDFESWLIARTLERLQDRLDSTSTVEREDELEWVNRAIRLAIPDAHDLRYDLRLQSLLVDMGEGNAVPFHELSDGQRSLIALIADIARRMCVLTPHIGKDVLANTSGIVIIDELDIHLHPAWQRNIAPTLKKAFPKVQFIATSHSPQVIGSLQPGEVILLRNGDSSHPRATYGLDSSTILEEVMGVPQRDPEIEVLLDELFSTLENNELEKARLQIDALKKKAPDLPEFAGAEALLKRKELIGR

SEQ ID NO: 82157 - protein, 188 aa, Pseudomonas syringae pv. actinidiae ICMP 19073
MRRIIKGTEPASFTEWKASANEDWMPTYPTLQNPQKRELHNSLLQEQHSSCCYCGREIELESSHIEHFKPQEHYLPLALEYSNLHASCLRETKPGNPLHCGHHKSNWFDETLHISPLADDCEQRFRYLLTGKIQNTESADLPAATMIEKLALDIAYLTRRRQEAITGIFDEQCAFHAIRPPSPPTSGH

SEQ ID NO: 82158 - protein, 451 aa, Pseudomonas syringae pv. actinidiae ICMP 19103; identical to SEQ ID NO: 81072

SEQ ID NO: 82159 - protein, 189 aa, Pseudomonas syringae pv. actinidiae ICMP 19103; identical to SEQ ID NO: 82153

SEQ ID NO: 82160 - protein, 184 aa, Pseudomonas syringae pv. actinidiae ICMP 19103
MGEGNAVPFHELSDGQRSLIALIADIARRMCVLNPHIGKDVLANTSGIVIIDELDIHLHPAWQRNIAPTLKKAFPKVQFIATSHSPQVIGSLQPGEVILLRNGDSSHPRATYGLDSSTILEEVMGVPQREPEIEVLLDELFSTLENNELEKARLQIDALKKKAPDLPEFAGAEALLKRKELIGR

SEQ ID NO: 82161 - protein, 214 aa, Pseudomonas syringae pv. actinidiae ICMP 19103; identical to SEQ ID NO: 81071

SEQ ID NO: 82162 - protein, 452 aa, Pseudomonas syringae pv. actinidiae ICMP 19098
MEIKSFRLINVGRFSDLEVALAPTERHPSKVTVLVGNNGAGKTTLLKSVATALSWLVARVRTPKGVGIRIDEDTIQNGAATSSIRIDAYDDQIIDSLICGPDFHWEIAGTLKGRKATSSTVLGELSMLAEGYRSQLTAKSDLSLPLLAFYPVERSVIEIPLKVHAKHSFDQLDGYDNALGRGVDFRRFFEWFREREDSENETGISTELLNELSQKILVDTELWKVLTREHASSRDRQLTAVRTAVEAFMPGFTKLRVKRKPRLHMAIDKDGKTLNVSQLSQGEKSMMALVGDIARRLAMMNPALENPLHGNGIVLIDEVDLHLHPKWQRSLIAQLTTTFPNCQFLLTTHSPLVISDSKDVLVYLMDDGQLREQDGLYGLDANQVLLSVMDTDIRNEAVQASLDEMQHFLIRGELDKARTLYAVLTGELPANHIELAKASLLIRKLEVRREKD

SEQ ID NO: 82163 - protein, 216 aa, Pseudomonas syringae pv. actinidiae ICMP 19098
MRKIEKGSLAVLEKWKRANKGKKYADLVGREDIKDAIRHACVTEQHGLCAYCCCRITAEKDSACNEHVEAQHQAPNRTLDFGNIVASCTKAKRCDNAHGHQRLPLTPLMIECEEELQFELSGLVAGTTPRARECMKVLNLGDTRKFNKGLIEERKSMIDDLLYSKGVNPAEFIVEEDGMLDLLIEDMLRVNVQGELQAFSPVLVNVIRRLKALRVS

SEQ ID NO: 82164 - protein, 422 aa, Pseudomonas syringae pv. actinidiae ICMP 19101
MRLDHLHLQNFRCYEDAHFDFQPGFNLVVGVNGSGKTSLLLGVAECLIPYGNAMGQGQEILSKEDVRFVIDRHEGRSRFERKFPVFIRADGDIFDLPNWRAVRLLEPWEGGVDPSSLSHLSAVLARNNAGEQIDFPVLAFYRANRRWSSARISAEFAAQQRTSRFDGYANWFDAVADLRDFESWLIARTLERLQDRLDSTSTVEREDELEWVNRAIRLAIPDAHDLRYDLRLQSLLVDMGEGNAVPFHELSDGQRSLIALIADIARRMCVLNPHIGKDVLANTSGIVIIDELDIHLHPAWQRNIAPTLKKAFPKVQFIATSHSPQVIGSLQPGEVILLRNGDSSHPRATYGLDSSTILEEVMGVPQREPEIEVLLDELFSTLENNELEKARLQIDALKKKAPDLPEFAGAEALLKRKELIGR

SEQ ID NO: 82165 - protein, 214 aa, Pseudomonas syringae pv. actinidiae ICMP 19101
MRRIIKGTEPASFTEWKASANEDWMPTYPTLQNPQKRELHNSLLQEQHSSCCYCGREIELESSHIEHFKPQEHYLPLALEYSNLHASCLRETKPGNPLHCGHYKSNWFDETLHISPLADDCEQRFRYLLTGKIQNTESADLPAATMIEKLALDIAYLTRRRQEAITGIFDEQFISSASEAELTHLVQSLRSGDAGKQVAFGHVVARYAEQLLAS

SEQ ID NO: 82166 - protein, 451 aa, Pseudomonas syringae pv. actinidiae ICMP 19101; identical to SEQ ID NO: 82152

SEQ ID NO: 82167 - protein, 189 aa, Pseudomonas syringae pv. actinidiae ICMP 19101; identical to SEQ ID NO: 82153

SEQ ID NO: 82168 - protein, 451 aa, Pseudomonas syringae pv. actinidiae ICMP 19079; identical to SEQ ID NO: 82152

SEQ ID NO: 82169 - protein, 189 aa, Pseudomonas syringae pv. actinidiae ICMP 19079; identical to SEQ ID NO: 82153

SEQ ID NO: 82170 - protein, 439 aa, Pseudomonas syringae pv. actinidiae ICMP 19079
MSQGTLAHPPALVKETDMRLDHLHLQNFRCYEDAHFDFQPGFNLVVGVNGSGKTSLLLGVAECLIPYGNAMGQGQEILSKEDVRFVIDRHEGRSRFERKFPVFIRADGDIFDLPNWRAVRLLEPWEGGVDPSSLSHLSAVLARNNAGEQIDFPVLAFYRANRRWSSARISAEFAAQQRTSRFDGYANWFDAVADLRDFESWLIARTLERLQDRLDSTSTVEREDELEWVNRAIRLAIPDAHDLRYDLRLQSLLVDMGEGNAVPFHELSDGQRSLIALIADIARRMCVLNPHIGKDVLANTSGIVIIDELDIHLHPAWQRNIAPTLKKAFPKVQFIATSHSPQVIGSLQPGEVILLRNGDSSHPRATYGLDSSTILEEVMGVPQREPEIEVLLDELFSTLENNELEKARLQIDALKKKAPDLPEFAGAEALLKRKELIGR

SEQ ID NO: 82171 - protein, 214 aa, Pseudomonas syringae pv. actinidiae ICMP 19079; identical to SEQ ID NO: 82165

SEQ ID NO: 82172 - protein, 452 aa, Pseudomonas syringae pv. actinidiae ICMP 19096; identical to SEQ ID NO: 82162

SEQ ID NO: 82173 - protein, 216 aa, Pseudomonas syringae pv. actinidiae ICMP 19096; identical to SEQ ID NO: 82163

SEQ ID NO: 82174 - protein, 451 aa, Pseudomonas syringae pv. actinidiae ICMP 9855; identical to SEQ ID NO: 81072

SEQ ID NO: 82175 - protein, 189 aa, Pseudomonas syringae pv. actinidiae ICMP 9855; identical to SEQ ID NO: 82153

SEQ ID NO: 82176 - protein, 184 aa, Pseudomonas syringae pv. actinidiae ICMP 9855; identical to SEQ ID NO: 82160

SEQ ID NO: 82177 - protein, 214 aa, Pseudomonas syringae pv. actinidiae ICMP 9855; identical to SEQ ID NO: 81071

SEQ ID NO: 82178 - protein, 303 aa, Pseudomonas syringae pv. actinidiae ICMP 19070
MSAVLARNNAGEQIDFPVLAFYRANRRWSSARISAEFAAQQRTSRFDGYANWFDAVADLRDFESWLIARTLERLQDRLDSTSTVEREDELEWVNRAIRLAIPDAHDLRYDLRLQSLLVDMGEGNAVPFHELSDGQRSLIALIADIARRMCVLNPHIGKDVLANTSGIVIIDELDIHLHPAWQRNIAPTLKKAFPKVQFIATSHSPQVIGSLQPGEVILLRNGDSSHPRATYGLDSSTILEEVMGVPQREPEIEVLLDELFSTLENNELEKARLQIDALKKKAPDLPEFAGAEALLKRKELIGR

SEQ ID NO: 82179 - protein, 214 aa, Pseudomonas syringae pv. actinidiae ICMP 19070; identical to SEQ ID NO: 81071

SEQ ID NO: 82180 - protein, 451 aa, Pseudomonas syringae pv. actinidiae ICMP 19070; identical to SEQ ID NO: 81072

SEQ ID NO: 82181 - protein, 195 aa, Pseudomonas syringae pv. actinidiae ICMP 19070
MEEQYGLCCYSEIRPDRVGLSFHIEHVENKSQHPQRTFDYNNLAACALDSQSDLEVLKIQGAEVFGGHASGKSKGVDMARFVSCHMPDCSRFFAYLSDGRVVPADGLSLDEVDRAEYTIDLLNLNSPYLQDLRQSWWDELEGLFEDHVDQDMSLHCLAGIDLIPVGASLSQFFSITRNFFGGIAEEILDQEAGRW

SEQ ID NO: 82182 - protein, 451 aa, Pseudomonas syringae pv. actinidiae ICMP 19068; identical to SEQ ID NO: 81072

SEQ ID NO: 82183 - protein, 189 aa, Pseudomonas syringae pv. actinidiae ICMP 19068; identical to SEQ ID NO: 82153

SEQ ID NO: 82184 - protein, 184 aa, Pseudomonas syringae pv. actinidiae ICMP 19068; identical to SEQ ID NO: 82160

SEQ ID NO: 82185 - protein, 214 aa, Pseudomonas syringae pv. actinidiae ICMP 19068; identical to SEQ ID NO: 81071

SEQ ID NO: 82186 - protein, 451 aa, Pseudomonas syringae pv. actinidiae ICMP 19097; identical to SEQ ID NO: 82152

SEQ ID NO: 82187 - protein, 189 aa, Pseudomonas syringae pv. actinidiae ICMP 19097; identical to SEQ ID NO: 82153

SEQ ID NO: 82188 - protein, 422 aa, Pseudomonas syringae pv. actinidiae ICMP 19097; identical to SEQ ID NO: 82164

SEQ ID NO: 82189 - protein, 214 aa, Pseudomonas syringae pv. actinidiae ICMP 19097; identical to SEQ ID NO: 82165

SEQ ID NO: 82190 - protein, 452 aa, Pseudomonas syringae pv. actinidiae ICMP 19094; identical to SEQ ID NO: 82162

SEQ ID NO: 82191 - protein, 216 aa, Pseudomonas syringae pv. actinidiae ICMP 19094; identical to SEQ ID NO: 82163

SEQ ID NO: 82192 - protein, 452 aa, Pseudomonas syringae pv. actinidiae ICMP 19095; identical to SEQ ID NO: 82162

SEQ ID NO: 82193 - protein, 216 aa, Pseudomonas syringae pv. actinidiae ICMP 19095; identical to SEQ ID NO: 82163

SEQ ID NO: 82194 - protein, 452 aa, Pseudomonas syringae pv. actinidiae ICMP 18883; identical to SEQ ID NO: 82162

SEQ ID NO: 82195 - protein, 216 aa, Pseudomonas syringae pv. actinidiae ICMP 18883; identical to SEQ ID NO: 82163

SEQ ID NO: 82196 - protein, 452 aa, Pseudomonas syringae pv. actinidiae ICMP 19099; identical to SEQ ID NO: 82162

SEQ ID NO: 82197 - protein, 216 aa, Pseudomonas syringae pv. actinidiae ICMP 19099; identical to SEQ ID NO: 82163

SEQ ID NO: 82198 - protein, 452 aa, Pseudomonas syringae pv. actinidiae ICMP 19100; identical to SEQ ID NO: 82162

SEQ ID NO: 82199 - protein, 216 aa, Pseudomonas syringae pv. actinidiae ICMP 19100; identical to SEQ ID NO: 82163

SEQ ID NO: 82200 - protein, 451 aa, Pseudomonas syringae pv. actinidiae ICMP 19102; identical to SEQ ID NO: 81072

SEQ ID NO: 82201 - protein, 189 aa, Pseudomonas syringae pv. actinidiae ICMP 19102; identical to SEQ ID NO: 82153

SEQ ID NO: 82202 - protein, 184 aa, Pseudomonas syringae pv. actinidiae ICMP 19102; identical to SEQ ID NO: 82160

SEQ ID NO: 82203 - protein, 214 aa, Pseudomonas syringae pv. actinidiae ICMP 19102; identical to SEQ ID NO: 81071

SEQ ID NO: 82204 - protein, 451 aa, Pseudomonas syringae pv. actinidiae ICMP 19104; identical to SEQ ID NO: 81072

SEQ ID NO: 82205 - protein, 195 aa, Pseudomonas syringae pv. actinidiae ICMP 19104; identical to SEQ ID NO: 82181

SEQ ID NO: 82206 - protein, 184 aa, Pseudomonas syringae pv. actinidiae ICMP 19104; identical to SEQ ID NO: 82160

SEQ ID NO: 82207 - protein, 214 aa, Pseudomonas syringae pv. actinidiae ICMP 19104; identical to SEQ ID NO: 81071

SEQ ID NO: 82208 - protein, 148 aa, Pseudomonas syringae pv. actinidiae ICMP 19072; identical to SEQ ID NO: 82150

SEQ ID NO: 82209 - protein, 214 aa, Pseudomonas syringae pv. actinidiae ICMP 19072; identical to SEQ ID NO: 82151

SEQ ID NO: 82210 - protein, 451 aa, Pseudomonas syringae pv. actinidiae ICMP 19072; identical to SEQ ID NO: 82152

SEQ ID NO: 82211 - protein, 195 aa, Pseudomonas syringae pv. actinidiae ICMP 19072; identical to SEQ ID NO: 82181

SEQ ID NO: 82212 - protein, 441 aa, Pseudomonas syringae pv. actinidiae ICMP 18804
MNLTRLCLKNYRRFAEFDIEFDPRLTVISARNGQGKTSVLEAIVAALGPFVGSFDQGASRHIERTDARYARVGEGFESEQQFPVVISAEMSNPAKRWQRALNGPKSRTTTKEAEPLAAWGKELQLLLRNDSAISLPVVRYYSSRRLWVSHKNVSSKAILTESRTAGYEDCLSAFSTYVQLQEWMRKATLAVIQQKQQVGYEHSNLEPRLQGIRNAVNEVMAEEGWSDFHYSLTFEELSMFHTDHSALPLGLLSDGVRAMITLVADLALRCSRLNGHLKEQASLQTTGIVLIDEVDLHLHPAWQQRVVASLRKAFPNIQFIVSTHSPQVLSTVKRECIRMVFQDADENWQAACPPQEVKGVESAIALNDIMGVNPIPPVDEALWVAEYTAKIENGSHEDHNGLALRKKLLDFYGAQHQVILDADRLIRFQTFKLQKHSNTKG

SEQ ID NO: 82213 - protein, 226 aa, Pseudomonas syringae pv. actinidiae ICMP 18804
MLKLDRTSVDAPPCLADYNHPTHEWSDFRGTCKKQLRFALVQLQGIDGVTTEDAAEYGVRCAYCEGAIFHEGHIEHFRRKNPDHFPELTFSWSNLFLACGSIQHCGHHKDRRSAPDYDPSLLIKPDEHDPEHYLYFHSSGKVLARNNLSDHENSCATETIRVFGLDNPALEGARANAVRSYRKMHDADLSEIASWSDAERDAYFRGEIEATRWLPYATTIRHFLQK

SEQ ID NO: 82214 - protein, 452 aa, Pseudomonas syringae pv. actinidiae ICMP 18804; identical to SEQ ID NO: 82162

SEQ ID NO: 82215 - protein, 216 aa, Pseudomonas syringae pv. actinidiae ICMP 18804; identical to SEQ ID NO: 82163

SEQ ID NO: 82216 - protein, 422 aa, Pseudomonas syringae pv. actinidiae ICMP 18886; identical to SEQ ID NO: 82164

SEQ ID NO: 82217 - protein, 214 aa, Pseudomonas syringae pv. actinidiae ICMP 18886; identical to SEQ ID NO: 82165

SEQ ID NO: 82218 - protein, 451 aa, Pseudomonas syringae pv. actinidiae ICMP 18886; identical to SEQ ID NO: 82152

SEQ ID NO: 82219 - protein, 195 aa, Pseudomonas syringae pv. actinidiae ICMP 18886; identical to SEQ ID NO: 82181

SEQ ID NO: 82220 - protein, 422 aa, Pseudomonas syringae pv. actinidiae ICMP 18801; identical to SEQ ID NO: 82164

SEQ ID NO: 82221 - protein, 214 aa, Pseudomonas syringae pv. actinidiae ICMP 18801; identical to SEQ ID NO: 82165

SEQ ID NO: 82222 - protein, 451 aa, Pseudomonas syringae pv. actinidiae ICMP 18801; identical to SEQ ID NO: 82152

SEQ ID NO: 82223 - protein, 195 aa, Pseudomonas syringae pv. actinidiae ICMP 18801; identical to SEQ ID NO: 82181

SEQ ID NO: 82224 - protein, 571 aa, Sphingobacterium paucimobilis HER1398
MLNVNIVQNEVYNLLVRHWQIDPSFRFTFRKSNRGSRLDKGYWFYGNEWYLAVSFWTGMDWKNKTPNIIFVILLDSGKTYLEINTSDSDEKRRFITNFFVNELGLMPNGIRYQKSYQDNYLVSLENFIQTDKIIIDNIITENAKSFFSKINDGIYFIEAVDFEGQKEKIDRYRENNLIHASVDTQKPIKICTIEILNYGPIKNIHISEIPFSSQWIFFTGENGTGKTSILRAIATAICNQKIHASKSESENAKITIELSSSTLNITSYTYPYNRIIEESAFPLTKGFAAYGQSRLKTTHGLDSKSLKSISTELTSSLFNDETALIDLQYQFDVWNSQQNSQFSKRKNYITEILTDILPNLYDIKFDDQIEDKAVTTYIEKDHDGAEFTKVTFNKLASGLKSMIAMIGDILIRLYNQQPDINDPSEFTGIVLIDEIDIHLHPKLQKQIVQQLSKTFPKVQFIASTHSPISFLGAPKNSQIYRVERNSVEGVKIKRLDELLELGDLLPNTILTSPIFGFDDIVPESHDQKRLIRTETTYSDIELNDIVQKRILSFLTDEKEQQLIDLFKSRRQ

SEQ ID NO: 82225 - protein, 301 aa, Sphingobacterium paucimobilis HER1398
MRFVVKREEDKTDRLASNETYQALLAITNTLDKNLITDTIYREAYDHPDGKRSRVEDRLSLAYHNKCAYCERICKADIEHYRPKKAVNEDGSHPGYYWLCYEWTNLIPSCITCNREGAKHNKFPVIGHRVSAPMLLADGNIDLALSKAGVTPLVDERPYLLHPEVDHPEDYFEFEIDPDGEGIRIIGIDGEGRGNATIQICLLNRLELKLDRVERVINDFKDAINALFLKLENGNINDGQLADRISEHIDLLHERSLQENRNHTYLSKYIVASAENFEKIVLPFLDLKIRHILIEAFKSTN

SEQ ID NO: 82226 - protein, 372 aa, Megasphaera sp. NM10
MNQHFITQIHIDKVRHLQNITIPLSETTCKHLILTGKNGSGKTSVMESLKAYLSIYTEDSDTVDIAQGVTAQFNDKESMQSKVYTGEYIFAYYEAERGYTAHNEKNVSKVDLKERYTIQEHPGQEFVKYILNLKTVGAMAEVGGKKERAEEIKEWFQRFDHVLQIIFDAPQAHLDFDIETFEFHIVVPGREPFTFDTLSSGYAAVLDIVVDLMMRMEKKAGKRYDLEGVVLIDEIEAHLHLELQKKIMPILTGIFPNIQFIVTTHSPFILNSIENTVIYDLANHMLVNTPEGLSNIPYDGIVEGYFKASVLSDELQKKYERYKQLACKQELTDDDYEEIANLEYYLDEIPDYLGLDFMADYKKLKLELSQKE

SEQ ID NO: 82227 - protein, 218 aa, Megasphaera sp. NM10
MVKCDKSPVAPASLKVEKLKGENGSYRGEDVVEQLKTDFHDKCYICELKGLQDPEIEHLVPHKGNLDLKFDWNNLFWSCGHCNSIKNQRKYEGKIINCCQEDPELHIQFLYTNDNIDVKPLDDHEETQMTAKLVDEVFNLRNTGMRVIKSAQRMKALQREMNIFFNELKRYQEHKSETNKRRVVVRLKRSAAFAAFKRSYIRNKDEYAEFQEYVSLIK

SEQ ID NO: 82228 - protein, 535 aa, Megasphaera sp. BL7
MIFVPMKSEVGSMYLKRFKLKNFRGYKEAVEINFDDLTAFVGKNDSGKSTILEALDIFFNENKGTVKLDKDDLNIDCKDAGDVDIMMTAYFSGLPDSIIIDESNPTSLQDEYLLNKNNELEIKKVFHNASSSCKTYIIANHPQNSECNDLLCLKNGDLKKKIKGLGIDSDIDLTKNAEIRQAIWKYYRDKLQLAESKIDISKEDAKKYWNKISTYLPIYSLFQSDRNNSDSDDEIQDPLKNAVKEIISSNVLQEEFEEVAAQVLDKLNEVASRTLEKLKEMDEETAKTLKPSIPDVKQLKWADVFKNVSIAGDEGIPINKRGSGVRRLILLNFFRAEAERKLEEQNENNSTASIIYAIEEPETSQHFSNQVKLVEAFKTLASLNNVQVIMTTHSGTIVKKLDFNDLRLIDNEGIDKGTAVKTIRPNCLPYPSLNEVNYIAFNQITEEYHNELYGYLESNNLLNEYKKGKRTRKYIQICRNNELKETDKILTEYIRHQIHHPENDKNEPYKPEELEESIEMMRNFIQKQDNIMDDM

SEQ ID NO: 82229 - protein, 218 aa, Megasphaera sp. BL7; identical to SEQ ID NO: 82227

SEQ ID NO: 82230 - protein, 372 aa, Megasphaera sp. BL7; identical to SEQ ID NO: 82226

SEQ ID NO: 82231 - protein, 218 aa, Megasphaera sp. BL7; identical to SEQ ID NO: 82227

SEQ ID NO: 82232 - protein, 541 aa, Vibrio fluvialis PG41
MPSNPNRQINKIVSKSESGSFAASAQLVQIYSEGMMGAPVDVEKVHYYRIKCAEQLTSANLRLASLKLMGYRGFESLDIPFSQKSNVTVLVGNNGSGKSSVLDAIQKSLTHFVSRLSTRSYNGDQLDEFDISNGATFATVIPEFKVAETSFSFELSQSRPMIEPRKKSKFTELNEIGNLYRLANTEKKELSLPLLASYTVERANDVTTKDIEESDEILSSHTWDKSKAYSKSLTGKADFKLFFRWFKEQVESENDESSDIKVIKAQIESKESEINSSLMKSILSNPETVETGEILIKQYKDQINELQEQLNEKSNVGNKSLDSVRNAIYKFLPGFSDLKLKRAPLDMVVKKDGQEFSVLQLSQGEKSVLALIADIARRLTMLNPSLANPLEGSGLVLIDEVDLHLHPSWQQKIMQRLESTFPNLQFIVTTHSPQVCHTLDSDNIWLLKDGKKFNAPKGVRGAVSSWVLKNLFYVEERPPEDEITQLFNKYKELVYADQYDSAEALKAREVLIDNFGKDYDEIVELDLYIENKEWEKEFEED

SEQ ID NO: 82233 - protein, 257 aa, Vibrio fluvialis PG41
MRRINKSTESNVLTEYAAEFPDSNWDEFRQHNNGESYATIKTKIFSEQYEICAYCEVGLKGEPNHNKRIEHFVSKSDISSSSNVHLDWFNLIGVCLGGTDYKNREEYELPENLSCDSHKAHIEELESIVDKDWNGKVLSPLSILQDHGLFDFDKVTGNLTPNLQACNEQVIEGNVHETTLLLVEETIRVFNLNCERLSAARLKLFRQLQNKIKTARKTGDMGIIERFVASWKRDFPLFFQTSRDAILLDNKITSRFL

SEQ ID NO: 82234 - protein, 421 aa, Sorangium cellulosum So0157-2
MELAPRLNLITGDNGLGKSFLLDVAWWALTRKWPQDLNENLTSGYVARPTDVGQKATIKFSVESKTGRVEYESSYVPADQSWRGKAGRPWNPGLVVYALADGGFAVWDPARNYWRKKGNIDVQERLPAYVFSSKQVWDGLPVLVDGKTTKVSNGLVADWASWIREGKADAKRMAAVLAILAPTSGDDGLQVGDTFARLSVNDARDIPTVRMAYGQDVPILYASLGVRRIAALAYMLSWAWREHLIASQQLGQQPSSRIVVLFDEIEAHLHPRWQRAVVPALLKVVQTLTADAGASVQLIAATHSPLVLASVEPLFDVEKDKLFVLDIEDHVVTLREKPWAMQGDVINWLVSESFGLQQARSIEAEKAVEAAEAWMRGDTAALPPDLSTKEAIHAELARVLAGHDPFWPRWVVKFEKAGGRP

SEQ ID NO: 82235 - protein, 189 aa, Sorangium cellulosum So0157-2
MIRFERRPKPEGFEERVEGPGAAWLKANATGRPPAHWREFRPQLADAFGSLCAYCAMFEPVGTVDHFVSVDEDRSKSYDWTNYRFSSGWINSSKQSLRSTQVIDPFAVTNEWFEVQLPSMQLVLTDHVPPEERERAQFVLDRLHLGHDERVVRQRREWYRMYQDGELDLIGLRKKAPLIAAAVKKQEIA

SEQ ID NO: 82236 - protein, 471 aa, Sorangium cellulosum So0157-2
MYLREIHIRNLKLLRDLRLSFASSSGEPRMWTVIVGENGLCKTSILQAIALAASGPDRANQLADIPSLPDRRHPDEPLDIAASFAFGPLPEGRSRTYPGWGDKLGQPPKFLRSRLSLAPGWKVFVGSSDYGDPSAHPREHLEPARSADPGPLREARAIGAPWWFVAGYGVNRRLPKPHGAARPDDPTLSRLDSLFDGAPILGTGFADILQDLGIEPSRYAEMLSDALFRRSRLLPRVRGLELRRRGAVKSAADLVEAHRFELRSGSSTFTLPATWLSHGYQGLISWIADLIGQIVADTQMLADKSKYGTLVDPAEKSGLVLIDEIDLHLHPSWQAELVPKLKKVFPRMQFVVTTHSPLVLPGFAKDEIIRLGRNRDGDVIARKTGESPALMTGSELYEEFFGIDRLYPTDLGEAAQRYGLLANDPGRSDAEEQEMVALREKLRAADVEPEWEPVSRTRVSEKRPARKARGR

SEQ ID NO: 82237 - protein, 268 aa, Sorangium cellulosum So0157-2
MIRVNRGAKPEGLEAIRKAEVKRLAAIVRGAPPKAADFGNRYDIARRVLWKAQGQTCCYCERRIDRLYNDVEHFRPKTRAHRGGDRPTHGYWWLAWTWENLLFACPSCNRRHKKNKFPLVRGSRILPVGHSPPGPERALLVDPAGSDDPMDHIQFVPLHQAGKKRKWIPVARGGSRRGKRTIQVLKLDRPALVTHDGGHVSDLVDHHVKGIRAAIDAGDVQAAAKVWQAALKKLFYPRQAFKALSYDVLDHHFPLGTRQQWGLEPYRP

SEQ ID NO: 82238 - protein, 383 aa, Sorangium cellulosum So0157-2
MRAGSAKAVIRLRAHDDEDDLTTLALEPSPGGEVLRRRTFTEAAMPFIVAYGSRRGSGLLDSGRSAEPTPLAAVETLFDEGASLMQPDSWLIRWQLAALQGGKGSREARFFDAILSTLCELLPDVKAVHVSAKGVEIEGPTLGRVPLGALSDGYRTTMGWILDMVARWVEEARRRNLQVDGDFHEKMAGVAVIDEIDLHLHPRWQRDVISMVRGHFPRMSFVVTTHNPLTLLGARPGEIYVLRRGARGGVEILQRDLPPGAGAERILTGEWFGLPSTLDDETLDMLAEHQRLIRDSGLDAPEAVKLEEELRRRLGSFADTPVERLAHEAMAEHVEKDLRELTPEERKQARAKVAQILDEKPGPVKPAPVKSKPKAKRPKQSAG

SEQ ID NO: 82239 - protein, 275 aa, Sorangium cellulosum So0157-2
MARAIAAGQAPEFPPLWRKEEYKRAFVAAQHGKCGYCETYALNHPPAIEHYAPKGELEDLANDGMEADGLYGVRERDARQISATGYHWLAYEWKNWLLACERCNTGWKRSLFPVRERPHPCPPTPDQPYTPLLLSPFGVEDPVEHLEFSVLGNVIARHGSEHGEATIRTLGFSRRESLRKIRHGFAEDATRHARGLEQALADDKLDRAQIHAEALISLGGEERLHAGMVRSIVLSKLGLRWSEMEELAEKIAAKSLPHAKDPSLGTDNRKRGRKR

SEQ ID NO: 82240 - protein, 446 aa, Sorangium cellulosum So0157-2
MLRSLHLEGVGPADRLDLELGERLNVLTGDNGLGKSFVLEVAWWALTGTWTDRPVLPQPGKEEGARIAGEAEPGTTRHQFEGKYDRLAQQWSDRFERHMGRSWTDTPSGAVISSWVRGLVPVLHVRTNGACSVWDPCRNIPSLGSALYRLSSSPSPDPQPYLFEERQLWDGLVHEGRPVCNGLVQDWVTWQLEAADGDEAHPFQLLCRVLQQLSHPEETMTPGKPVRLYLDDVRKFPTIELPYGTIPIVHASAGMKRILALSYLVAWSWSEHMQASRLIGWKPSDRIVLLMEEPETHLHPKWQRHIVPALLGALSGLSPSMRPQVLLTTHSPLVLASMEPHFKPARDKLFVFELDGADVTVRELPWAKRGDAIGWLTSPVFGLEQARSIEAERAVEAAEAFMRGETGALPEGLRSEDAIHRELVRLLPDQDRFWPRWIVRRERAGA

SEQ ID NO: 82241 - protein, 222 aa, Sorangium cellulosum So0157-2
MDRAPGAGGRMIPFERAPEPAGFDASVRQPGQRWLAKGDARSTPGYWRRAARDLRAAFKDLCGYTAMWLSTPGTVDHFVSRDEDPSLAYAWTNFRYAAAWINSSKSALRSDQVLDPFEVGDGWFEIILPSCQMVLTDRCPPEVRDRAQTMLKRLKLGDGESVVSFRQEWYRMYCEGELSLEGLARKAPLLARAVRKQREQAAAEPAASDGAPRSRPAEASGA

SEQ ID NO: 82242 - protein, 423 aa, Sorangium cellulosum So0157-2
MKITSLSLRDFRGFRSLDLDFSPDVTALVGVNGTGKTSILDALALLLSCLVESIRSGKPETVAPYASDVRVGASTAQLSLTAEIGAQPSHWSIAKTLPGHPPGPPSALDALREPVAVAQGTIALGSPLLPLVVYFPTNRSALDIPERIRTPHEFDALSAYDGALEGGASNFRGFFEWFREEEDILNEQQVLEMMDDQQGLEESAAPSPLPAVRWAIEELLPGARRVRIERRPQRMTVELNGTRLDVAQLSDGEKCLLAMAGDLARRMALAAPKVPNPLERPAVVLIDEIELHLHPGLQRVILPRLRKVFPRAQFIITTHSPQVLSSLHAANVRVLERFELRTLDRGTWRRDTNRILEAAFGDPGRPPEVAAKLNLLRDAVDADRYDEARQLIRELSTMIEGDDPDVFFYQQLLPPEDTTEAAS

SEQ ID NO: 82243 - protein, 224 aa, Sorangium cellulosum So0157-2
MRHIVKGAEPATVTETRTASTTDLSTTTRARTAFDQIDKGRVRADLAREQGWLCAFCMRRIDPDAADARGERTMKIAHRTPIDVDPAQALSWRNLLGSCDGGQRSGWRTRSCDAAQGSTALTVDPTVHASCIQLRYERRDAREGLFITSDHPGLKTDVEQTLGLNSGDLPVLRELAWKAFCALQQKHAPKQYGRPARVAFFPTWMKQQGSRLPEMLGVIEERLR

SEQ ID NO: 82244 - protein, 246 aa, Acinetobacter baumannii BJAB0715
MKEAIVSMAAFGPGNQFVQKNEKIEKQFSDFKDILKQILPADLGFKDLSVRIPDLVLETEKGDFLLDASSGGIMSIIDLAWQIFLYSHDKDEFVVTIDEPENHLHPSMQRSLLNDFVKAFPKAQFIVVTHSPFIVSSIRESNVYALKHEKNNVSDQQSGWAKKVVSYKLDLNQKAATASEILRDVLGVPVTLPKWADDELQKICSTFTVQDITTDGLSRLRAELNNAGLGEFYPEALSNIVGESGL

SEQ ID NO: 82245 - protein, 222 aa, Acinetobacter baumannii BJAB0715
MIKIIKKQKPAVLIKNASKWKSQLLDDIKAEKKSTKYLLTRYSHPEIKETLIEETHGKCAYCESKLLHIHHGDIENIFPKALDQSKRYEWNNLTLSCEICNQNKSNHDPNLNHILNPYIDNPESSLIFFGTFAHGMDNKGEATRFLLELNRTALVERRQERLDKIRLIVKELNNTGLPIVARKAIYQDLIENEASHESEYTSMVKLAIRCFDASIPTEVKAA

SEQ ID NO: 82246 - protein, 527 aa, Desulfovibrio sp. X2
MRLDWFWVEDFKNLKEVTIDFDENHWVTVVIGWNGTGKSNVLEALATLFRDLIMIHEFNGSRMPTFKYKLIYKCQNNLIAIDADPNRAQNAYRISVRGLAEQVQSNLPLSTSEDKFESIFAQGKTLPLTQFIKHQEEYLPRNVFGYYSGYAGRMEEIFQPYLEKYDKELRAGKDPGFKRLFFALPIHSQFVLLAFVLKHEQMIKDFLNKLLFLDPVDGIESVLLVLKKPGWANSKRKNGDNRFWGAEGVVKDFLARLYDIALAPIRITREKQITLWNRSRIEFLYLFVKDMNALRTLVGDREPRSLFRDIESTFVSEMIEEIRIKIRLRDGKGKVTFRELSEGEQQLLTVLGLLCFTAEDQSLFLLDEPDTHLNPRWSADYLEHLKKFVGADDEGNESSHILFTTHNPLAIAELVKEQVQILKRSETDLETTVHTPAEDPRGMGYSGIVTSDMFGLDAALDRHTLNLLENRRKISLKDSPLSPDEKAELARIEKELRPYGFRHEARDPKFRDYLKERFAAKSEEDAE

SEQ ID NO: 82247 - protein, 271 aa, Desulfovibrio sp. X2
MRSIDIRRLRLPADWQDKADKALEDVKTGVCKLKNRANIWCEAKDSLAELSHDKCWYCESKQIRSDDAVDHYRPKGNVQDTEREHPGYWWLAFDKQNLRYSCTFCNSRRKNPATGETEGKGDYFPLKDEKKRAYNPGDERNEEPLLLDPCNSADPSLLDYRSDGKPCCKFPDDPDCVQRVKASIKLYHLDHEGTAEERRLLGEEIKSWLEEANEAYEDKKNGDRQAARTYSSRFRDIQTKMRPEAEYSVFAKRFIASFRHYEWVDELYETL

SEQ ID NO: 82248 - protein, 393 aa, Blautia hydrogenotrophica CAG:147
MKIESLVVNGIGGIHHLELSFGDGLNVICGANGIGKTTILDIISDAFSSNISSKLKRNALYEVGKYNIQLSLIEDGKRVINNKEEKVEKFQPSTDTYRGGWREYSKDLLYFGINRNIDYIKLNSVTSDPERQEYVVGQMAVNGIQANDIKNWFVNRYLFVDKKDSLSQEQIENYRLAEKTFSVLDDTVNFKTVIARTYDIMLNTLKGDIYFEYLSSGYKSCIYIIFGIIKEIEYRNSENPIQASQFDGVVLIDEIDLHLHPTWQAGLIKALKTIFPYAQFILTTHSPSILQTLEKDEIIALGCDEEGNTHLKELNLGKYGLQGWTLEEILKYVMEMPATTSRLYQETLAKFDEAMNNEDRDKILQQYELLKEMLHPENPLRKLLAIQVAEWEE

SEQ ID NO: 82249 - protein, 257 aa, Blautia hydrogenotrophica CAG:147
MIKVERIEKPEELTVDVQKHLTEEFKKDKKKSVWNKKYIRDKLLKECNNKCVYCECFIGEGYKEMHVDHFHYKDKYEDEVVEWNNLNPSCPHCNKNKSSHDTYEEPIINPFEQNPQEYFYLKNYRYYSRNDKVEKIVRDTIDVLGLNDTEDVVKFRFEQGEAIIEKIREIYELANENKYILCSDTKKKNRVLRGCKNILSKGTREAEYSAFMATIIKDDIYYGKLKSILIELGIWNETLQELDAKVDEIKMQTIPDM

SEQ ID NO: 82250 - protein, 420 aa, Firmicutes bacterium CAG:791
MNHLYITNIHIDKVRHLQNIDIPVGSVENRKHLILTGRNGSGKTSLLEAVKGYLNSVSTTNDPYEARKSLEAGKRNLAYAQQHNKTQNEIADIEELIKFYEDRIKNSTCGLQLTFNTPESNLKVAFENGEYILAYYGAQRAFGAEQPESIKKVQIKKNYNITEEPRQQFLNYMLDMKMTQAMALTSGKPEDKDKAEEIRKWFDKVQSIVRDVYEDPSLTIDFNVDTYRFTIHENGREPFDFNTASDGFSAVLDIIIDLMLRMQEQNKRTVVFNKPGIVLVDEIENHLHLELQKRILTYLTSLFPNIQFIVTTHSPFVVNSLEDAVIYDLENKTLVENGLSDVSYSGVVQGYFESNELSDELRTKFEQYQKLTQKKNVTDEELAEIARLEMYLDEMPDYLMPEVSTEYKRLKLEFENRKDI

SEQ ID NO: 82251 - protein, 219 aa, Firmicutes bacterium CAG:791
MVKIERSYPAPASLAIESQKKNGKYNGEDVIRQLVHDFHDKCYICEMKPVTDVQVEHLLPHRGGEYRDRKFDWDNLFLSCPHCNQVKNKTKYDAGIIDCCKEDPEKFLLFRLENDSVVVRALSEHDGKAQRTADLVEETFHCMNTGSLTHDSEVRLQDLQKEMNVLYTWLGKYKNDKNGRAKRTLKGLLSRESAYAGFKRSYIRLHKKEYPELNAMISA

SEQ ID NO: 82252 - protein, 435 aa, Firmicutes bacterium CAG:791
MYLQKLTLHNFKCFENLELEFHPNLTVIVGANGSGKTSVLEAAAIAVSTLFVKMDRLSGRSIDKSQAHLKAFSIGSTKDVQPQYPVTVKASAVIEKEEATWSRSLNKPAGSTTVIDAKEIIDIGARFQERLRKGDTSLILPVIAYYGTGRLWDYHREKQNDVFETNNRSNGYIDCVDGTANIKLMMNWFSKMTVQKYQNQELGAGDIPELETVYSAMESCYQRITGSDFVKIQYSMATRELEVAYKDPSGKLMRIPINQLSDGYKSTISLVADIAYRMAVLNPQLLGGVCRETEGIILIDEVDLHLHPTWQQRILKDLTEIFPKVQFIVSTHAPAVISTVKSENIVMLDNGEAWEPSGEIYGKDINTIVSGIMKAPERPSDIKELFDDFYHWVDMGQAEKAEQTLDALKARIGNDDSEIAACNVKLKLLKFRRDK

SEQ ID NO: 82253 - protein, 240 aa, Firmicutes bacterium CAG:791
MILIKKMQAPSELEHLKREAEEQGLSDKEGYAELRNPLKSQIRESLMKEQGHLCAYCMRRIPDERIREEDADLSDVYIEHWMARTADNKTGENKGLDYRNMLAVCSGNEKAPGAGKHKRRFLTCDKKRENAPLKINPLDEKTLETIYYLADGTIKATDPEIDYDINIHLNLNCSTEAVTLPENRKKVLDTIQEDLVNQGGDLRQNCIEQLQMWESEEDPKTPYIGIAIWWLKEQIAQMEC

SEQ ID NO: 82254 - protein, 455 aa, Firmicutes bacterium CAG:24
MCEFKIQELALLNYRRFENEKFTLNPRMNVFAGKNGSGKTTVLEAANVMLGAYLAAYKTYVPSRFVYNIKSADVRQKAQISEDSTIFTTGTISQYPCKISCIAKWGEQDKTIEFQRVILKEDARTKFGGSNPMQPTVIAWEEAISKADHSDIEVVLPLVLYLSTARLWKDGNKKATKRGVFSRTDAYNHCLDAQHGLDIAFRYLDTLKAVSMEENGGILFPAYQAILEAVNEAFSEELQPGEEIIFSTKYEDDMIALKTAEGTILPFRMLSDGYRNVIKIILDIATRMCILNPYLKGDALKKTPGVVLIDEVDLSLHPTWQKRIIRILKEQFPRIQFICATHSPFIIQSLEDGELVTLDQPLDSEYSGEGIEDIAEDIMGVVLPQYSEKKRKIYEASREYFSALKEAKTQDEIEKLGKRLAELEAEYSENPAYMAWVHQQYTEKAWKVKKNEGNR

SEQ ID NO: 82255 - protein, 232 aa, Firmicutes bacterium CAG:24
MRAIDKGGSPYKEIDEYQDAIPYLEKKIGLYCSYCEMSIKHVPEVEHKISRKNGGDWTAWSNLLLGCKYCNTRKAAKITPQNVGEYLWPDSDNTAVAFSYTNGIPKVNEDILSALDPTGICCEKAKNTYEMVGLGNIPIQKDDKDRRATSRNSAFIKARESLEGWRQIKDAPETYKSVMKTQIMITAVAEGFFSVWMTVFADEPQILQALIESFPGTNGAYYGKDGKIKKIM

SEQ ID NO: 82256 - protein, 444 aa, Prevotella sp. CAG:924
MRDITIKNFRCYEEKNIEFRRGVNLLIGDNSVGKTSLLHACNLVMNAFFSGYSDENTVWKSADDKDFRETGITESPIELVFHAGEWDFPTIQTQIGDSYSLDTNVELKIEKKSKKNSRNLVTGLKPLKDYATALMLFSHVVQEDKSIRQINPLPVYACFTTEDIHTVRKFDKTRFKKYNHKPSFGYYECYDCKGLFECWINRLLVLRGAQKGEEEINSVRNAIIDALGPDGCNIISDIDIRHNEGKVYFKFVDGRESESTLLSDGYRRLVNIVMDIAFRCALLNKAMFGDQCYKRTHGTVIIDEIDEHLHPALQVRVLKALQDTFPQIQFIVSTHAPLVMSSVEPRNDENGNEINVVYKLEYANGNYTHRELNLYGMDASTIIETYMGQPSRDLKVNAGIKKILDLIDKGNVQKARELLKELGQNIASGDPELTRVEALISFME

SEQ ID NO: 82257 - protein, 229 aa, Prevotella sp. CAG:924
MILITKNKEPKEWTEYRNTPGVDYQAIPELVQSLLKEQGYICAYCMRRIPVRDRLYKKDGNNYVLTDEDHRVEHIKSRELHDDLKLEYTNMVVCCPGHIGTEDHCDRLKGAKDISFTPLDQQFIKTIKYRSDGTILSTNEQYDKEINEILNLNTELLKKNRKTMLIEVITRINVDCKREKSWDKNTLERYLSKYSEKHSEKDGEDVKEKYYSYCGIITWFLQKKLRALG

SEQ ID NO: 82258 - protein, 446 aa, Prevotella sp. CAG:924
MRIKEINIVNFKGFQNKTVRFNGNLTVVIGNNTAGKTTLLKALQVGLGAYLQSLKDLPGGTAFRRNFSSHDRFMRFDKDLRDYVPNEAKPRITIKADYPVTQSSCANSPELSFIPIQWYRELSGNYTTHTRAAAGELIDAVHRMQDLRNDEKQSSIYPLVLAFGAKRTDDSQAKSKSNVRERASRIEKAYKFALHDKVDFEGAMEWLSRYEKNVKDGKEFDGTRDAFFEALQVAVPALSEIDFDHGEIEAVVSVTGHAPSRHHFSYMSDGLQSMINIVSEIAHRCIELNGFLGVDAVKMTPGVVMIDEIDLYLHPHWQKHVLQDLTRAFPLIQFIVSTHSPFIVQSLQEGQLVSFDDDVLTTGEPFRESLEDITSERMGLKQDIRSKRFNEMVATASRLFEAADNGSADKEKIKSQLDELEAEFSDDPAYLALIKTEIKARQKSVL

SEQ ID NO: 82259 - protein, 248 aa, Prevotella sp. CAG:924
MRPVEKKKPGDTVRYLNSNNQVVVHTLQEHYPHYKDALFPLVGNLGSYCSYCEQPQTVDVIDVEHIVPKSEGGSYTAWNNFLLCCKICNSVKGTKKLNPDTGCQWPHLNNTFYSFVYDETGRVRVNDHIPEISKQRAQKLLDLTQLQRYPGTDNPLSPKDFRWHKRYQTWNIASTFREQFLKGAITEDDVITNAKLIGQWSVWFTVFKGIDCILRRLISDFPGTCASCFDENNHYEPVERNPGCIDPI

SEQ ID NO: 82260 - protein, 423 aa, Firmicutes bacterium CAG:424
MERLFITELQIMNVRHLKDIYIPLSNDKMKHLILTGKNGSGKTSVLEYLNQYFMMNREYYQASGVAPFSDDVAAFVEQMEIKPQESEQTDSGVVKRLLAYAKAFKTLPYLEEYENCIKAEFNVPEGQWIKTFKNSGFLLAYYGAERKFQPEKPKHVEKVELKSGYGTTEGPRNEFIKYLLDLKMTEALAIANGKQEKAEEIKIWFLQFEKLLQQIFSDTELHLVFDEGEFTFYIEEKGHNPFGFDTLSSGYAAVLDIIVDLIMRMEKNADKSFRFLQPGIVLIDEIETRLHLEMQRNILGLLTTLFPNIQFIVTTHSPFILNSLKDVVIYDLENHMLVENGLADVPYNGIVEGYFNVDGMSKLLAGKFQKYKEIVSKEKLKDEDFAEVAKLEMFLDEIPDYLALDIASEYQRLKLEFANREDI

SEQ ID NO: 82261 - protein, 141 aa, Firmicutes bacterium CAG:424
MVKVERTLPAPASLLTESRKENGNYALIDVVQQLRQDFHDKCYVCEMKNLQDPQIEHLLPHKNGKYKEREFDWKNLFWSCGHCNSVKNQKKYEGRILDCCEVDPEKALSFNIEMNDVKVLVKNSNDEKAIKTARLVEEVFN

SEQ ID NO: 82262 - protein, 439 aa, Bacteroides sp. CAG:545
MKSLKQLSLRNFRLFGEDEQILKFSSDKNVTILVGNNGSGKSSILDAIAISISTFTSNFPGQAIKQYTDSDIHITENEEYGDYLQVESLFDTYYNGDIDILRYRQGKSKSPEGILKNVNSYADLLMSKINNKEECNLPVVAYYGTGRGQIKAPERKRDFKKAFTRWDSYTGALEASANFRQFIEWFDLMEDEERREREDHRDWDYKSKPLETVRKALSIFVGEKFSNPRMMIHPLRFVMDERVGDGKYRQLRIEQMSDGYKIVTAMVADIASRMAEANPDMENPLMSNGIVLIDEIDLHLHPKWQRTIIGSLSKTFPNIQFIVSTHSPVILSGAMDTAQVIVLGEDGIVDADAKGYETYDISQLLLSELFGLQSSRSPQWDNILSEQKSLLEKNNRTSDEDLRLKELDKELSRLSFGDSIEQLKSRDLLYKIAKSLNIE

SEQ ID NO: 82263 - protein, 258 aa, Bacteroides sp. CAG:545
MNKISKSTPVPDILLTRGEELKAKLIEQADNGETNFSFSSEVYADSTVKDRLKSDQHNKCSYCERYLNGDFGDVEHFRPKKAYQQSFGSAMNRPGYYWLAYNWDNLLLSCSECNRSFKKNLFPLEDEHKRDVPHRNVTQEVSLLINPTSEDPGRFVCFEEHIVKARVIDGAESSKGKATIDILKLNDRADLVEARRRKWNEYQTIKKSIAVIRSMLHNVNMSDYAEDMRDAILSQQRCLEEISSNMSEFTGMFKHQKD

SEQ ID NO: 82264 - protein, 422 aa, Clostridium sp. CAG:122
MNLSNVKIKNFRNIEELDINFKPGFNLIKGKNGKGKTSVLEAIAVGLGGFISGITGVSTRHFNIDEVRTEYLKIGDGSYSKKYHVPTEVTIAAQLYGEEYQWTRGKSSIKASRSTTQPRDICRRAEKMVEDDNVELPILAYIGAGRVWNQMRQKWENPFRKHYFRTVGYTDALIEASNEKLLMSWCVKMEQISWQKEKKIAEYEAVKTAVAKFMDFMEEKEGHIVFYDKQEEQMMYKSDELIQPIEHLSAGYQSLIWTVFDIAYRMAVLNPSKLDKIAETAGVVLIDEIDMHLHPRWQWNVVGALISTFPNVQFIAATHAPILFASHKNIWIIDVDEEEVRYSESHYGMDVNTSMQYYQNTREIPEKVRQKVELFNKKMDDEKYEEAEVILKQLEIETAPAHPLLVELRTRFEFESTDWENQ

SEQ ID NO: 82265 - protein, 216 aa, Clostridium sp. CAG:122
MIYIKKGKEPASLTKYKKQKFAYYDGYKEKDDLRKMLLKEQGYLCAYCMRRIDIEHMKIEHWFPENELSDIERLDYRNMLGSCEGHIDGTYGKKDDTCDSHKSGDKITVNPLDRSTLCSIKYNSDGEIYSDNEIIEKDIDVVLNLNSEKHLLKLNRKSMLKQVREELCKMQKRGIWGRSVLEKVKNKYINADENGYKKEYAGVAIWYIDKKLNSTT

SEQ ID NO: 82266 - protein, 418 aa, Clostridium sp. CAG:122
MRLKQIELTNFRAIDEAVIELDGKSTVIFGINGTGKSSILRSVNLLFANIINQVVNRKELKQNYAIQLEDIMYGKSGTSIHATIEFEGTEFEYSRNMMRNTGRKTHNKKALNEIVDIFHEKYISDEEQNDIPIFANYGTNRLVLDIPLRIRTHHTFDIYSAFEKAIENKIDFRTFFEWYRNQEDYENEQKIETGNLKYEDNSLQAVRKAILSMLDGCSNLRVVRKPRLEMKINKANISLNVSQMSDGEKCTLALFGDLARRLTLANPNKENPLLGEGIVLIDEVELHMHPSWQRKVLSALRDTFPNIQFIITTHSPIVLSEADENYNLFFIDNSEGKFSIQKNKQLNGYDANAVLEQFMDTSSINEKIKSFIDSIYDDINSRLFEQAEVKINALAEITSENHPDVITARMELKRRRYI

SEQ ID NO: 82267 - protein, 189 aa, Clostridium sp. CAG:122
MIYIEKSEEPEFLSEFKRKNPDKTYDSEEFAHYRGILTDVLIKEQKGICAYCCGRIKKENVHNEHIEPRNPGKYVSKRSLDYSNLVASCNTIRTCGRKKENKYDSDKFVSPLEQECEKKFTYYGNGTIVGDEYTINLLNLNDYELREARKAVYQQLQHLDKETIKLVYMNEQDEEYQPYYNVIKWYVNG

SEQ ID NO: 82268 - protein, 248 aa, Roseburia sp. CAG:197
MVHLKTQQSYARNEGNISDVENIQMWFDRFERALRILLDEDSIKLQYDYKNYDFKIVQDGRVPFNFAELSDGYSSVIYIVSDLILRMDKNWLNENRISQYTEEGIVLIDELETHLHIELQKKILPFLTEFFPHIQFIVTTHSPYILNSVANAKAYDLEKHMELDNLYMYKADDLAEGYFDADDFSNDMKKKFAEYARLVDAKDISDEERIKRAELRCQLKNALSKFPEGEARDMFEDIEKRRAAYDQN

SEQ ID NO: 82269 - protein, 222 aa, Roseburia sp. CAG:197
MIKIERKPTEKALLAQEDLKLAREKGTTYNTDHVNEALREMFHGKCYICENKEATSFQIEHLIPYKGDVELKYDWNNLLWACAHCNNIKLDKYDPIIDCTQEDVEKKIAFRKEGYFGTDEKFVFISLDDDVKTKNTVKLLHDAYYGTTSQKKMEARIIRKHLRENISDFKNYVREYIEAVGEDKEDLELLIQNELSDKSEFTAFKRWLVRDSENLPELKKYL

SEQ ID NO: 82270 - protein, 426 aa, Firmicutes bacterium CAG:56
MFLESMILHNFRCFSDIEIKFNNRLTVVVGNNGAGKSTILEAATIAAGTLTAAMDGLTNYGIKKSDAHYKYYDLGSTIDVQPQFPVEITASGKMDGKDITWSRSLKSAKGRGGLASAKELTSIAEEYQERMRNGDRELKLPVISYYGTGRLWAQHSEKKNDTFEKNNRSNGYIDSLDGAANDKLMMKWFEKMTYQQLQRQEKIPEFVAVKMALEQIFASVTGYSDVKVQFNLDTGEIDILYFDGTEHVRMPVSQLSDGYKCTISLIADIAYRMAILNPQLLNKVLVETEGIILIDEVDLHLHPKWQKRILKDLMDIFPKVQFIVSTHAPEVINSVKKGSVVILRNNEVINATDETYGKDANTILREVMEVSSRPDIIRFLFEKFYELLDSGEWKMAEEIIGQLEKEIGNNDPEINACRVRLELEQM

SEQ ID NO: 82271 - protein, 222 aa, Firmicutes bacterium CAG:56
MIRIKKGREPGKLLWYRQQDGASYEQMDKEVREELIDQLLREQGHLCAYCMSKIPESRNLPSGVPAVTIEHWLPRNPDDKLDIGQGLDYKNMFAVCSGNRGCGCEEKLTCDARKGNDAIKVNPCDESTLRGITYKSNGIIQSSDPVIDEDLNQRLNLNGANSSFQENRKQVLESLIFDVKKRCGNGDISLYCKRRLEKIQAMDDQKIPYVGILIWWLEKHIK

SEQ ID NO: 82272 - protein, 438 aa, Phascolarctobacterium succinatutens CAG:287
MQIERLRLKNFRCYDELDIDFEPRLTVIVGENGKGKTAIFDALAIALEPYLRSFDASGRQITPQDVRRVPVYKKDMRHIDGMECHYPVEIKLEGEVYGKKLTCTRRLLEGNVPEDDADELCERGCALAHDAKENGNRLLPVLAYYGTQRIWVDSKLMTNFHKSLMERNVGYEECLEPSSSYSTFGKWFEYVTKCAQSEQQYSAEVKRNVMLKNAIQNAVDVCLESTGLRDLYYNYRLKCFVVSHPDMGEMVVDELSDGFRSIISMVADLAYRMARLNPQLREDAVTKTPGLVLIDEVEMHLHPLWQQTVLLDLQKTFPMVQFVVTTHSAQVLSSVPAESIRVLAWGKQFEGVRHVDFSLGANSYQLLQDIQNVSPRPQALPIVQDLKRYLQLVSEDAWDTPEALELRKKLDKWSKGKEPALLRADMDIRMRQFRRRRS

SEQ ID NO: 82273 - protein, 259 aa, Phascolarctobacterium succinatutens CAG:287
MKRVYKSKEEPELLRHYRLHNPEETWEHFRRRCRKGYKQVREAILRDQHGLCAYCEVGIKLAEEEGEVDDFRVEHFYPKNATQEHGHNYHLDWRNLLGVCHGGSQPYVPDPEWRYSSQKRDRSCDVPKGGREITNYILNPLKIPGKIRLFRYAEHSGRMYVDEDTCPKDLQGKARSTIRELNLNAPRLMRMRREVIHTLEDQISEELSKGRELDEVLEMLATICLVPDYNGMTLPFFSVIRWYLGEAAEEVIRASGAKL

SEQ ID NO: 82274 - protein, 439 aa, Bacteroides sp. CAG:709; identical to SEQ ID NO: 82262

SEQ ID NO: 82275 - protein, 258 aa, Bacteroides sp. CAG:709; identical to SEQ ID NO: 82263

SEQ ID NO: 82276 - protein, 421 aa, Blautia sp. CAG:52
MIVQNVDIKNFRGIEYASIEFKSGFNLIKGENGKGKTSILEAISVGLGGFIAGFSDVSTRHFSKDEIRKVIKLTGDGSCDEIYEVPTEVVLKADINGENIEWIRRRTSIKASRSTIQPRKICKVAEEMSVNPDAEYPILNYQGAGRVWSQKREKTENVFKKKYSRTAGYIDTLYEASNIKLLLNWCIKMEQISWQKEQKIAEYEAVKQAVADFMSYMNSGGTYEVFYDKQLEDLMYKTEDLVLPVSDLSSGYQSLIWMVFDIAYRMAILNPNKRSEVCATKGIVLIDEIDMHLHPKWQWNIIDSLRKTFPNVQFIATTHSPILFASAKDVWIIDIEEAEYQYGYSHYGMDINTALQAYQNTTQIPEEVQKRVNQFYDALDEEDYGEAKQILEELEKATAPDHPTLIQMRTRYEFDTMELRD

SEQ ID NO: 82277 - protein, 212 aa, Blautia sp. CAG:52
MIYIQKGKEPASLTAYKKQAHAYYDGCNKDDIRENLLREQGYLCAYCMRRIEKEKMKIEHWDPEDNLTELERLDYSNMLGVCLGHMNGQKKKDDTCDTHKGNVRIIVDPRDSRTLSEIKYRSKSGEIYSENEDIQKDLNETLNLNSEGHRLPQNRKEKLNAVINEIAKTMPQGTWTKEKIRNLMIEYGKCNSEGKKTEYLGIIQWYLGKKMK

SEQ ID NO: 82278 - protein, 414 aa, Blautia sp. CAG:52
MKEYFISEINIEKLYHLSNITIELDTTKRQHLLLTGKNGSGKTSLLLRLVRYLKVLKDGHLIRLTRTWPELEEDAKRKMEHASSENERFKAEQDYRQWSDLIRKYSDGIRVAWNDNDGLESAYQKGEFITAYFPAERKAQFAKPNGVENIKLSEVYDTTENAGNILLKYMVHMKTQQSFARNEGDQEIVERIQQWFDRFESALQVLLDEKSIHLEYDYKNYNFKIRQEGREPFEFSELSDGYSSVIYIVSDLILRMDKNWLLGEEISQYNAQGIVLIDELETHLHIELQKKILPFLTEFFPNIQFIVTTHSPYILNSISNAKAYDLEKHVELENLAAFSSDELAEGYFEADEYSDTLKEELERYAQLCSGKKLTEEERAERAELKIKFKNLSTDLSGAAREKFEDIERRRETND

SEQ ID NO: 82279 - protein, 236 aa, Blautia sp. CAG:52
MIKIERKETPHTQEAMDDLQEACDTGRSYNTEHVNQALQEVFHGKCYICENKEATSYQIEHRIPHRGDKKLKYDWNNLFWVCAHCNNIKSDKYEPILNCTTEPVEHLIAFRKTGYFGTEEKLEFVPVKDDNAAIRNTILLLNDAYYGTTPQKKMEARIIRKTLRKDLSKFKEYVREYQEAENEEEKEDIEMLLKRELKDSSAFTAFKRWLIWDNEEKYGELEKFIPENQKEKLFDI

SEQ ID NO: 82280 - protein, 377 aa, Bacteroides sp. CAG:714
MNHYIKNIYIHDLYHLHDFNIPIADEQTPHLMITGKNGSGKTVLLNALSNFLDNLKHYSLDFSENGEVSLTFPDTPLVVTLKDEFSQKDFIVAFYQAARMPKMIEPQSPTKPIYNLNCAARETVTDQFLNFLSDLKIQEALARNENQMEDAEEINQWFFNFLDLLCQIFQDKDLHLKFNYKDYSFRILTEGKEFKFTELSDGYAAILDIVVDLILKMQTKDSLTRAYQKKGIVLIDEVETHLHLELQKMIMPFLTKVFPNIQFIITTHSPFVLNSLDNAVAFDLEHREAISDLTQYSYEALAEGYFGVSSDSSYMQMQLGRLESLLQKTDLTDSDKYDIRQLVEDLDKVPESVSPNLVGAYMTIKNRYASVLKTVLA

SEQ ID NO: 82281 - protein, 212 aa, Bacteroides sp. CAG:714
MIRERKSENVPSSLLTTSQYDGEDVKAQLLEDQHEKCYICERKLGTDYEIEHFKSINNYPGLRQEWTNLFMACGYCNKKKSSSFDDNLYPLDTNIENEIEQRIDFSRNKASFTTAIDDVPHQNTVKMLHVFYNGKQKMRVIKEERFFDEAKQKMNRFLEKVNTFLMEPTPANRALVAAELSIEQEMLGFKYWVIRDNHLEAEFKNEIVWNKH

SEQ ID NO: 82282 - protein, 456 aa, Phascolarctobacterium sp. CAG:266
MKVVYITKLYLENFRCYDKFEIDFDKELTVIVAENGQGKTAILDAVAIAMGPYLSCFSDGKARNIHETDVRQTVETASKSQLEILRMKSQYPVVIGAEGDVEGRHIKWQRELNNAKGRTTMQHAKMLSSYGKRMVEALRAKDDNEVVLPVIAYYGTGRIWKDSKLRNTIKNIDLERSSGYMDCLESTSSYANFGHWVKYAIMSAVEIERIIAEKHLTEKNPYREVFKAVEQAIVTCIGSMGWTDIDYSFVRQNLVLKHKTRGILPIEALSDGARSVISMVADLSYRMVRLNPDLGINAVLKTPGIVLIDEVDMHLHPSWQQTVLYDLRKAFPLVQFIVTTHSPQVLTTVPPQSIRALRWNNDLIDIYQPDFSLGAASYQLLKDIQNVDARPQCVPVVKELKRYLDLVSEDKWDCPEALELRKSLDKWAAGREPALLRADMDIRMRSFRRKQHEKNI

SEQ ID NO: 82283 - protein, 259 aa, Phascolarctobacterium sp. CAG:266
MKRIFKSPQAPEGLRKFAEENPYETWECFRRANRRGYREVKKQLLKDQHGLCAYCEINITFANEEGEVDDFRVEHFYPKSETDFAVHNYHLDWQNLLGVCHGGSQPNVEDAEERFSKRKIDRSCDVPKGGKPINERILNPLEIPADVRIYRYAAHTGRMIVDEDTCPPELVRKARNTIRELNLNAPRLMRMRREAVMMLEDEIENALAAGEDMEEFLNVLAESFLLPDDNGNCQAFFSLIRWFLGPAAENVLSKYGYAI

SEQ ID NO: 82284 - protein, 450 aa, Phascolarctobacterium sp. CAG:207
MYISRLCLQNYRCYDNFEIDFNKELTVIVAENGKGKTAILDAVAVALGPYLACFDGVKANQISDTDVRQTKDTVGRTLEHVLRMKSQYPVVIGAEGVVDGEKITWKRELKAAGGRTTILNAKALSEYGRHMVKALREVNDSKIILPVMAYYGTSRMWKDNKLFELRKDISLERGSGYVDCMEPSSSYNTFGQWFKYAAMSAMEFDRYLAESGKKDEKNPYTEVLKAVRQAIITCIGSMGWTDIDYSFAFQNLIIMHETMGVLPLEALSDGTRSVISMAADLAYRMVRLNPDLGAMAALETPGIVLIDEVDMHLHPSWQQAVVYDVRKAFPNVQFIVTTHSPQVLSTVPAEAIRILRWDNNLINIDKPAFSLGAESFQLLKDIQNVDTRPQALPIVKDLYRYLMLVSEDKWDTDEARELRKRLDEWSKGCEPALVRADTEIRMKSFRRKKK

SEQ ID NO: 82285 - protein, 259 aa, Phascolarctobacterium sp. CAG:207
MKRVYKSPATPECLRSYVKAFPDETWEHFRRRNRRGYREVKQQLLQDQHGLCAYCEISIKLAEFEDNVDDFRVEHFFPKVATQLEKHNYHLDWHNLLGVCHGGSQPYVSDPEWRYSSRKNDRSCDVPKGGKPISERILNPLKIPASVRLFRYQEHTGKMIVDESSCPKKLQAKARNTIRELNLNAPRLQRMRLALIRILEDEINSALAGGAVLEEFLPLLAESILLPDEDGNYQPFFSVARWYLGEFAEDILRENNYAM

SEQ ID NO: 82286 - protein, 432 aa, Parabacteroides sp. CAG:2
MKEIRLENFRCYTELSIPLKSRVNLLVGDNATGKTSVLRACKFVLSAFFSGFSDDNTKWVNPGNEDFMQMETGGILLQERPIHISFDVADVMGKEADSTGGDSFYTLIKKSKKNSRSLTSGLKEYKDWAALLMHNYISKEGQRIALPLFANFSTEDIHAIRKIDFGKFKEYNHKPSFGYYECLEGDGFFPYWIKRLLVLQEGRENHLEIDIVRKAIQKALGAGGCAIIQDMEVRPIRKKVYYILMDGREVEADFLSDGYRRLVYIVTDLAFRCALLNRGIYGEETCAKTRGTVLIDEVDLHLHPTLQSVVLKGLCEAFPGLQFIVSSHAPMVMSGVESNEENIVYKLSYSEEQGYRIMPTVTYGMDMSTLTYVVLGQTPRAVEVDRQLNELFELIDVDRLKEAGDLLQKLRGKYGDSLPELARAEAMLNCLI

SEQ ID NO: 82287 - protein, 209 aa, Parabacteroides sp. CAG:2
MRKIDKRPEPKEWVEYRQTPGAKYEAISELRSSLLEEQGYVCAYCMRRIPVKDRNSNETSRIEHVLSREKHPDRELDYHNMVICCPGAISSDFHCDKLKGNEDLTFNLFDDELFTSLSYKSKSGKIVSANEDYDRQINQLLNLNNRWLMANRLQALLGVIDYLNRKGWTASNLNQQISKWSNMDAEGRYKEYNSIVVWYLKKKQRQCDL

SEQ ID NO: 82288 - protein, 450 aa, Parabacteroides sp. CAG:409
MRDITIKNFRCYEEKSIEFRRGVNLLIGDNSVGKTSLLHACNLVVNSFFSGYSDENTVWISADNNDFRNTGIAEQPIEIAFHPGEWDFIDITFPNSIMSSHSLDINKDLKIKKNSKKNSRNLVTDLIPLRDYASTIKLWSHVLVEGVGIKQFNILPVYACFTTEDIHSTVKLEKNKFKTYVQKPSFGYYGCSDCRGLLECWIKRLLVLKEAQKGEEEINSVRNAIIDALGPTGCNIINDMDIRHNEGKVYFKFVDGRESESALLSDGYRRLVNIVMDIAFRCALLNKSMFGDQCYKHTHGTVIIDEIDEHLHPALQVRVLKALQDTFPKIQFIISTHAPLVMSSVEPRKDEDGNDINVVYRLEYADGVYSHKELKPYGLDANLILEEMSLVDSRVPEIADRIEKIKDLISEKLLDQASSQISLLEEETDPNQPVLVRLRAIINRLETLGK

SEQ ID NO: 82289 - protein, 244 aa, Parabacteroides sp. CAG:409
MRYIEKNFSYENTDVIAYETELIENKLDKCNLSDAAIHPTMSGPDVYDAVKSFNSFKKFKQAILRDQGSICCYCGQLIKESTCIVEHVLPKSKYRHLAGEYENLLLSCKPTQEEENERKKAGGNKKNNIKYWHCDKLKDNEELNYTPLQKDCTSHFIYLDNGEVKGDDMLADADIKTLGLNCNYLKRRRYSAILGAMFDDSDVLLSNEELEQYATLVMNRKLDGSFIEFCFVIEGAINHLLKKG

SEQ ID NO: 82290 - protein, 584 aa, Bacteroides eggerthii CAG:109
MDSIHIDFTELRTSWTKYDIVQALDVIYSVDTIQKYKNKEAKINERILRSFLGINSLDDPIPDYWIEIQKYPIEKKIFSLLALIFTHGGVVKDFATKYSKDNMKGVFYIDSKDKQLTNIRSALVVAEATDPTNRRKNEVPYDFSVVYYNPKVGKLFKKVLLERISRFTNKELSNDEFYSICIENEFHKALSLTFDQFKTWLEGYSFNACYVKELHISNFLSIKEPVDIDFEKSKEIYFLGENGDGKSLIIMAICLAFNGNYIKYKTEKRDTGIASDILDNNSDIYGIDEWGHQYNISNAIYLDNLYAYGTHRGRYNADPSEKYGFMSLFNNDLTLNSPEQWLKNLKLEEEQAEENKLKIKVATKQLEDILFNLLERNVKTHIEGSKVFFEEKGCFLSIDQLSEGYRSIIIFVCDLLYRLYKNNSDDIFKTKGVVLVDEIDQHLHLKWQRIIVSKLRNIFPNMQFIFTTHSPTIIQGASDDSIIFRTYRVNGITKVSEPYYRKDLDHLMMNTLVTSSLFGLEDSRLDTDDNNSDTNDTYLLYKINKKLISKLQEQKEKGKNFVSENEIDSLIDSILEEYQNEEDR

SEQ ID NO: 82291 - protein, 258 aa, Bacteroides eggerthii CAG:109
MKKIDKDLAVIPPSLAIGDDKLTHQRRLELIAKKHYINEAPYNDRYKTDDIRDRLVRIYNNKCAFCEQKVEQYHIEHFRPKQIYYWLAYSWDNLLLACHYCNNYKGINFAIKGKRAKCPNTKDLKNINTISSSKYNLQEQPKLINPEQSEPSSYLIFERDGKITSDNEDYKYTIETCRIDRKYLNDSRKKIIDKFKREIISELVYNSTPEEQKQAINILVRRFVNEANDNDNEFLAFRNFAIGHNWLNDVVKEAITTL

SEQ ID NO: 82292 - protein, 175 aa, Eubacterium sp. CAG:252
MSSGYAAVFDIINDLIIRMEAQSGLRTQFDMEGIVLVDEIETHLHLQLQKKILPVLTKLFPNIQFVITTHSPFILSSLDNAVIYDLENNTLVKNGLKNLPYEGIVEGYFKADKLSEELREKYERYKALVSKDELSDKEYEEIDKLEYYLDEIPDYLAKELTAEYSRLKLEFSNRG

SEQ ID NO: 82293 - protein, 218 aa, Eubacterium sp. CAG:252
MIKIERNPIPPSSLIIESQKPNGVYNKPDVIQRLKEDSNDKCYICELGGLSDPEVEHLRPHHGRKFPERVFDWNNLFYVCPHCNNLKKEAKYDDKIIDCCVDDPESMLEQCYENGHVNVLNIVDKECAIMTAQLIQDAFEKCNTGIREAACQYRINQLSDEMNVLYKILEKHKKNPELQRYKKSLKVTLSRTSVFAAFKRNYVRKHIMDYPDLEEFLM

SEQ ID NO: 82294 - protein, 449 aa, Eubacterium sp. CAG:252
MEQFYLKNIELFHFRKFEDITYEFNPRMNVVIGKNASGKTSLLEATTVILGAYLAAFKEYVPSRYSHNISDADVLKKSLKPVKNVAVTSSIQQYPCKITSQFMWDKSVKKCVRSLEKEGGRTKFIGKNPMRDDVEKWEKAIKAADGSDNEQIYPLVLYLSSARLWNENRTGEMSKIPARTDAYQRCLDPKRGNQTSFEYIKLLGNLAAEENDGIPLPAYEVIMNAVRYSLKEELSEGQQVLYSSRYGEIAVKNTDGTVINFSALSDGYRNVIKIVTDIATKMCILNPYLGKDTLILTPGIVVIDELDLSLHPTWQRRIVDILKELFPKVQFICATHSPFIIQSLEPGELITLDSILDEEYSGQSIEDIAEDVMNVKIAQYSEKKVEMYEAAEKYFKALKNAASNEDIEELKDRLDTLSARYSDNPAYNAWMQLKYLEKKAEMKNNATGE

SEQ ID NO: 82295 - protein, 219 aa, Eubacterium sp. CAG:252
MRPVNKGQKPVEYKHYRDAEPYLEQRLGTYCSFCEMDISNAPEVEHKEAKSRGGQELEWDNLLLSCKYCNTRKGIYVKKGDKEKYIWPDKDDTFHAYLYDEDLPRLNEEYLKTKDINEREKAENLFNLLKLDNYPVTPKDRDKRFAKRNEARNYAISGREGLKSIKGVDERRVYLELMINLAKSSGFFSVWMEVFKDDDEIKNMLISIYPGTRTEYVSN

SEQ ID NO: 82296 - protein, 423 aa, Clostridium sp. CAG:253
MYLEKIHIENYKAIEKLDINLKPGLNLLIGDNGSGKTSVLEGIAVALGGLFVNVAGVRTKNIVKDDVRMNIKALGDSSTTIEYCEPVVAGCTLQVTEEQNFTWSRIKEEVSATYTKIDDKNVCVWMKKLANNSSTILPLISFQSAARAWRVRRGDFGTELKKKLDDRRCGYIGCLDSSMDVKSIQQWCLKQEIVTSNKGIVREYEMFKNIVASFMKEINELDKMPSIYYSPQFDELVYKDDKEEMPISKLSAGYQSLLWMVMDLAYRVCMLNPELESRDQITGIVLIDEIDLHLHPKWQWNVIDALRKTFSGVQFIIATHSPIVISASKEVNLILLDKVKAVSYLPDCYGYEVEDVLSYRQESVSRPKKVKYLVDEIENAIADIAFDKADAALERLKDVLGEDNLEYKKMAGMISDAKLIEEC

SEQ ID NO: 82297 - protein, 247 aa, Clostridium sp. CAG:253
MLYIEKEGLPNDINRKIIELSKSEEWKSIGEDDTTAIRNAFDNDFPKNEVKEILLHEQHGICAYCMRRIRMDNHSRVEHLVPLSRNKDMAIDYNNMLGVCDGGEKVTGDKGHILCCDAYKKETEITISPLNKAQMDKIAYDSKGKIYTKPKDEDIERDINEVLLLNGIQKKDGTVRDTSTELLKGRKDAYDRAKKMMAALNTKGKCTSATLKKIMDKLYNREERDEFVGVQIYYFRKHYNSLIRRGM

SEQ ID NO: 82298 - protein, 414 aa, Roseburia sp. CAG:471
MKEYFISEINIEKLYHLSNITIELDTTKRQHLLLTGKNGSGKTSLLLRLVRYLKVLKDGHLIRLTRTWPELEEDAKRKMEHASSENERFKAEQDYRQWSDLIRKYSDGIRVAWNDNDGLESAYQKGEFITAYFPAERKAQFAKPNGVENIKLSEVYDTTENAGNILLKYMVHMKTQQSFARNEDDQEIVGRIQQWFDRFESALQVLLDEKSIHLEYDYKNYNFKIRQEGREPFELSELSDGYSSVIYIVSDLILRMDKNWLLGEEISQYNAQGIVLIDELETHLHIELQKKILPFLTEFFPNIQFIVTTHSPYILNSISNAKAYDLEKHVELENLAAFSSDELAEGYFEADEYSDTLKEELERYAQLCSGKKLTEEERAERAELKIKFKNLSTDLSGTAREKFEDIERRRETND

SEQ ID NO: 82299 - protein, 236 aa, Roseburia sp. CAG:471
MIKIERKTTRHTQEAMDDLQESCSTGHSYNTEHVNQALREVFHGKCYICENKEATSYQIEHLIPHRGDKKLKYDWNNLFWVCAHCNNIKSDKYEPILNCTTEPVEHLIAFRKTGYFGTDEKLEFVPVKDDNVAIRNTILLLNDAYYGTTPQKKMEARIIRKTMRKDLSKFKEYVREYQEAENEEEKEDIAMLLKRELKDSSAFTAFKRWLIWDNEEKYGELEKFIPENQKKKLFDI

SEQ ID NO: 82300 - protein, 438 aa, Clostridium sp. CAG:277
MRLNNIKIKNFRCFEKVSIDFDKHITLIVGKNGAGKTALLDAVAVSISSFLLGIDGAVSRSILKDDARYEFHDLNGTIDPQHQFPVSIESVGDCLGEKDKQWLRSLNSENGKTTIKDASQITDIAKKTKNRIMKGDKTLILPLISYYGTGRLYAQKKEKRNLQSLTEFKRQVGYVDCMAAESNEKLMLNWFQIQTMKSLQEQQKTGMVERPLLLKTVEKAICKSYERISGSKNAGIFFDLDTHRLMLEFETDDGGAQKFAMNEMSDGYKNTLSMIGDIAYRMAVLNPTLGDQVLRETPGIVLIDEIDLHLHPKWQQSILNDLNEIFPKIQFIVSSHAPAVINSVPKEQIRILDNGKIYMPVAQTYGRDANSILREVMQVSDRPVAVKQRMDLFYAYMDEKKYQEADKVLKEIENIVGATDPDVAAARTSLDLEMILGE

SEQ ID NO: 82301 - protein, 223 aa, Clostridium sp. CAG:277
MIVVKRGKEPNSLLEFRKKNPDADYEDMPSSVRADVREQMWNEQKHLCAYCMRRIDSPSVVRIEHCRPRHPKDEIVHDKKATLDFKWMLGVCYGNSLVKGVKTEDTTCDAHRKNTELTINPFDEVSVRKIKYKADGSIYSEDEEINKDVTDTLNLNCTAISLPQTRKKVLSEAQKRIVQKCAGKSQDAYVHELERTYTSLVQERNLTPYCGIIISWLEGKLKK

SEQ ID NO: 82302 - protein, 405 aa, Serratia plymuthica S13
MEKNININIFLGKNGEGKSSLFEREIKRLYNNTNRNILVVCNSIYSRYKKGEDNGYRYFGLVRGRVEIESTITKFIARSLDDYNYKKISGVLNYLAYEDKIGFNITFNKHYNNDGNKIIEYTDDDRDDPYINAMLDVMKEEEIKTGRKLQFGITYSEVEKFLVENSGKIIYFDESMQDEMVTSKSIFKAIVQNEKKLKRIGLVKKINYFVTKGGVALPIAKMSSGERYLLGLMFFLSTSLSHNTSIFIDEPENSLHPQWQIEYINKILEFIRYENAYYNDDPYENVRINIATHSPLIALFSGEGKNVTLRKFNVKNREAKVIENKDSSVEDIYMDLFNVLTPKSRSLSNHCSELINEFIKDNITYDEAMAKILNYKSISVERKQADFLSEIVGLLELANKNKSGK

SEQ ID NO: 82303 - protein, 207 aa, Serratia plymuthica S13
MCLIEFNNNELCLIDKALKLGCNCWSADFLSDIKEKIKNHLLKKQLENCCYCQKNLSGEFSMVIDIEHILPKSKYPKFMFDLRNLAISCKRCNMKIKRNDIAFLNDVFFQSENYFDIKGYDIVHPNLDVYDNHLKLCSFQCGSVKLIKYIIVDNSRKGDFTYGYFKLKELEVNTFNNAQGLSNESEIIDEVINEMFVKATEKFNMNY

SEQ ID NO: 82304 - protein, 767 aa, Rhizobium etli bv. mimosae str. Mim1
MRYVSREKVLIPKVLTSPKVNDLRAQLARYASSQDGLSRQQRAPIDHSVFEDSDILGGLFDLFERRCGYCEQRLDHYNRPPLEHHRPLGVAQDKDGRTDQYHYSWLAYEWDNMIAACEDCRKRKQNNFFVEGTRCELNAPIAELRSTESALFLDPCFDDPAEHLRFGSDGTVQPLSPKGRETISLLSLNRRDLVDARYRALNDAVGRLAEAPQGLFASPTDLLKSKASFVLAETEHPGATALALIEAASEQGRSFDDLGQMLEELGRMDLKSRRRFVEALLMGPAAEASVVEESFSLPPSRRLPGLAEMPAAKAAITTVSVRNFKGLQSIDFRLPDTVPSVDAVPCMILLGENATGKSSVLEAIALALLGTVETKALGRLIPDEDVNPGALIHRPDLVHWDKVAHEPLDVKVGFFGGQAIATLTAGGSSATFYGTEGPSKIVLAYGPRRYFSNKKTRRFRAPAYRVRSLFDAMATIANPSDWLLTCDEAEFEPAVRALREILMLEANDYFAREDGHIVIESSGGRTRLEEMSVGYKSVIAMATDIIRELLRFYDNLEYASATVLIDEIETHLHPRWKMRIMSCLRRAFPRVQFIVTTHDPLCLRGMHDGEVFVLHRPAGDRRIEKLENLPAIKGMRAEQLLTSEFFGLGSTDPETDAKLALYHELNSRRDNLDDREAQELKRLKGDLDRNLVVGDTPIEQALVDVLRQAELETRTEPSKTALPKRASILSNALQRLTNGFVSPTSLTSAEARSTNDMQGNNDGTAEA

SEQ ID NO: 82305 - protein, 302 aa, Rhizobium etli bv. mimosae str. Mim1
MIRVDRIGKVPARLDLSDKASLASLERQKIIDGLVGGRPADDTTFSAYADDSVRGALQDLFHNKCAYCESKIAGSQDTDIEHYRPKGRVTDAIKSGINHPGYWWLAMDWTNLVLACMHCNQRRRQLIYTPGMTEEQIVALIESKKTVTVGKLDAFPTADSKWVTDYKLDVATEQPLLIDPTRVDPELHLDWVVDENLSTVRARDSSQIGQTSIDIFALNRRRLTEDRMSKLLLLQWTGNRALEELNAAVNEADDAIAALREKTALDYLEILRLHCAPDQPYAGMARAYLAHLATKIAAIRAV

SEQ ID NO: 82306 - protein, 243 aa, Clostridium sordellii ATCC 9714
MRREENLTESIRKYIQNAPSSLNGGYLPDIKQWMINRYFQIEKEWAYIEKSNWDWLIKNIDTLAPKDSKFRFIKIEKDLEPVFTINDKECYLEELSTGFQSILSMVLAIFEWIEATNEKDDKLVKNAAGTVIIDELDVHLHPEWQLILRDSLEVMFPKLQFIVTTHSPHLIASAKEGEIIVVPEKNTNLDLYPRKDKYSGWNTDQILSELMGVKSLDNKEYFRMVEKGMEYINEPILKDYLIL

SEQ ID NO: 82307 - protein, 255 aa, Clostridium sordellii ATCC 9714
MIKINKQAEPPKILLDNKEKWTNNLMEAVKKYGSYKKIPRDEKEKLLKNYKHRDIQSILFDSSYMKCVFCECKPAEGGNIEVEHFAPKSLYPHLTFEWSNLLPICRNCNGSKSNHDTLNSVIINPSEADPDRYFDFKTLKMVTSDTSPNKDISENTLNVISNLNSPSLFRVRADLLYTLATYEDDLEYHIKEIESSGTERQRSIRINKLKKSLELIEELCKPNEKYSGFVKNYVFKSDVITKAKKIVSEFFSTLD

SEQ ID NO: 82308 - protein, 479 aa, Proteus mirabilis BB2000
MKIDKVIIKNFRCFEQLEVTFHPQMTVLIAPNGAGKTTILDAVRIAMWPFVKGFDLGSQTGKAATIQIDDVRLRRFDQNMEPALPAEIEAFSNSEMNILPISWLQSRDKIAPRTTTKGDTFTTQLTNIAKKYQSIIYKSSKSTKIASESFSQSVENINLPLIVYLGTGRLWYQGRYSSEAQDQKLDNSVYSRFWGYQNCLTATSSYKQFQSWYSWVYRSHRELQITQLEGQLKPQDEEAQKNFSAAIKVVQTSINKLTQKLTGWHDLQYRASMGQQLVMEHPEQGYIPLSLLSDGLRNMVAMISDIAFRCIKLNPHLGEKAAIETSGIVLIDEVDMFLHPTWQQRVLSSLMEAFPKLQFIVTTHSPQVISTVHSDSIRVIGENYKGKLIASKPLAHTYGNPSNQVLESVMLVDPQPPIKEKEMLEQLTELVDQGKGNTELAQSLLTELTALLGDTHPQLQRLHRSLNRQQYLSHLEGRK

SEQ ID NO: 82309 - protein, 226 aa, Proteus mirabilis BB2000
MRFIVQSSLNIRGLHVANQNPPINATQAISRWQSFSYKNTVLQSLCRQQSLLCCYSEVRGDQLGLNYHIEHIENKSQNPSKTFDEANLAASAFSSEELCNVRKEEIFGGHAINKQQHVDITKFISCYQYGCESYFTYLSDGRIVPKDELNVTQTARANYTINLLNLNSHYLINLRRQRWDELDQLVLEHINNNWDLEQLCDLELNFLDSNHGLYPFFSLARQFFGK

SEQ ID NO: 82310 - protein, 398 aa, Peptoclostridium difficile CD22
MNRMRKLDNIKKGTIILDIIPNSANGRDAMKIEKIEIKGIGGIKELSLRFNKGLNIICGANGIGKTTILEVISHLFSIQSSDLKKNAKFDLGEAIADYSFEDIEAVHKSTYQINDFNASVKELIFDNRDKKKYSKFVLFFKTHRELNYSKLDGITGDETYSDDSTSYMADLGIDSSKIKNWFINRLLFSKQEGSLTKEQLCNLDLAIEMISILDKNVSYSRIVSDSLDLMINTPQGEIYIEYLSSGYKSCFYILLGIIKELEYRFTKPYIEVKDFDGVILIDELDLHLHPEWQVKIVNALKVLLPKAQIIATTHSPNMIQTLSPDEIIPLTMDENGNVRKKDLELGEYGLQGWTIEEILTDVMGMKTTSSELYLDTMKKFDRAMDKENVEKSRNTMIS

SEQ ID NO: 82311 - protein, 252 aa, Peptoclostridium difficile CD22
MIKINRTRKPIELTEEVQKQLTEEFKNNKEKSVWRKKYITNALLEMSHGKCCYCEMKLIEEGKSLNVEHFHHKDKYPDEVVKWENLLPSCGRCNSEKGTHDTKLEPIINPAINNPKDYLYLYNYRYKSKNRNKLGSDTIDILYLNDTDKLIKPRVNICMALFKRLESIKTFVEDYQNGTGTHTRRKNKIINEVKGVLRCAQPTEEYSAIVANVIVNDDDYKYIKEIMSEFNLWDNELEELESKAKEIMLDSE

SEQ ID NO: 82312 - protein, 422 aa, Peptoclostridium difficile CD40
MNRMRKLDNIKKGTIILDIIPNSANGRDAMKIEKIEIKGIGGIKELSLRFNKGLNIICGANGIGKTTILEVISHLFSIQSSDLKKNAKFDLGEAIADYSFEDIEAVHKSTYQINDFNASVKELIFDNRDKKKYSKFVLFFKTHRELNYSKLDGITGDETYSDDSTSYMADLGIDSSKIKNWFINRLLFSKQEGSLTKEQLCNLDLAIEMISILDKNVSYSRIVSDSLDLMINTPQGEIYIEYLSSGYKSCFYILLGIIKELEYRFTKPYIEVKDFDGVILIDELDLHLHPEWQVKIVNALKVLLPKAQIIATTHSPNMIQTLSPDEIIPLTMDENGNVRKKDLELGEYGLQGWTIEEILTDVMGMKTTSSELYLDTMKKFDRAMDKENVDEIKKYYDILMKMLHPNSTLRTILKIQVAGIID

SEQ ID NO: 82313 - protein, 252 aa, Peptoclostridium difficile CD40; identical to SEQ ID NO: 82311

SEQ ID NO: 82314 - protein, 419 aa, Peptoclostridium difficile CD47
MRKLDNIKKGTIILDIIPNSANGRDAMKIEKIEIKGIGGIKELSLRFNKGLNIICGANGIGKTTILEVISHLFSIQSSDLKKNAKFDLGEAIADYSFEDIEAVHKSTYQINDFNASVKELIFDNRDKKKYSKFVLFFKTHRELNYSKLDGITGDETYSDDSTSYMADLGIDSSKIKNWFINRLLFSKQEGSLTKEQLCNLDLAIEMISILDKNVSYSRIVSDSLDLMINTPQGEIYIEYLSSGYKSCFYILLGIIKELEYRFTKPYIEVKDFDGVILIDELDLHLHPEWQVKIVNALKVLLPKAQIIATTHSPNMIQTLSPDEIIPLTMDENGNVRKKDLELGEYGLQGWTIEEILTDVMGMKTTSSELYLDTMKKFDRAMDKENVDEIKKYYDILMKMLHPNSTLRTILKIQVAGIID

SEQ ID NO: 82315 - protein, 244 aa, Peptoclostridium difficile CD47
MIKINRTRKPIELTEEFKNNKEKSVWRKKYITNALLEMSHGKCCYCEMKLIEEGKSLNVEHFHHKDKYPDEVVKWENLLPSCGRCNSEKGTHDTKLEPIINPAINNPKDYLYLYNYRYKSKNRNKLGSDTIDILYLNDTDKLIKPRVNICMALFKRLESIKTFVEDYQNGTGTHTRRKNKIINEVKGVLRCAQPTEEYSAIVANVIVNDDDYKYIKEIMSEFNLWDNELEELESKAKEIMLDSE

SEQ ID NO: 82316 - protein, 419 aa, Peptoclostridium difficile DA00273; identical to SEQ ID NO: 82314

SEQ ID NO: 82317 - protein, 244 aa, Peptoclostridium difficile DA00273; identical to SEQ ID NO: 82315

SEQ ID NO: 82318 - protein, 419 aa, Peptoclostridium difficile CD129; identical to SEQ ID NO: 82314

SEQ ID NO: 82319 - protein, 252 aa, Peptoclostridium difficile CD129; identical to SEQ ID NO: 82311

SEQ ID NO: 82320 - protein, 419 aa, Peptoclostridium difficile CD181; identical to SEQ ID NO: 82314

SEQ ID NO: 82321 - protein, 252 aa, Peptoclostridium difficile CD181; identical to SEQ ID NO: 82311

SEQ ID NO: 82322 - protein, 419 aa, Peptoclostridium difficile 342; identical to SEQ ID NO: 82314

SEQ ID NO: 82323 - protein, 252 aa, Peptoclostridium difficile 342; identical to SEQ ID NO: 82311

SEQ ID NO: 82324 - protein, 419 aa, Peptoclostridium difficile 6041; identical to SEQ ID NO: 82314

SEQ ID NO: 82325 - protein, 252 aa, Peptoclostridium difficile 6041; identical to SEQ ID NO: 82311

SEQ ID NO: 82326 - protein, 419 aa, Peptoclostridium difficile DA00128; identical to SEQ ID NO: 82314

SEQ ID NO: 82327 - protein, 252 aa, Peptoclostridium difficile DA00128; identical to SEQ ID NO: 82311

SEQ ID NO: 82328 - protein, 419 aa, Peptoclostridium difficile DA00167; identical to SEQ ID NO: 82314

SEQ ID NO: 82329 - protein, 252 aa, Peptoclostridium difficile DA00167; identical to SEQ ID NO: 82311

SEQ ID NO: 82330 - protein, 419 aa, Peptoclostridium difficile DA00238; identical to SEQ ID NO: 82314

SEQ ID NO: 82331 - protein, 244 aa, Peptoclostridium difficile DA00238; identical to SEQ ID NO: 82315

SEQ ID NO: 82332 - protein, 422 aa, Peptoclostridium difficile P6; identical to SEQ ID NO: 82312

SEQ ID NO: 82333 - protein, 252 aa, Peptoclostridium difficile P6; identical to SEQ ID NO: 82311

SEQ ID NO: 82334 - protein, 419 aa, Peptoclostridium difficile DA00307; identical to SEQ ID NO: 82314

SEQ ID NO: 82335 - protein, 244 aa, Peptoclostridium difficile DA00307; identical to SEQ ID NO: 82315

SEQ ID NO: 82336 - protein, 419 aa, Peptoclostridium difficile CD92; identical to SEQ ID NO: 82314

SEQ ID NO: 82337 - protein, 252 aa, Peptoclostridium difficile CD92; identical to SEQ ID NO: 82311

SEQ ID NO: 82338 - protein, 419 aa, Peptoclostridium difficile DA00305
MRKLDNIKKGTIILDIIPNSANGRDAMKIEKIEIKGIGGIKELSLRFNKGLNIICGANGIGKTTILEVISHLFSIQSSDLKKNAKFDLGEAIADYSFEDIEAVHKSTYQINDFNASVKELIFDNRDKKKYSKFVLFFKTHRELNYSKLDGITGDETYSDDSTSYMADLGIDSSKIKNWFINRLLFSKQEGSLTKEQLCNLDLAIEMISILDKNVSYSRIVSDSLDLMINTPQGEIYIEYLSSGYKSCFYILLGIIKELEYRFTKPYIEVKDFDGVILIDELDLHLHPEWQVKIVNALKVLLPKARIIATTHSPNMIQTLSPDEIIPLTMDENGNVRKKDLELGEYGLQGWTIEEILTDVMGMKTTSSELYLDTMKKFDRAMDKENVDEIKKYYDILMKMLHPNSTLRTILKIQVAGIID

SEQ ID NO: 82339 - protein, 252 aa, Peptoclostridium difficile DA00305; identical to SEQ ID NO: 82311

SEQ ID NO: 82340 - protein, 451 aa, Pseudomonas syringae CC1557
MEIKSFRLINVGRFSDLEVALAPTERHASRVTVLVGNNGAGKTTLLKSVATSLNWLVARVRTPKGVGSRIDEDTIQNGAVTSSIRIDAYDDQIFDSLICGPDFHWQIAGTRKGRNANLSSALNELNLLAEGYRSQLTAKSDSSLPLLAFYPVERSVLEIPLKVHAKHTFDQLDGYDNALGRGVDFRRFFEWFREREDSENETGIPTELLTKLSQKLLDTELWKVLVREHASSRDRQLNAVRNAVEAFMPGFTKLRVKRKPRLHMAIDKDGQTLNVSQLSQGEKSMMALVGDIARRLAMMNPALENPLHGNGIVLIDEVDLHLHPKWQRSLIAQLTTTFPNCQFLLTTHSPLVISDSKDVLVYVMDDGELSEPDSLYGLDANQVLLSVMDTDVRNVDVQKRLDRLQELLMLGDLEEVHSLYQKLVNDLPSGHIELAKASLLIRKLELRRAKD

SEQ ID NO: 82341 - protein, 216 aa, Pseudomonas syringae CC1557
MRKIEKGSLAVLKQWARTNKGKKYEDLVGREDIKDAIRHTCVLEQHGLCAYCCRSITPLKDSAHNEHVEAQRLAPNRTLDFQNIVASCNRPGRCGDAHGDQTLRLTPLMAECETELQFELSGLVGGKTDRAQDCIKVLNLGGDQVSNRWLIGERKAMIDSLLFSHGMGSSGLALEDDDVLSLLHDELLVEDDQQQLQAFSPVLVNVIRRLRALHAF

SEQ ID NO: 82342 - protein, 470 aa, Vibrio parahaemolyticus VP-NY4; identical to SEQ ID NO: 81302

SEQ ID NO: 82343 - protein, 214 aa, Vibrio parahaemolyticus VP-NY4; identical to SEQ ID NO: 81297

SEQ ID NO: 82344 - protein, 409 aa, Vibrio parahaemolyticus VP-NY4; identical to SEQ ID NO: 81298

SEQ ID NO: 82345 - protein, 221 aa, Vibrio parahaemolyticus VP-NY4; identical to SEQ ID NO: 81113

SEQ ID NO: 82346 - protein, 409 aa, Vibrio parahaemolyticus VP232; identical to SEQ ID NO: 81298

SEQ ID NO: 82347 - protein, 221 aa, Vibrio parahaemolyticus VP232; identical to SEQ ID NO: 81113

SEQ ID NO: 82348 - protein, 391 aa, Vibrio parahaemolyticus VP232
MEREYGHRLPRKLIAASTSQFEKFKANWSVRNDLVPSGFYAYIGSKPYMPSLSPSTRIASKAIQQLLGAEYFEERKHKALVGFLSKFDFGQKLLLKFELTFPNEDLENIQNQSLTEPETQLILKNAYIEHDEMELVELLGYCERIIEAPAFALTVGNQNLNLIHLKGSEQKPFSKLIISRMLRAGLITLSSIQTMKDKSLINDQSTVNIESSAISSLSKRSSGEQCLFLLFMGIISSIEDNALICIDEPEISLHPQWQERFVDILSESFSSYRGCHFLIATHSPLIVSDISAKNCCVYDMATNTLVDAAPYGERSSDYQLATLFHNPGNNNEYLLSQVIEVLDDICQSKEIASETKTKAHWLLSYEPRLPDGDKVKRLLSILEQTLEAFSK

SEQ ID NO: 82349 - protein, 155 aa, Vibrio parahaemolyticus VP232
MHTTHGMVWDTEHIIDKDSSPQWMFKPLNLCVSCKDCNGAKGTRAVTKSKSYKKFPSKSANYRIIHPHFDNYDEHIEVAVPGATYRYITEKGRYTIEVCGLLRYHQTVGRKKVDLGLQAVLLAAANNQSPEMLQYAMEEIARRQAAVSQSTGSST

SEQ ID NO: 82350 - protein, 409 aa, Vibrio parahaemolyticus VP250; identical to SEQ ID NO: 81298

SEQ ID NO: 82351 - protein, 221 aa, Vibrio parahaemolyticus VP250; identical to SEQ ID NO: 81113

SEQ ID NO: 82352 - protein, 432 aa, Vibrio parahaemolyticus VP250
MIDTCNKYHSYYTSALLDKDTHVASAVHYLREDFSPHNWKTVEREYGHRLPRKLIAASTSQFEKFKANWSVRNDLVPSGFYAYIGSKPYMPSLSPSTRIASKAIQQLLGAEYFEERKHKALVGFLSKFDFGQKLLLKFELTFPNEDLENIQNQSLTEPETQLILKNAYIEHDEMELVELLGYCERIIEAPAFALTVGNQNLNLIHLKGSEQKPFSKLIISRMLRAGLITLSSIQTMKDKSLINDQSTVNIESSAISSLSKRSSGEQCLFLLFMGIISSIEDNALICIDEPEISLHPQWQERFVDILSESFSSYRGCHFLIATHSPLIVSDISAKNCCVYDMATNTLVDAAPYGERSSDYQLATLFHNPGNNNEYLLSQVIEVLDDICQSKEIASETKTKAHWLLSYEPRLPDGDKVKRLLSILEQTLEAFSK

SEQ ID NO: 82353 - protein, 214 aa, Vibrio parahaemolyticus VP250; identical to SEQ ID NO: 81297

SEQ ID NO: 82354 - protein, 391 aa, Vibrio parahaemolyticus NIHCB0603; identical to SEQ ID NO: 82348

SEQ ID NO: 82355 - protein, 214 aa, Vibrio parahaemolyticus NIHCB0603; identical to SEQ ID NO: 81297

SEQ ID NO: 82356 - protein, 409 aa, Vibrio parahaemolyticus NIHCB0603; identical to SEQ ID NO: 81298

SEQ ID NO: 82357 - protein, 221 aa, Vibrio parahaemolyticus NIHCB0603; identical to SEQ ID NO: 81113

SEQ ID NO: 82358 - protein, 409 aa, Vibrio parahaemolyticus 949; identical to SEQ ID NO: 81298

SEQ ID NO: 82359 - protein, 221 aa, Vibrio parahaemolyticus 949; identical to SEQ ID NO: 81113

SEQ ID NO: 82360 - protein, 470 aa, Vibrio parahaemolyticus 949; identical to SEQ ID NO: 81302

SEQ ID NO: 82361 - protein, 214 aa, Vibrio parahaemolyticus 949; identical to SEQ ID NO: 81297

SEQ ID NO: 82362 - protein, 416 aa, Vibrio parahaemolyticus VPCR-2010
MENDNSIQLIDTIIPNSDKHVTISLEGKNLIITGGNGCGKTRLLNQIYENISAQVEQMSHKTADQIRNDISNRERWMNDSSPTNANYHQYKEQIRELELKLADIDKVKVTLGDLVKYCTEFNEKKALLRLFPAVREQSLAHTGSYDSLARLKKEDERNSLSQDSSSQFERYLVAFYNYGSHLLARVDDKAQGAKVDAWFDNVTSQLQYLFEDETLKLDYNAEEQAFYIKQDGKDPYRFDKLSSGYQSILSIYADLLMKVELKEVSAQELSGVVFIDEIDAHLHVSLQRKIFSFFDQAFPKVQFIVTTHSPFVVQSVNNSVIYDLSANEQLEDLSMYSYESILKGLLGVESKSSILDGLIEELATQIQVKKPDWNTIIDLIRRIKPNERNLDTHSSNVLKQAEIQLMDERTKNGTEE

SEQ ID NO: 82363 - protein, 229 aa, Vibrio parahaemolyticus VPCR-2010
MFKVIRPLEEPPELKTKGYNCDEVVHALWKICHRKCYLCETMNPDAPEIEHKEPHENKDEDLKVDWNNLFYSCRRCNSIKGTKHKNIIDVAQVDPITKIIWNMAPSNYSDVTFEKVDKNCNDKAVDNTIKLLERCFNETGTAFRGITREALIEKIEIKLQHFLKQAYKIRHEDSDEDDIEKARKQLKVMLQNEYPYSAFWRWRFLRDPVLMRDHSDLLPEYVTLSPCKL

SEQ ID NO: 82364 - protein, 465 aa, Escherichia coli HVH 2 (4-6943160); identical to SEQ ID NO: 81096

SEQ ID NO: 82365 - protein, 243 aa, Escherichia coli HVH 2 (4-6943160); identical to SEQ ID NO: 81097

SEQ ID NO: 82366 - protein, 465 aa, Escherichia coli HVH 7 (4-7315031); identical to SEQ ID NO: 81190

SEQ ID NO: 82367 - protein, 243 aa, Escherichia coli HVH 7 (4-7315031); identical to SEQ ID NO: 81097

SEQ ID NO: 82368 - protein, 465 aa, Escherichia coli HVH 16 (4-7649002); identical to SEQ ID NO: 81190

SEQ ID NO: 82369 - protein, 243 aa, Escherichia coli HVH 16 (4-7649002); identical to SEQ ID NO: 81097

SEQ ID NO: 82370 - protein, 465 aa, Escherichia coli HVH 20 (4-5865042); identical to SEQ ID NO: 81190

SEQ ID NO: 82371 - protein, 243 aa, Escherichia coli HVH 20 (4-5865042); identical to SEQ ID NO: 81097

SEQ ID NO: 82372 - protein, 465 aa, Escherichia coli HVH 27 (4-7449267); identical to SEQ ID NO: 81190

SEQ ID NO: 82373 - protein, 243 aa, Escherichia coli HVH 27 (4-7449267); identical to SEQ ID NO: 81097

SEQ ID NO: 82374 - protein, 623 aa, Escherichia coli HVH 27 (4-7449267)
MFFSQNAVLNAIVDLKKVHPFFGITFLVCKKNNLPIGTSTQFALDAKNKCFLEEVHKIDPDSEYFYQPFTYQTSHEWLNNNYASSGLQAINTQTFSAAFIHPKRTQQWGWADNYLHILKDHPSVKKNKISLISLCIWLYKFNEFPQNTSFESIISTFTQEYNISDKELEELFLLEECNINELFDDECITWDKIKGKLSLPPDSKPENGGTLSLLSIENIGPAKKLVIEPKTRLNIITGDNGLGKSFILESAWWALTNTWTDRVAYPDPRLRGKKINLTYSIKGNGEFKSGNCVNFDWDNFNWPIQTDRPTIPGLIVYAKVDGSFAVWDPARKYSTQSTFNEKEKFVFKSKEVWDGQDGIGVLEGLIRDWMTWKNDSKNQHFKHFEKVLEKLSPPDLGVLKPGEPVRIPDDPRVIPTLVHPYGEIPITNASAGVRRIVALAYMIVWAWNEHVVISEMMNIPPQNNMVVLVDELEAHLHPKWQRAFLPSLIALDKVFSSELKIQFIIATHSPLVMASSEEVFDIETDSLYHLQLDNKGHITLDELDFVKYGDVSSWLMSPIFELRQARSQEGEAAIEDAKKIQALENPDIEMIEDITVRLRKYLSATDKFWPRWIIFAERNGVKL

SEQ ID NO: 82375 - protein, 205 aa, Escherichia coli HVH 27 (4-7449267)
MIPLQLMPEPQNFDLNVRQKGALFLNKVPNPNYKDFVGKDYWRKAAKELYSSYRSICAYSCIYLPTSPGVVDHFLPKTKYPQLAYEWSNYRLCLDRLNQYKGNIENICDPFTIEIGWFVLDLPSCLIKPGEGLPQELHDKILYTIDVLKLNKDDGLVQNRCDIIMYLIEGDINMNFVEEKYPFIAQEIKRQGLVNNLSDIFKRMD

SEQ ID NO: 82376 - protein, 623 aa, Escherichia coli HVH 31 (4-2602156); identical to SEQ ID NO: 82374

SEQ ID NO: 82377 - protein, 205 aa, Escherichia coli HVH 31 (4-2602156); identical to SEQ ID NO: 82375

SEQ ID NO: 82378 - protein, 465 aa, Escherichia coli HVH 37 (4-2773848); identical to SEQ ID NO: 81190

SEQ ID NO: 82379 - protein, 243 aa, Escherichia coli HVH 37 (4-2773848); identical to SEQ ID NO: 81097

SEQ ID NO: 82380 - protein, 465 aa, Escherichia coli HVH 39 (4-2679949); identical to SEQ ID NO: 81096

SEQ ID NO: 82381 - protein, 243 aa, Escherichia coli HVH 39 (4-2679949); identical to SEQ ID NO: 81097

SEQ ID NO: 82382 - protein, 404 aa, Escherichia coli HVH 53 (4-0631051); identical to SEQ ID NO: 81436

SEQ ID NO: 82383 - protein, 207 aa, Escherichia coli HVH 53 (4-0631051); identical to SEQ ID NO: 81029

SEQ ID NO: 82384 - protein, 465 aa, Escherichia coli HVH 58 (4-2839709); identical to SEQ ID NO: 81190

SEQ ID NO: 82385 - protein, 243 aa, Escherichia coli HVH 58 (4-2839709); identical to SEQ ID NO: 81097

SEQ ID NO: 82386 - protein, 465 aa, Escherichia coli HVH 61 (4-2736020); identical to SEQ ID NO: 81190

SEQ ID NO: 82387 - protein, 243 aa, Escherichia coli HVH 61 (4-2736020); identical to SEQ ID NO: 81097

SEQ ID NO: 82388 - protein, 465 aa, Escherichia coli HVH 68 (4-0888028); identical to SEQ ID NO: 81190

SEQ ID NO: 82389 - protein, 243 aa, Escherichia coli HVH 68 (4-0888028); identical to SEQ ID NO: 81097

SEQ ID NO: 82390 - protein, 465 aa, Escherichia coli HVH 74 (4-1034782); identical to SEQ ID NO: 81190

SEQ ID NO: 82391 - protein, 243 aa, Escherichia coli HVH 74 (4-1034782); identical to SEQ ID NO: 81097

SEQ ID NO: 82392 - protein, 465 aa, Escherichia coli HVH 77 (4-2605759); identical to SEQ ID NO: 81190

SEQ ID NO: 82393 - protein, 243 aa, Escherichia coli HVH 77 (4-2605759); identical to SEQ ID NO: 81097

SEQ ID NO: 82394 - protein, 452 aa, Escherichia coli HVH 87 (4-5977630); identical to SEQ ID NO: 81192

SEQ ID NO: 82395 - protein, 219 aa, Escherichia coli HVH 87 (4-5977630); identical to SEQ ID NO: 81193

SEQ ID NO: 82396 - protein, 465 aa, Escherichia coli HVH 89 (4-5885604); identical to SEQ ID NO: 81190

SEQ ID NO: 82397 - protein, 243 aa, Escherichia coli HVH 89 (4-5885604); identical to SEQ ID NO: 81097

SEQ ID NO: 82398 - protein, 623 aa, Escherichia coli HVH 92 (4-5930790); identical to SEQ ID NO: 82374

SEQ ID NO: 82399 - protein, 205 aa, Escherichia coli HVH 92 (4-5930790); identical to SEQ ID NO: 82375

SEQ ID NO: 82400 - protein, 465 aa, Escherichia coli HVH 92 (4-5930790); identical to SEQ ID NO: 81190

SEQ ID NO: 82401 - protein, 243 aa, Escherichia coli HVH 92 (4-5930790); identical to SEQ ID NO: 81097

SEQ ID NO: 82402 - protein, 465 aa, Escherichia coli HVH 95 (4-6074464); identical to SEQ ID NO: 81190

SEQ ID NO: 82403 - protein, 243 aa, Escherichia coli HVH 95 (4-6074464); identical to SEQ ID NO: 81097

SEQ ID NO: 82404 - protein, 623 aa, Escherichia coli HVH 95 (4-6074464); identical to SEQ ID NO: 82374

SEQ ID NO: 82405 - protein, 205 aa, Escherichia coli HVH 95 (4-6074464); identical to SEQ ID NO: 82375

SEQ ID NO: 82406 - protein, 465 aa, Escherichia coli HVH 96 (4-5934869); identical to SEQ ID NO: 81190

SEQ ID NO: 82407 - protein, 243 aa, Escherichia coli HVH 96 (4-5934869); identical to SEQ ID NO: 81097

SEQ ID NO: 82408 - protein, 623 aa, Escherichia coli HVH 96 (4-5934869); identical to SEQ ID NO: 82374

SEQ ID NO: 82409 - protein, 205 aa, Escherichia coli HVH 96 (4-5934869); identical to SEQ ID NO: 82375

SEQ ID NO: 82410 - protein, 465 aa, Escherichia coli HVH 109 (4-6977162); identical to SEQ ID NO: 81190

SEQ ID NO: 82411 - protein, 243 aa, Escherichia coli HVH 109 (4-6977162); identical to SEQ ID NO: 81097

SEQ ID NO: 82412 - protein, 465 aa, Escherichia coli HVH 114 (4-7037740); identical to SEQ ID NO: 81190

SEQ ID NO: 82413 - protein, 243 aa, Escherichia coli HVH 114 (4-7037740); identical to SEQ ID NO: 81097

SEQ ID NO: 82414 - protein, 465 aa, Escherichia coli HVH 116 (4-6879942); identical to SEQ ID NO: 81190

SEQ ID NO: 82415 - protein, 243 aa, Escherichia coli HVH 116 (4-6879942); identical to SEQ ID NO: 81097

SEQ ID NO: 82416 - protein, 465 aa, Escherichia coli HVH 117 (4-6857191); identical to SEQ ID NO: 81190

SEQ ID NO: 82417 - protein, 243 aa, Escherichia coli HVH 117 (4-6857191); identical to SEQ ID NO: 81097

SEQ ID NO: 82418 - protein, 465 aa, Escherichia coli HVH 120 (4-6978681); identical to SEQ ID NO: 81190

SEQ ID NO: 82419 - protein, 243 aa, Escherichia coli HVH 120 (4-6978681); identical to SEQ ID NO: 81097

SEQ ID NO: 82420 - protein, 393 aa, Escherichia coli HVH 125 (4-2634716)
MKIQKIDIKDIGGIKRAIINFDSSMNIICGPNGIGKTTILDSVAHSFISTNSYVLKRHAQSTDGQINIVLNDCDNIRESHISLANFDPEDCSFVHGLSEAGRKVIYLNVSRMFKYVSLSNISKDEERQDHSIYTLLTDGISVADMKNWFAKRCLFVNTAEALSENNKVNLELAKKCFSLLNAEYKFSRVDAKKFDVFVSTPNGEIWYEYLSSGFKSCLSILFGIIKEIELRMPDEECLAQHFDGIVLIDELEMHLHPEWQSKIVSVLRDTFPATQFIVTTHSPHIIQNAEPNQIIALGTDSNGYTYVRELPSNEFGYTGWTLDEVLKDVMGMEDTRSQKLQSMLAAFDQAIDEENKIEAERIYKELDRALHPANVLRKMLSIDLSSIIEEDNK

SEQ ID NO: 82421 - protein, 248 aa, Escherichia coli HVH 125 (4-2634716); identical to SEQ ID NO: 81987

SEQ ID NO: 82422 - protein, 623 aa, Escherichia coli HVH 132 (4-6876862); identical to SEQ ID NO: 82374

SEQ ID NO: 82423 - protein, 205 aa, Escherichia coli HVH 132 (4-6876862); identical to SEQ ID NO: 82375

SEQ ID NO: 82424 - protein, 465 aa, Escherichia coli HVH 142 (4-5627451); identical to SEQ ID NO: 81190

SEQ ID NO: 82425 - protein, 243 aa, Escherichia coli HVH 142 (4-5627451); identical to SEQ ID NO: 81097

SEQ ID NO: 82426 - protein, 623 aa, Escherichia coli HVH 144 (4-4451937); identical to SEQ ID NO: 82374

SEQ ID NO: 82427 - protein, 205 aa, Escherichia coli HVH 144 (4-4451937); identical to SEQ ID NO: 82375

SEQ ID NO: 82428 - protein, 465 aa, Escherichia coli HVH 149 (4-4451880); identical to SEQ ID NO: 81190

SEQ ID NO: 82429 - protein, 243 aa, Escherichia coli HVH 149 (4-4451880); identical to SEQ ID NO: 81097

SEQ ID NO: 82430 - protein, 465 aa, Escherichia coli HVH 156 (4-3206505); identical to SEQ ID NO: 81096

SEQ ID NO: 82431 - protein, 243 aa, Escherichia coli HVH 156 (4-3206505); identical to SEQ ID NO: 81097

SEQ ID NO: 82432 - protein, 623 aa, Escherichia coli HVH 157 (4-3406229); identical to SEQ ID NO: 82374

SEQ ID NO: 82433 - protein, 205 aa, Escherichia coli HVH 157 (4-3406229); identical to SEQ ID NO: 82375

SEQ ID NO: 82434 - protein, 623 aa, Escherichia coli HVH 159 (4-5818141); identical to SEQ ID NO: 82374

SEQ ID NO: 82435 - protein, 205 aa, Escherichia coli HVH 159 (4-5818141); identical to SEQ ID NO: 82375

SEQ ID NO: 82436 - protein, 465 aa, Escherichia coli HVH 160 (4-5695937); identical to SEQ ID NO: 81190

SEQ ID NO: 82437 - protein, 243 aa, Escherichia coli HVH 160 (4-5695937); identical to SEQ ID NO: 81097

SEQ ID NO: 82438 - protein, 465 aa, Escherichia coli HVH 161 (4-3119890); identical to SEQ ID NO: 81190

SEQ ID NO: 82439 - protein, 243 aa, Escherichia coli HVH 161 (4-3119890); identical to SEQ ID NO: 81097

SEQ ID NO: 82440 - protein, 465 aa, Escherichia coli HVH 169 (4-1075578); identical to SEQ ID NO: 81190

SEQ ID NO: 82441 - protein, 243 aa, Escherichia coli HVH 169 (4-1075578); identical to SEQ ID NO: 81097

SEQ ID NO: 82442 - protein, 465 aa, Escherichia coli HVH 172 (4-3248542); identical to SEQ ID NO: 81190

SEQ ID NO: 82443 - protein, 243 aa, Escherichia coli HVH 172 (4-3248542); identical to SEQ ID NO: 81097

SEQ ID NO: 82444 - protein, 404 aa, Escherichia coli HVH 187 (4-4471660); identical to SEQ ID NO: 81436

SEQ ID NO: 82445 - protein, 207 aa, Escherichia coli HVH 187 (4-4471660); identical to SEQ ID NO: 81029

SEQ ID NO: 82446 - protein, 416 aa, Escherichia coli HVH 198 (4-3206106); identical to SEQ ID NO: 81196

SEQ ID NO: 82447 - protein, 221 aa, Escherichia coli HVH 198 (4-3206106); identical to SEQ ID NO: 81197

SEQ ID NO: 82448 - protein, 465 aa, Escherichia coli HVH 207 (4-3113221); identical to SEQ ID NO: 81096

SEQ ID NO: 82449 - protein, 243 aa, Escherichia coli HVH 207 (4-3113221); identical to SEQ ID NO: 81097

SEQ ID NO: 82450 - protein, 623 aa, Escherichia coli HVH 212 (3-9305343); identical to SEQ ID NO: 82374

SEQ ID NO: 82451 - protein, 205 aa, Escherichia coli HVH 212 (3-9305343); identical to SEQ ID NO: 82375

SEQ ID NO: 82452 - protein, 465 aa, Escherichia coli HVH 212 (3-9305343); identical to SEQ ID NO: 81190

SEQ ID NO: 82453 - protein, 243 aa, Escherichia coli HVH 212 (3-9305343); identical to SEQ ID NO: 81097

SEQ ID NO: 82454 - protein, 465 aa, Escherichia coli HVH 216 (4-3042952); identical to SEQ ID NO: 81190

SEQ ID NO: 82455 - protein, 243 aa, Escherichia coli HVH 216 (4-3042952); identical to SEQ ID NO: 81097

SEQ ID NO: 82456 - protein, 623 aa, Escherichia coli HVH 218 (4-4500903); identical to SEQ ID NO: 82374

SEQ ID NO: 82457 - protein, 205 aa, Escherichia coli HVH 218 (4-4500903); identical to SEQ ID NO: 82375

SEQ ID NO: 82458 - protein, 623 aa, Escherichia coli HVH 220 (4-5876842); identical to SEQ ID NO: 82374

SEQ ID NO: 82459 - protein, 205 aa, Escherichia coli HVH 220 (4-5876842); identical to SEQ ID NO: 82375

SEQ ID NO: 82460 - protein, 465 aa, Escherichia coli KOEGE 44 (106a); identical to SEQ ID NO: 81096

SEQ ID NO: 82461 - protein, 243 aa, Escherichia coli KOEGE 44 (106a); identical to SEQ ID NO: 81097

SEQ ID NO: 82462 - protein, 393 aa, Escherichia coli KOEGE 56 (169a); identical to SEQ ID NO: 82420

SEQ ID NO: 82463 - protein, 248 aa, Escherichia coli KOEGE 56 (169a); identical to SEQ ID NO: 81987

SEQ ID NO: 82464 - protein, 416 aa, Escherichia coli UMEA 3117-1; identical to SEQ ID NO: 81196

SEQ ID NO: 82465 - protein, 221 aa, Escherichia coli UMEA 3117-1; identical to SEQ ID NO: 81197

SEQ ID NO: 82466 - protein, 623 aa, Escherichia coli UMEA 3139-1
MFFSQNAVLNAIVDLKKVHPFFGITFLVCKKNNLPIGTSTQFALDAKNKCFLEEVHKIDPDSEYFYQPFTYQTSHEWLNNNYASSGLQAINTQTFSAAFIHPKCTQQWGWADNYLHILKDHPSVKKNKISLISLCIWLYKFNEFPQNTSFESIISTFTQEYNISDKELEELFLLEECNINELFDDECITWDKIKGKLSLPPDSKPENGGTLSLLSIENIGPAKKLVIEPKTRLNIITGDNGLGKSFILESAWWALTNTWTDRVAYPDPRLRGKKINLTYSIKGNGEFKSGNCVNFDWDNFNWPIQTDRPTIPGLIVYAKVDGSFAVWDPARKYSTQSTFNEKEKFVFKSKEVWDGQDGIGVLEGLIRDWMTWKNDSKNQHFKHFEKVLEKLSPPDLGVLKPGEPVRIPDDPRVIPTLVHPYGEIPITNASAGVRRIVALAYMIVWAWNEHVVISEMMNIPPQNNMVVLVDELEAHLHPKWQRAFLPSLIALDKVFSSELKIQFIIATHSPLVMASSEEVFDIETDSLYHLQLDNKGHITLDELDFVKYGDVSSWLMSPIFELRQARSQEGEAAIEDAKKIQALENPDIEMIEDITVRLRKYLSATDKFWPRWIIFAERNGVKL

SEQ ID NO: 82467 - protein, 205 aa, Escherichia coli UMEA 3139-1; identical to SEQ ID NO: 82375

SEQ ID NO: 82468 - protein, 465 aa, Escherichia coli UMEA 3159-1; identical to SEQ ID NO: 81190

SEQ ID NO: 82469 - protein, 243 aa, Escherichia coli UMEA 3159-1; identical to SEQ ID NO: 81097

SEQ ID NO: 82470 - protein, 465 aa, Escherichia coli UMEA 3161-1; identical to SEQ ID NO: 81096

SEQ ID NO: 82471 - protein, 243 aa, Escherichia coli UMEA 3161-1; identical to SEQ ID NO: 81097

SEQ ID NO: 82472 - protein, 442 aa, Escherichia coli UMEA 3163-1; identical to SEQ ID NO: 81942

SEQ ID NO: 82473 - protein, 203 aa, Escherichia coli UMEA 3163-1; identical to SEQ ID NO: 81943

SEQ ID NO: 82474 - protein, 465 aa, Escherichia coli UMEA 3172-1; identical to SEQ ID NO: 81190

SEQ ID NO: 82475 - protein, 243 aa, Escherichia coli UMEA 3172-1; identical to SEQ ID NO: 81097

SEQ ID NO: 82476 - protein, 465 aa, Escherichia coli UMEA 3173-1; identical to SEQ ID NO: 81096

SEQ ID NO: 82477 - protein, 243 aa, Escherichia coli UMEA 3173-1; identical to SEQ ID NO: 81097

SEQ ID NO: 82478 - protein, 623 aa, Escherichia coli UMEA 3175-1; identical to SEQ ID NO: 82374

SEQ ID NO: 82479 - protein, 205 aa, Escherichia coli UMEA 3175-1; identical to SEQ ID NO: 82375

SEQ ID NO: 82480 - protein, 452 aa, Escherichia coli UMEA 3190-1
MMNIRTLKLTNLGRFEELDVHLAPVEEFKSNVTVFIGNNGAGKTSILKSLATSLSWFVARVRTEKGNGSLIPEDAILNGRSSATIELQVLNTHPATEAATPYRWLLARTASGKKSTTASSLQEASQLAAFYRDQYTQNSGASFPLIAFYPVERVVLDVPLKIKERHNFLQLDGYDNALNQGIDFRRFFEWFRNREDAENESGLPQDVLDKLSTRIDLDNTVLNALTAIMASSRDRQLTAVRTAISRFMPGFSNLRVRRKPRLHMSIDKNGQTLNVLQLSQGEKSLMALVGDIARRLAMMNPMLENPLNGEGIVLIDEVDMHLHPTWQRTIIQRLTTTFPHCQFVLTTHSPLVISDCKDVLVYSLDDGELTQLPSLYGQDANTVLLNVMDTDIRNATVAEKLNDLLDLIQKNDFINANALLNTLSLELPENHLELVKARMLLRKQEIKHARNN

SEQ ID NO: 82481 - protein, 219 aa, Escherichia coli UMEA 3190-1; identical to SEQ ID NO: 81193

SEQ ID NO: 82482 - protein, 465 aa, Escherichia coli UMEA 3208-1; identical to SEQ ID NO: 81096

SEQ ID NO: 82483 - protein, 243 aa, Escherichia coli UMEA 3208-1; identical to SEQ ID NO: 81097

SEQ ID NO: 82484 - protein, 465 aa, Escherichia coli UMEA 3216-1; identical to SEQ ID NO: 81190

SEQ ID NO: 82485 - protein, 243 aa, Escherichia coli UMEA 3216-1; identical to SEQ ID NO: 81097

SEQ ID NO: 82486 - protein, 465 aa, Escherichia coli UMEA 3220-1; identical to SEQ ID NO: 81190

SEQ ID NO: 82487 - protein, 243 aa, Escherichia coli UMEA 3220-1; identical to SEQ ID NO: 81097

SEQ ID NO: 82488 - protein, 393 aa, Escherichia coli UMEA 3221-1; identical to SEQ ID NO: 82420

SEQ ID NO: 82489 - protein, 248 aa, Escherichia coli UMEA 3221-1; identical to SEQ ID NO: 81987

SEQ ID NO: 82490 - protein, 393 aa, Escherichia coli UMEA 3230-1; identical to SEQ ID NO: 82420

SEQ ID NO: 82491 - protein, 248 aa, Escherichia coli UMEA 3230-1; identical to SEQ ID NO: 81987

SEQ ID NO: 82492 - protein, 465 aa, Escherichia coli UMEA 3233-1; identical to SEQ ID NO: 81096

SEQ ID NO: 82493 - protein, 243 aa, Escherichia coli UMEA 3233-1; identical to SEQ ID NO: 81097

SEQ ID NO: 82494 - protein, 465 aa, Escherichia coli UMEA 3257-1; identical to SEQ ID NO: 81190

SEQ ID NO: 82495 - protein, 243 aa, Escherichia coli UMEA 3257-1; identical to SEQ ID NO: 81097

SEQ ID NO: 82496 - protein, 465 aa, Escherichia coli UMEA 3264-1; identical to SEQ ID NO: 81096

SEQ ID NO: 82497 - protein, 243 aa, Escherichia coli UMEA 3264-1; identical to SEQ ID NO: 81097

SEQ ID NO: 82498 - protein, 465 aa, Escherichia coli UMEA 3268-1; identical to SEQ ID NO: 81096

SEQ ID NO: 82499 - protein, 243 aa, Escherichia coli UMEA 3268-1; identical to SEQ ID NO: 81097

SEQ ID NO: 82500 - protein, 452 aa, Escherichia coli UMEA 3304-1; identical to SEQ ID NO: 82480

SEQ ID NO: 82501 - protein, 219 aa, Escherichia coli UMEA 3304-1; identical to SEQ ID NO: 81193

SEQ ID NO: 82502 - protein, 465 aa, Escherichia coli UMEA 3337-1; identical to SEQ ID NO: 81096

SEQ ID NO: 82503 - protein, 243 aa, Escherichia coli UMEA 3337-1; identical to SEQ ID NO: 81097

SEQ ID NO: 82504 - protein, 465 aa, Escherichia coli UMEA 3490-1; identical to SEQ ID NO: 81096

SEQ ID NO: 82505 - protein, 243 aa, Escherichia coli UMEA 3490-1; identical to SEQ ID NO: 81097

SEQ ID NO: 82506 - protein, 393 aa, Escherichia coli UMEA 3656-1; identical to SEQ ID NO: 81986

SEQ ID NO: 82507 - protein, 248 aa, Escherichia coli UMEA 3656-1; identical to SEQ ID NO: 81987

SEQ ID NO: 82508 - protein, 409 aa, Escherichia coli UMEA 3671-1
MLTSINEIYAPIPYTNKTANLLLDGKNLIITGGNGCGKTSFIRSIYDFLKNKIDRPNDHNINNLYNTLESYKYHLNNGGRDDVNYNFYSEEIKNIELKIEQLKAIRIETKEKEGETRSLLRFHKALREASITSPIAVPRLSALINEKSHFSNEVDGDDFFENYLVSLKTAQSYAISFDNDHKKAQRIQKWFDKIETDMQELFEDKNLLLTFDSNEGKFYLNQDGKDKFTFQTLSSGHSSILRIYADLIMRVEMWGLTPDSIEGIIFIDEIDAHLHVSLQKQILRFFSHSFPKVQFIVTTHSPFVVTSVTNAIIYDLSTNAKISDVSSYSYGIILQELFGVSPISKVLSDKLEQLQDIIDNINNNNIETANNIIQSLAPLDESMDIHASAFIDYAKMQILKYKKANSQEK

SEQ ID NO: 82509 - protein, 217 aa, Escherichia coli UMEA 3671-1
MFKVNRTYPAPKSLSKKARYDGADVHEALQECFYGKCYICETKNPLDINIEHFKPKGDDVERAFDWDNLYLSCSRCNNIKLSKYDNILDCCKEKVWDRVKLLPGYSYKAKKITVTALFNDIETQTTAELLEKVYNSDHTMSKKLTSAALRTQVVKTTQKLIKNINEYYEEDTPTEQKKYLIEKMKMMIKRDAAFSSFCRWIIMEDAELGPILEPFMD

SEQ ID NO: 82510 - protein, 465 aa, Escherichia coli UMEA 3687-1; identical to SEQ ID NO: 81096

SEQ ID NO: 82511 - protein, 243 aa, Escherichia coli UMEA 3687-1; identical to SEQ ID NO: 81097

SEQ ID NO: 82512 - protein, 465 aa, Escherichia coli UMEA 3694-1; identical to SEQ ID NO: 81096

SEQ ID NO: 82513 - protein, 243 aa, Escherichia coli UMEA 3694-1; identical to SEQ ID NO: 81097

SEQ ID NO: 82514 - protein, 465 aa, Escherichia coli UMEA 3707-1; identical to SEQ ID NO: 81190

SEQ ID NO: 82515 - protein, 243 aa, Escherichia coli UMEA 3707-1; identical to SEQ ID NO: 81097

SEQ ID NO: 82516 - protein, 465 aa, Escherichia coli UMEA 3821-1; identical to SEQ ID NO: 81096

SEQ ID NO: 82517 - protein, 243 aa, Escherichia coli UMEA 3821-1; identical to SEQ ID NO: 81097

SEQ ID NO: 82518 - protein, 404 aa, Escherichia coli UMEA 3899-1; identical to SEQ ID NO: 81436

SEQ ID NO: 82519 - protein, 207 aa, Escherichia coli UMEA 3899-1; identical to SEQ ID NO: 81029

SEQ ID NO: 82520 - protein, 465 aa, Escherichia coli UMEA 4207-1; identical to SEQ ID NO: 81096

SEQ ID NO: 82521 - protein, 243 aa, Escherichia coli UMEA 4207-1; identical to SEQ ID NO: 81097

SEQ ID NO: 82522 - protein, 474 aa, Vibrio coralliilyticus OCN008
MIIKSVLLDRKRFKLVDSDFCRKKNVFTVIVGSNGTGKSRLLKRLVNGIKNVEHSANKVPNNYSRQIDFENENYIGSYYSTPSESKSIVSRDKESIDTKYIKNNPKVIAVSTTPFDKFPVDYKGNEMYRYHDDYVYTYIGLKVSKNSLNQSNFMNLLFRSILINEDILKNRKLFELLKLQPVISTCLKPRMRISIFDFIEFEGKYSFLKNKLGDFDAESNFISNLKKKMPTLYEKLKSKRLIKKTYNSVTSTISFIDTPIHFDNPDIPKEDILFLMDIGFLNVSDFYFSDEDGKKIKISELSSGQKCLILTLLNIAGSITDNSVICIDEPEISLHPKWQKEFMKVLIEFFEDYQKCHFIIATHSPLIISELSNDNCYILNMDDGYAKKASEHMKMSSDFQLAEVFGVAGNNNEYLNRIVVSLLSKLSQNATLSKSDIGKIKSLKLFSEQMDSNDPVKYLIELLVSAWDKVKHAQ

SEQ ID NO: 82523 - protein, 213 aa, Vibrio coralliilyticus OCN008
MLSEVIYSREHKEFLDKKIDSEDFGSSSWSDEDLKDIKHLIKSHYIKAQKHTCPYCQQKTNTNNGRVWDIEHILPRSASPRFMFEPTNLCVACVDCNSAKSDKKVTSSQAQKNYPKDSSMFDIIHPHFDTYDKHILVIKAGMYYIAKGKKGEKTIEICRLNRFYEFADYGEYIQVDNRIFMLSNALNESKDDEEKKSIRREIAALTINSLMDE

SEQ ID NO: 82524 - protein, 584 aa, Listonella anguillarum M3; identical to SEQ ID NO: 81398

SEQ ID NO: 82525 - protein, 291 aa, Listonella anguillarum M3; identical to SEQ ID NO: 81399

SEQ ID NO: 82526 - protein, 416 aa, Listonella anguillarum M3; identical to SEQ ID NO: 81400

SEQ ID NO: 82527 - protein, 229 aa, Listonella anguillarum M3; identical to SEQ ID NO: 81401

SEQ ID NO: 82528 - protein, 465 aa, Escherichia coli UMEA 3652-1; identical to SEQ ID NO: 81190

SEQ ID NO: 82529 - protein, 243 aa, Escherichia coli UMEA 3652-1; identical to SEQ ID NO: 81097

SEQ ID NO: 82530 - protein, 763 aa, Escherichia coli O104:H21 str. CFSAN002236; identical to SEQ ID NO: 81340

SEQ ID NO: 82531 - protein, 308 aa, Escherichia coli O104:H21 str. CFSAN002236; identical to SEQ ID NO: 81951

SEQ ID NO: 82532 - protein, 622 aa, Ochrobactrum sp. EGD-AQ16
MYLTAEAVLHAIQILRANVHPFIGITFVACKRYGLSVGSTDEVSMDKLTEEHLDEHHRVDHRSSYYFQPFRSATSWVKQRYPSTGLQTVNTQTFATVFEHPRGTRKWGFASNYLDRTTSILEEQKFTTNIPADALAVWLYKDTDLGSVENYDDLVELFFSEYKINENEKEGLFSARLMESVLSSEGSFSSEPLAMTAITRELTPPPDAKAEGGRTIKSLRLSNAGPAREMEIDFGQRLSIVTGDNGLGKSFLLDFAWWAATGSWADREALPQLDNPAIVSEVEYSLSGNSGRTINFKAKYDRKSFSWIRQKEAMTVEAIAVFSRADGSFAFADPVRSRFNRKSVTSNSLSAQELWNGRPGTIEGLIRDWIKWQTSIDRKTFDQFTSVLKRLSPEDLGTLTPGEPVRIPDEPRDIPTIRHRYGTVPVTHASSGVQRVLLLAYLIIWSWQEHELAAKQMGETPLRRMIVIVDELEAHLHPKWQRIVLPALMSIGDLLSSELALQMIAATHSPMILASMEASFDSSIDVLYHLYGVGPTVKLEEIPFVKYGDASGWLTSPLFGLRHARSREAEETIEKAKALQLGDDPNPQDVAAISERLKSQLAYDDKFWPRWLYFAEQHGVKI

SEQ ID NO: 82533 - protein, 206 aa, Ochrobactrum sp. EGD-AQ16
MIGVMPKGEYAGFDNDVRKPGAAFLATCPKPTSKQFKKYSYWSRALGELREAYSGICAYTAMYIPDRGSVDHFLPKAGENARPDLAYEWDNFRLAGEKVNTSKGELIDIVDPFQVQDDWFFLDLPACLLRPNPDLDKELKRKIANTINSLRFNQNDNYVQERCNILMAYATNDISLNFLQRRYPFLAKEATRQALTQERLRELFRI

SEQ ID NO: 82534 - protein, 552 aa, Klebsiella pneumoniae KP-1
MKVDKLYIRSRFKNLENVKVDFDENHLMTVVVGRNGSGKSNVLEALVSIFRNLDLGEAPAFSYELTYRLGEPHKPNRPSNRWLEITIDADPNRGTLAKQYEVRMRNLLNDSLPEDIFDEKTLGIVIPFSKVKRNKEGKAPYLPNYVFAYYSGPSDRLESYFKKHRTDFYRHLLNDKPDKKLNLKGDIRPLFYAKPYHSQFVLLAFFLSDENSPQRTFIKEHLGIEDLDSIHFVMRQPGWAKQKGELFWGARGVVRRFLDELIKYTLAPIKVTRQEDTSLTGSHVRNEFFHLFLPNVEVLHTFAKGLSDDELFKMLESTLLSEIISEVSIRVKVSSSKVPLTFRELSEGEQQLLTVLGLLKFTGGKDSLFLLDEPDTHLNPSWAIKYLKFLREFVPNHETSHLLMVTHHPLAIAELKKQQVQVMWRDDEYNVHSQEPYIDPRGAGFMATLTEVFGLNTTLDLETQKLLDDRNELAHIESRTEAQSNQLDLLNDELNRLGFSFENRDPLYSEFLLAWQDLKYSERPPLTPDKAAQRRVAMKKVIEVLQAKKASE

SEQ ID NO: 82535 - protein, 280 aa, Klebsiella pneumoniae KP-1
MIFIKRDAALIPEKVLNVAQRAQNALEQLPAEQRKDFIKKKSHIWRGFSKYLAKMSYGKCWYSEAKDAGANFDVDHFRPKAEAKRAENLVDVEGYAWLAFDWKNFRLSAQNCNRLNTDESGNTVGKGSWFPLLNGSPKASWDNRCINDERVTLLDPVVQADLTYIDYDDNGRFTSSRHCIGQAALRIQQSAVIYGLNFEKMREARFQVMREAKELLETIQQSVEDLDPLGDEAPMRTIERQIEQLKAKTRADAPFSRAVRAQLIKLGAEDYLIDRSLDAA

SEQ ID NO: 82536 - protein, 407 aa, Aggregatibacter sp. oral taxon 458 str. W10330
MKYIHNISGKIEHLDYEINIDLNGKNLILVGANGVGKTSILNSIYKSINIELEKNNSQIDSFKDTLDYYKRDIKNYTEGSNEYIDKFNSIKYYEEKLKEFNSPLTLSIPNISDFIRNFNTKKAIRSNFSAYRISRIQATSSSTSLEEEKKNSLELEYVGSTLEQHLLNIRVTKSLLMTEAKDHVKANKFSQWFDNFERQLKYLFEDNDTKLKFDVSSMKFYIIQRNKKFTFQNLSSGYQAIFDIYADLLMRTELFDITPDELTGVVLIDEIDAHLHISLQKIILPFFINSFPKVQFIVSTHSPFVISSSSDTVIYDLTKQELITNNVTFYSNDAIVKGLFHVNTTHSIELQNIIDELKEVIDSDINDSNKLREHIKKLEPFKESLTNSAKVILLLAENKVLDIEENR

SEQ ID NO: 82537 - protein, 222 aa, Aggregatibacter sp. oral taxon 458 str. W10330
MFFVNRDPQLPNSLSKTIKDYRTEEVITKLNEMFFGKCYLCEKDNISDIEVEHLIPHKNNENLKYDWNNLFYSCSRCNSIKGTKEKILDCTNIDVSKAIELRCPSSDSDPVIVNLGLFGESEEILATKELLEECYNNRSTAIRGISRQALIDEIIKHYACWLDLKLKLRDNLLSTREEKEILEKLEKMCQSNYPFSAFWKWHIYRDNVLKDKISIFDEQFPL

SEQ ID NO: 82538 - protein, 517 aa, Novosphingobium tardaugens NBRC 16725
MFFTVIPHGSRLPSGAKNKAFLLTDNWDDWFKFSTMYVLFYYDEEGEQHRIGEVKIGQFGLTSEQRRPPIPQEFDALDETFFSLGQDDTYYERASAMGEVIRRKFFDGLRDVAVDNDLFERALDEDVMGVSLLRSVSRSSVRGQFRRIANGGVRLTSYAFSYEPPRRRTAKLDPVKFEFKVKPDSNPPTNIHVLIGRNGVGKTHHLQLMTRALVERDAESSDVGKFRNDDNPFEDFEDDPEPIFENIVSVTFSAFDPFEPLPVRQNKSEGVRYQYIGLKKTSSASDGAPKTPGILGREFGASVKLVTGQLPKLERWRKALAVLEADPIFREANIASLADQSDEEEVKGEAARVFAKLSSGHKIVLLTITRLVETVEEKTLVFLDEPEAHLHPPLLSAFVRSLSDLLSNRNGVALIATHSPVVLQEVPKRCVWKLRRSGREVAIERPDIQTFGENVGILTREVFGLEVTDSGFHQLLAQAVEASPDYDEVLENFGSQLGAEARAIVQGMIASRDGGDD

SEQ ID NO: 82539 - protein, 279 aa, Novosphingobium tardaugens NBRC 16725
MWRVDKPTITAEDAFETCISRIRDAGLKQRMEDITASVVASAAAYDAAAEQGRLHTTAVHTGVNGSVTTKEMIRLYDGRMAAAKSPGRGIYDALIASAEHGRCPFCGHRVVSTLDHVLPKAHYPALAVAPHNLVPSCADCNKTKHDQPLANEAQQYIHPYYDEIEGELWLRAEVLETAPASVRFFVEPFEGWPNILGQRVENHFTRLGLSKLYSSQAAQELVSIRYQVTALHDRLGADGVRQFLAESHASRSNARPNSWQTAFYSALSESDWYCNGGFA

SEQ ID NO: 82540 - protein, 418 aa, Porphyromonas gingivalis F0570
MHIQRVKIENFRCIERFEEEFSRYSNIFCGVNGSGKTTILQALEILFSWFIARFNNIKGNGTALKDDDIKYGADYCLLEVTLDDNTTWSLYRQHSRVRKPNLQKSNLKGLTERVNYIVEKANKEEHYPTPVFTSFPVYRRAVATLPKRIHKKHALGKFDVYNSNADSKVNPHAFFVWFREREDIENELYRYGKEGYKDSQLEAVRQATSQMISGYKNLRIERPRGFVIEKNEEKFAFDQLSDGEKSYIILTADIARLLAMANPSPDENPLLASGIILIDEIDLHLHPKWQREVLPQLRKVFPNCQFFITTHSPFVLSSADASNTIFVTEQPYIRLVEDRIYGAEVSHILLDTLGLSSLRDRYVEQDIQEIWKLLNSGISKGEELKMLIGRLKEKLNPNDPEFVKISLQKRWLESNKEG

SEQ ID NO: 82541 - protein, 201 aa, Porphyromonas gingivalis F0570
MRKINKIPCPKFVNHISRNKLNKFNIWNKLDLNIKQKTRDYILKEEQKGLSAYTEKRIEKSKKLHIDHFHKRDLYPQQTFDWDNLLVDEKEKPYGADAKDKKILKCDYKWVINPVVDDPHQYFEYSANGEIIPKIGLGKYEKKRAEKTIEIFNLNHSSLVDYRKTQYKHIHDYLDAGLPKQDILSELAEAPFLSLTEFLLP

SEQ ID NO: 82542 - protein, 445 aa, Porphyromonas gingivalis F0185; identical to SEQ ID NO: 80880

SEQ ID NO: 82543 - protein, 199 aa, Porphyromonas gingivalis F0185
MRKIIKGREPDAWLKYRCTPGAVYQRKPALADSLLLEQGYVCAYCEKRIDVQDLRVEHIKPRSQYPAQQLSYSNMVACCSGQSQGSAHCDCSKKDEEITLNLFTDALFLSISYKHDGTISSANKSWNDDINITLNLNCLSLKENRKLALDGLLEIIKKEGYSQGVLKRLKARYEAKDKGHKFAEYRGIILYYIDKKLSP

SEQ ID NO: 82544 - protein, 420 aa, Porphyromonas gingivalis F0566
MHIQRVKIENFRCIERFEEEFSRYSNIFCGVNGSGKTTILQALEILFSWFIARFNNIKGNGTALKDDDIKYGADYCLLEVTLDDNTTWSLYRQHSRVRKPNPQKSNLKGLTERVNYIVEKANKEEHYPIPVFTSFPVYRRAVATLPKRIHKKHALGKFDVYNSNADSKVNPHAFFVWFREREDIENELYRYGKEGYKDSQLEAVRQATSQMISGYKNLRIERPRGFVIEKNEEKFAFDQLSDGEKSYIILTADIARLLAMANPSPDENPLLASGIILIDEIDLHLHPKWQREVLPQLRKVFPNCQFFITTHSPFVLSSADASNTIFVTEQPYIRLVEDRIYGAEVSHILLDTLGLSSLRDRYVEQDIQEIWKLLNSGISKGEELKIKMLIGRLKEKLNPNDPEFVKISLQKRWLESNKEG

SEQ ID NO: 82545 - protein, 201 aa, Porphyromonas gingivalis F0566
MRKINKIPCPKFVNHISRNKLNKFNIWNNLDPNIRQKTRDYILKEEQKGLSAYTEKRIEKSKKLHIDHFHKRNLYPQQTFDWDNLLVDEKEKPYGADAKDKKISKCDYKWVINPVVDDPHQYFEYSANGEIIPKIGLGKYEKKRAEKTIEIFNLNHSSLVDYRKTQYKHIHDYLDAGLPKQDILSELAEAPFLSLTEFLLP

SEQ ID NO: 82546 - protein, 418 aa, Porphyromonas gingivalis W4087; identical to SEQ ID NO: 82540

SEQ ID NO: 82547 - protein, 201 aa, Porphyromonas gingivalis W4087; identical to SEQ ID NO: 82541

SEQ ID NO: 82548 - protein, 480 aa, Eubacterium ramulus ATCC 29099
MYSGFLLVDLVRFSDSLMFRKAAYCMCEFNIQEIELFNYRQFEDKKFVLNSRMNVFAGKNGSGKTTVLEAANVVLGAYLAAFKRYVPSRFVFNIKSTDARRKTQISDDSRILTAGAIPQYPCKVSCKAAWNIDYESIGFQRVLLKQDGRTKFGGKNPMQQTVIEWEGKIANADHSDEEVILPLVLYLSSARLWKDGNKRTVKTGVLSRTDAYSHCLDAQHGLDIAFRYIDTLKAVAVEENDGKIFPAYEVILWAVNEAFRDELKSGEKIIFSTKYEDDIIALKTSEGTVLPFQMLSDGYRNVIKIILDIAARMCILNPYLKEKALQETPGIVLIDEIDLSLHPTWQKRIIGILKQLFPKIQFICATHSPFIIQSLEEGELITLDQPLESEYSGESIEDISEDIMGVVLPQYSEKKRKIYEASKLYFEALTQAKSQEDIDRLGKRLAELEAEYSENPAYMAWVHQQYLEQKWKVKKNETNK

SEQ ID NO: 82549 - protein, 231 aa, Eubacterium ramulus ATCC 29099
MRPINKGESPYKKINEYKDALPYLERRIGMYCSYCEFSIPHVPEVEHVVSKSKGGDLTDWNNLNLGCKYCNTRKKAQTMPKNKKNYLWPDEDNTAIAYSYINGIPKVNEELLIKLDSTGDYLKRARNTYKLVGLGNFPTGKDRDRRFGQRNIAYQKALNSLENWNHMKDLSKEYQNDMKKQIIMTALGDGFFSIWMEVFCNEPEIRLALIEAFPGTNLNYYDEKGCVKEII

SEQ ID NO: 82550 - protein, 121 aa, Eubacterium ramulus ATCC 29099
TKEIDVAYTDAQGMRMCIPLNQLSDGYKSTISLVADIAYRMAVLNPQCLGEVCKKTDGIILIDEVDLHLHPAWQKQLLHDLTEIFPNVQFVVSTNAPEVINSVAREQVVVLENYQALPAPA

SEQ ID NO: 82551 - protein, 221 aa, Eubacterium ramulus ATCC 29099
MIEIKKGTEPKELLEYQKKEFASYADMKGDVKEKVMKSLLSEQGHLCAYCMSRIDEGDGKHRATIEHCIQQAVTDEKERLNYKNMVAVCLGNRNAHSNEDKSCDAKRGSLKVDKQDMKKINVFDGRTLTDIKYASDGTIYSDDEDVNEDLNLRLNLNCEARRLKECRRQALSALHRNIAGKYPNKTAPKSYYQKLMDHYTEQREMKEPYSGILIYWLEKHI

SEQ ID NO: 82552 - protein, 423 aa, Eubacterium ramulus ATCC 29099
MENGGFNVKEYFISEIDIDKLYHLSDIKIQLDSTKRQHLLLTGKNGSGKTSLLLEIEKFLKAINDEKFSKLRGFYKDALNRAKVNIESAASENDKYEAEKRYRIYADEIAKYSDGVRITLNECDGIEKAYQDGKFIMAYFPSERKAQFDVPNGVENIELSKAYRIDNSAGAVLLKYMVHLKTQQSYAQNAGDESVAQMIQKWFDRFESALRILLDEQSVHLEYDYKRYNFKICQNGREPFGFNELSDGYSSIIYMVSDLILRMDKNWLLGDELSQYNYQGIVLIDELETHLHIELQKKILPFLTEFFPKIQFIVTTHSPYILNSISNARAYDLERHVALDNLSAFSSDDLAEGYFEADEYSDELKKQLARYEILCFSDEVTEEERAERAELRIKLKNMSSELSGTAKEKFEDIERRRKLNDQN

SEQ ID NO: 82553 - protein, 228 aa, Eubacterium ramulus ATCC 29099
MIRIKRKDTAQTQLAIKDLEEASQRGNSYNTENVNRALKAVFYGKCYICENKHATSYQIEHLIPHHGNARLKYDWNKLFWACAHCNNIKSDKYEPILDCTKRSVEQLIAFRKKGYFGAEEKLEFTPLVSDDEEVEQTVSLLEDVYYGTTPQKKIEAQIIRKNLRKNLSKFKEYVREYQEAEDAVEKDDIGELLKRELNNSSEFTAFKRWLIWDNEMFSEIEKYIPKKD

SEQ ID NO: 82554 - protein, 406 aa, Leptotrichia sp. oral taxon 225 str. F0581
MKIKNLHIKEFKGLRDISINFEKNDKPLDLVVLAGSNGSGKTRILESIKDYFESYIDIQAIKIINNLQIFFEKEEKECIDKIGSEKYFYSALKYFSLNDKKENLNDSSYLVIKKNLLILPKIIYVPTEINFQKMDIAITNLVQKYEFLNIVNTNLIKDIPSYIATKMISEMFKNKNEKVEDIQRKVFDEINEIFENLNIDVKVEDISQDGRNITLFTNSSGDEFDINELSSGEKQLFLRTLAIKMLNPENSIILIDEPELSLHPKWQQRIVDVYRKIGKNNQIIIATHSPHILGSVKKENIMLLDKDGEGKIVIKTGDELYDSYGQPTDRVLKDIMGLETTRNPKVFKLLEEAGELVDKNEYESEEFKTKYKELREILGNKDEDLLLMDMDIQIRKKRGLKNVESE

SEQ ID NO: 82555 - protein, 215 aa, Leptotrichia sp. oral taxon 225 str. F0581
MLKVNKKDEPEFFSKFKKKNGPKDWKDLDFEIKRKLKKYMLENEQKIDDKSYCPYCEMIIFFENDDFEEDKKEKECHIEHIKPKSEFRNLTFDYKNFLTSCSDKNTCGQSKGNKWDNLFINPVKENPEEYFSYSIRTGKIIPKKEAGLEYEKAIKTIEILNLNENKLCDYRKSYINQILNTIKNSRNNDEKIEIINYFDELPTLKKFLIENIKIL

SEQ ID NO: 82556 - protein, 443 aa, Bacillus infantis NRRL B-14911
MQRRNILITQKKNDYYDVTDENDIHKYFSKQRFIESVEIRNFKGLKYLNLDFGLSQSMGAPWLMLLGENGVGKSSVLQAISIGLMGEQKRKEVILKSANNFVTNQKREGSIKIKLTGMVDPIIIDFTRDSHLFGGENHVDPRVLILSYGSTRLLPTENKIDMFRPSWARVENLFDPFVPLVDVENYLTWLEQEDFFIVKNAIENLFMEKVELIRNGGTKGIKFRFSNSIVRLEDLSDGYRTIIALATDIMMVMKNRWRSYDAEGIVLIDELDAHLHPRWNIEIVRKLRMAFPKIQFIATTHNPLTLRGLLKNEVAVMLEDNDRETIVLQNLPEQKGMMIEDILTSKFFGLYDTLPELNSIFHEYYRLLANPSPNTKQKDRIAILKEKLKDYDKLGNTKRDQMFYEAIDRYIAKEKATNEKLTSDSFIQDIDNIINSLRGFYKK

SEQ ID NO: 82557 - protein, 289 aa, Bacillus infantis NRRL B-14911; identical to SEQ ID NO: 81107

SEQ ID NO: 82558 - protein, 486 aa, Dickeya solani D s0432-1
MKIKQFRLHNVGRFTSLDALIAPTADYPSNVTVLVGNNGAGKTSILQALATSLSWLVARVRSEKGNGSGISEDAITNAHTSAAIEIMAQDTPPFSGHAADNDAEYHWTLAKTRSGKKGQHTSQLNAVSTLADHYRTELTQNEQSSLPLIAFYPVERSVLDIPLKIRNKHHFQQIDGYDNALNQGVDFRRFFEWFREREDIENENDGVVLTNLFESDPEGTLKVFEDIENANYRVDKLKEFDFTGLSEELKKLTNTMKFMQDIRDKAKDPQLNAVRSAITAFMPGFSNLKVRRKPRLHMSINKEGRPLNVLQLSQGEKSLMALVGDIARRLAIMNPTLDNPLHGQGIVLIDEVDMHLHPSWQRSIIERLTTTFPNCQFILTTHSPLVISDYKDVLVYSLDNGELTVVPSQYGQDANSVLLEVMDTHIRNARIAEKFGDLLDMIQRQQLTPAKALLDELTAELPATNLELTKTRLLLRKQELRGEKNH

SEQ ID NO: 82559 - protein, 210 aa, Dickeya solani D s0432-1
MRKITKGTEPASLTAWKRANPTGRYDDLTETERQDIRDACAKEQFYLCAYCCKPISGDNSDTMNEHVQARKLAPHRSLDFTNIVASCTTPNQCDAAHGSQPFSLTPLITACETELQFMISGRVSGTTARAQDAIRVLNLGDNETHNKKLIEIRKQFLDSLLWTNGIDPDEGLEDDDLLTAVINDFSSPQNGRLAPYAPVLVNILRGWLSA

SEQ ID NO: 82560 - protein, 459 aa, Enterobacter sp. MGH 14
MEVKNLTLHNIGRFKHLEIPLAPLGYLDSNVTVFVGNNGSGKTSILKALATSLSWLVSRIQSETGKGSPIPELVIKNKTSSAAIDINIFNHVRGNPEDGDLEGLDDNYFPWRIAKARKGRKGEHKSDFWGATALADHYRKKLSNDEKSSLPLIAFYSVERVVIDIPLKIRGKHEFFQLNGYENSLTQGVDFRRFFEWFREREDTENESGLTDDVLEQLRTVLGDDNETWSKLDKLRASSRDRQLTAVRSAIYKFMPEFSNLRVRRKPRLHMSIDKNGEPFDVAQLSQGEKSLMALIGDIARRLSVMNPELKNPLEGDGIVVIDEVDMHLHPKWQRSLIKQLTTTFPKCQFVLSTHSPLVISDCKNVLAYLIGDEELIQLPSLYGQDANTVLLEIMDTDIRNAEINESLSMALDAIHDSNLSQAKEIIQQLEEELPSGNLELSKAKLLLRKKELKDAQNN

SEQ ID NO: 82561 - protein, 211 aa, Enterobacter sp. MGH 14
MRKITKGIHPEPASLTDFKRTNRTATYDDLNKIERTDIRARCLEEQHFLCAYCCKEISGENHDCMNEHVEARRIAPARSLDFTNIVSSCTTPGQCDASHGSQPLPLTPFMSECETELEFTLSGKVRGLTDRAKETIRVLNLGDELQSNRSLIEQRKQFIQSIMFSNGIEPEDGLDDDELLEMVINDISTPKNGKLEAFAPVVVNVLKQWVA

SEQ ID NO: 82562 - protein, 452 aa, Escherichia coli BIDMC 19C
MMNIRTLKLTNLGRFEELDVHLAPVEEFKSNVTVFIGNNGAGKTSILKSLATSLSWFVARVRTEKGNGSPIPEDAILNGRSSATIELQVLNTHPATEAATPYRWLLARTASGKKSTTASSLQEASQLAAFYRDQYTQNSGASFPLIAFYPVERVVLDVPLKIKERHNFLQLDGYDNALNQGIDFRRFFEWFRNREDAENESGLPQDVLDKLSTRIDLDNAVLNALTAIMASSRDRQLTAVRTAISRFMPGFSNLRVRRKPRLHMSIDKNGQTLNVLQLSQGEKSLMALVGDIARRLAMMNPMLENPLNGEGIVLIDEVDMHLHPTWQRTIIQRLTTTFPHCQFVLTTHSPLVISDCKDVLVYSLDDGELTQLPSLYGQDANTVLLNVMDTDIRNATVAEKLNDLLDLIQKNDFINANALLNTLSLELPENHLELVKARMLLRKQEIKHARNN

SEQ ID NO: 82563 - protein, 219 aa, Escherichia coli BIDMC 19C
MREITKGQPPASLQQWVRAKPRDKNANQWFQELYAQKKWDIVGDLSQQCAQEQFYLCAYCCDRVTGTNRDTVNEHVEARDLAPARSLEFTNIVASCKTKGQCDDSHKNQPLLLTPLMPECETEFIFKISGRIEGTTPRAIDAIKVLNLGDSERNNRALIEKRKQLSDSLLWANGIAPSEGLEDDDLLQAVIDELLTPVDGYLAPFAPVVANILKNWMTA

SEQ ID NO: 82564 - protein, 426 aa, Marinobacter sp. ES-1
MHINKLTLQRFRGAQDLPLDLDDKLNVFVGMNGTGKSSILDASAIMLSWLANRIKHAGASGRPIAESDIRNGESSANLAIQLCDEGTSFGWNLAKVRKGYSKKDLASVLISASETAKGIQAGITEHNGKVNIPLFAYYPVNRAVLDIPLRIREKHQFGLLSAYEESLTSGANFRTFFEWFREREDLENENRKYIDDLIKPDDFEFPDSQLTAVRRALEIFMPDFQNLTVRRQPLRMEVTKKGQRLTVNQLSDGEKCLMAMVGDLARRMAIANPEREDPLLGDGIVMIDEIDLHLHPKWQRLVVPSLRAVFPNCQFFISTHSPHVITHVKPENLFLMNMTDAGELEIVRPNESYGKTVDRVLEDLMGLETTRPDQVEDALRAIYGQINDGELDTARKGIAELERDIGEDPELVKAKVLIKRKELIGR

SEQ ID NO: 82565 - protein, 213 aa, Marinobacter sp. ES-1
MKYVEKRHEPEVFTQWKALANVNEDWQPTYGDLRGEPKASVKRSLMREQGYICCYCERRLTEGDSHIEHFQPQSDPTVDPLDYGNLLCSCQNQIRKGEPRHCGNLKGDWFDPELLISPLDANCEPRFGFEGDGWIKPADNNDRAACETITRLGLDLPKLNELRAGAIEPFLDDSLSHDELGQFVSGYLTMGADGRFGEFWTTIKYLFGDYAAA

SEQ ID NO: 82566 - protein, 426 aa, Marinobacter sp. EN3; identical to SEQ ID NO: 82564

SEQ ID NO: 82567 - protein, 213 aa, Marinobacter sp. EN3; identical to SEQ ID NO: 82565

SEQ ID NO: 82568 - protein, 426 aa, Marinobacter sp. C1S70; identical to SEQ ID NO: 82564

SEQ ID NO: 82569 - protein, 213 aa, Marinobacter sp. C1S70; identical to SEQ ID NO: 82565

SEQ ID NO: 82570 - protein, 426 aa, Marinobacter sp. EVN1
MHISKLTLQRFRGAQDLPLDLDDKLNVFVGMNGAGKSSILDASAIMLSWLANRIKHAGASGRPIAESDIRNGESSANLAIQLCDEGTYFGWNLAKVRKGYSKKDLASVLISASETAKGIQAGITEHNGKVNIPLFAYYPVNRAVLDIPLRIREKHQFGLLSAYEESLTSGANFRTFFEWFREREDLENENRKYKDDLIKPDDFQFPDPQLTAVRRALEIFMPDFQNLTVRRQPLRMEVTKKGQRLTVNQLSDGEKCLMAMVGDLARRMAIANPEREDPLLGDGIVMIDEIDLHLHPKWQRLVVPSLRAVFPNCQFFISTHSPHVITHVKPENLFLMNMTDAGELEIVRPNESYGKTVDRVLEDLMGLETTRPDQVEDALRAIYGQINDGELDTARKGIAELERDIGEDPELVKAKVLIKRKELIGR

SEQ ID NO: 82571 - protein, 213 aa, Marinobacter sp. EVN1; identical to SEQ ID NO: 82565

SEQ ID NO: 82572 - protein, 431 aa, Candidatus Symbiobacter mobilis CR
MYIDKITLKNIRGFEHLEFDLCRGDSQYAGWTVFTGDNGAGKSTLLKAIAVALTGRDVARSLQPSFHRWIREGAENQESKIELMILPEIKADEFSEKRKTAYKKFPATVVLQSTGKDTSIELSSDLGRKASLAQRGLWSANSRGWFSCGYGPFRRVFGASPEATRLMVSPTTERFVTMFQEAASLFEVDQWLRNLSHKKLEGKVAESEHLTLLLEILRDDLMPNQITVDRVDSDGLWLKDRNGLQLAWSDMSDGYRAALALLSDILRHLINAYGLDGLAQRGEDGKLRIVRSGVVMIDEIDAHLHPEWQREIGFWLKEHFPNIQFLVTTHSPIICQAADENGLFVLPEPGSMATPCALSTDEYKKVIASRPDTILLTAAFGMQNTRSPRAVAGRAEYAKLMAKQRAGGKLTKEEQGKVHQLQLFAATGEEI

SEQ ID NO: 82573 - protein, 244 aa, Candidatus Symbiobacter mobilis CR
MRRLQRADLPKPIWTYLEKRQSSANQKYSLGTLDIEKEWKSARQTQCLKAVLATLQQMMGTRERCMYCVDSHGSDIEHFRPKMPYPQHAFQWPNLLLCCTECGRLTGSQFPMHQGQPLLIDPCAEDPWQYLDFDPDTGNLTARFDPQQNEWSTKGSKTVEVLMLDQREAVAAGYQTSFQRLSAIVRAALANGVSDAPALFDELTQADDHGLLGWCFGTTGQTIAPFSDLFQRHLEAWNFCRQSL

SEQ ID NO: 82574 - protein, 453 aa, Candidatus Symbiobacter mobilis CR
MKIKELYLQNFRSFSVAHIKFDPFLTVIVGENGIGKTSILDAIAIAFGRLLTKLPKIKGVSFKDTDLRMLENEKRSPFVHYWIHVNGFSGEYIQWSNGKKRDSSDKTIKEIISSILDLERFNAGYKQIDKFADSLIDKHNGNEGYSMPVIAYYGTNRAILDEVQRRRNFRKEYSRFESLVSALNPNAGFKEVFEWFNAMEDMERRKQMEYKNFGYTLPELNAVRKAIESMLPGFSRPRTEIRPLRFVIDRTLDDGSKLTLRIGQLSDGYRVMLGLVMDLARRLAQANPPYEYDTGVGRDSTDPLDSPAIVLIDEVDLHLHPKWQQRVLGDLRRTFRNTQFIVTTHSPQVLTTIPSECIRILKDNQIYSAPPGTEGAEPERMLKQVLGVHEVRPPANPATQELKEYLALVDKDQWNSPHALELREKLNARYQGNEPALLEADLRIENRKWELGI

SEQ ID NO: 82575 - protein, 270 aa, Candidatus Symbiobacter mobilis CR
MKRVRRQPEPIQLTNYRHANPFCTWQQMRDDAMHDGPAAYEESRKKLIAGQGGICAFCEIDICDNDPLQCRVEHFHPKSDITQAHNWALDWNNLLAVCAGGSYRFASAPYVHEPLAENLSCDTHKNRMIQVGRLQEQCEGWILDPAAIPAFPSLFRLEMSTGRLLPDPDHCAVLPIWPGNRHADVPTLVQHTIDMLNLNCDRLCNARLTIIRDIERNKKKQRMAGFAAHQGLGNLAAHYLRQRWPGFFSTIRLCLGTAAETYLANLGYQG

SEQ ID NO: 82576 - protein, 583 aa, Pseudomonas aeruginosa str. Stone 130; identical to SEQ ID NO: 82124

SEQ ID NO: 82577 - protein, 292 aa, Pseudomonas aeruginosa str. Stone 130; identical to SEQ ID NO: 82125

SEQ ID NO: 82578 - protein, 332 aa, Cetobacterium somerae ATCC BAA-474
VFEKEEEEINELIYNNLFNSLKLYENNRLHNPEDSNFKVLNNSLKILPKIIYIPTEINFQSIQTQTNMLERHYNFLNIVDTGLISNIASYIATRVTYISNTEEDLTGKEVREKVAKEINDIFSILDLDIKLQGLSRDERSMPIFSNSTGEEFDINELSSGEKQLFVRTLAIKMLEPENSIILIDEPELSLHPKWQQKILEVYKKIGKNNQIIVATHSPHILGSVPKENLIILTRDENGEIKALKDEELYSSLGQPVDRILEDIMGLETTRNPNIFRSLKKLRELVDNNQYNSEEFKSLMKEMTATLGGTDQDLMLIKMDINIKKKQNEQRGE

SEQ ID NO: 82579 - protein, 195 aa, Cetobacterium somerae ATCC BAA-474
MFKVNKTPEPKFFQEFKKKHSLSNWNQYDSYRYIKQQLREYSLFEEQELCCPYCEIEIDVDTSETEHIKPKDIFPNEFQDFNNLIVACKSSKRCGNSKGSQWSSDFINPVLENPQDFLTYDIKTGEVRPKNSIGTDYEKAKVTIDILNLNDKRLAEARKNFILGNKYSIDYLEPEGEFRTLKEFMIDNKDSITSV

SEQ ID NO: 82580 - protein, 410 aa, Fusobacterium nucleatum CTI-6
MKIEKVHIKNVKGIKDLELSFKKDDKILDVIVLAGVNGSGKTTILEAIKDFFDNRYLNSNIQIVDLGIFLNVLEKKFIEEFKIFLNNNSKNKFSNFFHTLLVLPPDIELDTNYRAQTEKYIKELPKIIYVPAENNFEKVKTETTTLSKEYEFINTINSNVIGDIPSYIATRRNYLATIEENLTMKEVTNKVVNEINSIFNILELDAKLKGFSKDEKTLPIFENSAGEEFDINDLSSGEKQLFLRTLSIKMLEPNNSIILIDEPELSLHPKWQQRIIEVYKKIGENNQIIVATHSPHILGSVSNENIFILYRNENGKIETKTGDELDSSYGQPVERVLKDIMGLESVRTPKIDRDIQELRKLVDKDKYNTDDFKEKYNNLLEILGSTDEDLFLIDMDVKLKQKVNSNVESK

SEQ ID NO: 82581 - protein, 194 aa, Fusobacterium nucleatum CTI-6
MLKVNKRSEPEEFTKYKKKNKVVNWKDFTSESEIKKLLKEALLEEQENSCCPYCETEINLNDSQIEHIKPKDKFPELLIDYDNLIACCLESKRCGNSKANKWDELFINPVTENPEDYFKYDIKTGKIISIFKNREKYEKAEYTINLLNLNDNRLCEIRKRYIFEFLSYSNNNKNSLSNFPVKFPSLRRYLEGRL

SEQ ID NO: 82582 - protein, 583 aa, Pseudomonas aeruginosa BL23; identical to SEQ ID NO: 82124

SEQ ID NO: 82583 - protein, 292 aa, Pseudomonas aeruginosa BL23; identical to SEQ ID NO: 82125

SEQ ID NO: 82584 - protein, 447 aa, Pseudomonas aeruginosa BL20
MTVIAGVNGVGKSTILQAIAIAYSHALPEFTVSREKPLPILNSDIQQGKSSCIIEIWSDGLEAASLNMFLSKEDLGRNEKLSLERKQSLMKQELSLLEKGTPDYKNLKNDISWVDKRLEGDFERRLNWLFTDTYETEARLRRYLKSSPTQALVVYYSTHRLLSRLPPKLKGEFPFKQSAAFSKSLTQLEVSLNEFAKWHRAINSFRVVRKDGEYASRVLSLLQKAIAGLIPQIKGFWFHEINPPRYTVVKDATFDEQINDKKFEKEFFLEQLSDGERGLIALVFDLTRRLAIANPDSENPIAEGEALVLIDEIELHLHPKWQREILPRLRDTFKSCQFVVTTHSPQVIGEVEAKCVRLLTMREGKVASETPSMAYGADSNWILSVLMGADEMNEDVERNIEEIARLTAERNLESAKEKLSTLRERVGNSAAVQKISSTIERVERLGR

SEQ ID NO: 82585 - protein, 235 aa, Pseudomonas aeruginosa BL20
MRAVEKRQSPECLRGFIDGQLAIEPEPVNVTYKNFREKAKLLNELTLEQYGLCGYTGAPVDGDRISKLASASGDVVFKNHIEHLKCQDLCKQELIDSGGVVGRDLGDDLNYFNMIAALGMSGSEAEHFGAEIKKNMPLPVLPTQADCADHFGFQELDGGVTGLTVAGEESIKVLRLDHKTLDGWRMSAIEAWLNPEVIQTREDFEEVIQAVENPVDGRLPEFSFVIRAIARGYLE

SEQ ID NO: 82586 - protein, 447 aa, Pseudomonas aeruginosa BL09; identical to SEQ ID NO: 82584

SEQ ID NO: 82587 - protein, 235 aa, Pseudomonas aeruginosa BL09; identical to SEQ ID NO: 82585

SEQ ID NO: 82588 - protein, 393 aa, Salmonella enterica subsp. enterica serovar Muenster str. 660
MKIQKIDIKDVGGIKRAIINFDASMNIICGPNGIGKTTILDSVAHSFINTNSYVLKRHAQSTDGQINTVLNDCDNIRESHISLKQFNPKDYSYISGLRESGRKVIYLNISRMFKYVSLSNISKDEERQDHSIYTLLTDGISVADMKNWFAKRCLFFNTPEALSENNKVNLELAKKCFSLLNAEYKFSRVDAKKFDVFVSTPNGEIWYEYLSSGFKSCLSILFGIIKEIELRMPDEECLAQHFDGIVLIDELEMHLHPEWQSKIVSVLRDTFPATQFIVTTHSPHIIQNAEPNQIIALGTDSNGYTYVRELPSNEFGYTGWTLDEVLKDVMGMEDTRSQKLQSMLAAFDQAIDEENKIEAERIYKELDRALHPANVLRKMLSIDLSSVIEEGSK

SEQ ID NO: 82589 - protein, 206 aa, Salmonella enterica subsp. enterica serovar Muenster str. 660
MELSDKKCAYCEVKLGEKSTYHEVEHFKDKNDYPDDVIEWNNLLPSCRHCNGSKGTHDVVQEPIVNPFEELPAEFFYIKNFRMKGRNEKGILTIDVLNLNDREHLVKPRCETGAIIAEKIEDSLTLFEGYLSNPISKNKRKLIGTVRGILKECQRSAIFSAVSATVLHTSEDYLTLRGNMMAHKLWDEDMENLHIMSSNIQLPTTA

SEQ ID NO: 82590 - protein, 465 aa, Salmonella enterica; identical to SEQ ID NO: 81578
  subsp. enterica serovar Senftenberg str. 423984-1

SEQ ID NO: 82591 - protein, 198 aa, Salmonella enterica
  subsp. enterica serovar Senftenberg str. 423984-1
MTLLLNEQYHLCCYSEIRADLRGLGYHIEHVENKSQQPARTFDYQNFAASALDSENGLPQLGINAFGGHAQGKNKSVDMAKFIHCHLPDCSRYFAYLSDGRIVPADELNAQEMERAEYTIDLLNLNSGFLQTERRNHWEELEQLFEEHIEKGWDLQQLLQLELVPSPDHKLHEFFSITRQFFQQEAEQVLQIHAPALI

SEQ ID NO: 82592 - protein, 465 aa, Salmonella enterica; identical to SEQ ID NO: 81578
  subsp. enterica serovar Senftenberg str. 361154004

SEQ ID NO: 82593 - protein, 198 aa, Salmonella enterica; identical to SEQ ID NO: 82591
  subsp. enterica serovar Senftenberg str. 361154004

SEQ ID NO: 82594 - protein, 544 aa, Salmonella enterica subsp. enterica serovar Agona str. 432613
MINKMNLETCYVDFLELESHVINEDYLKESVELQKLISTLNESKFHLNKIGIHDFKRIRELQISLEDDLTVFVGDNGFGKSTILDAIAIVLSWLRSNIEKESKPGTYIKSHEVNNSVDVEYASIDANIKLKDFNTSILITKAKEGAYYSRNNELLEVKKLASIYRLVNKYVDNASLPLMAYYSIARSYIGGGVDRKRKNAKTKTVWSKFDVYDEIEFDRNDFTDFFQWLVFLHNRASQEKLSESQTTINALFSDIQSLKATLTQLSAIDNIDSTVIKGLELSLKEKLNYMKSLQSGEHKFNNAVSLYDSVINTILKFLPEFQWIKLVYGDDDYKIILKKGEVELDIQQLSQGEKTIFTLVGDLARRLILLNPNLSNPLLGYGIVLIDEIDLHLHPQWQQTIIERLTSTFPNVQFVITTHSPQVLSTVSSRSVRILQEVEVDGVNDLIVSHPDYQIKGVSNQDALLYGMRTDPIPSTKENGWLEEYKKLVELNRYSSDEALLLREKVVKHFGLDHPLVQECDDLISVLEFKNKINQHFSGSKDIK

SEQ ID NO: 82595 - protein, 227 aa, Salmonella enterica subsp. enterica serovar Agona str. 432613
MKYLSRQMPGPSVLNKFDYRRDDWNSLSSNDKKEIWEEIIKMQGKLCAYCEKKIEHHKSGGKNKVERHIEHFYRKSYYKNLTFEWSNLFGSCGEPQRCGFYKDKQKYNDDDLIKADRQNPDVFFHFLENGDVHIREGLNEKEHKMAEVTLRVFNLNPSSGGVKAERRRAIELSMTLIKELVGCASQLIESGCEIEDVRSMVFDEFKKNVKDRCFTTAIKHVFENRMP

SEQ ID NO: 82596 - protein, 544 aa, Salmonella enterica subsp. enterica serovar Agona str. 409753-6; identical to SEQ ID NO: 82594

SEQ ID NO: 82597 - protein, 227 aa, Salmonella enterica subsp. enterica serovar Agona str. 409753-6; identical to SEQ ID NO: 82595

SEQ ID NO: 82598 - protein, 304 aa, Salmonella enterica subsp. enterica serovar Agona str. 0292
MSESQTTINALFSDIQSLKATLTQLSAIDNIDSTVIKGLELSLKEKLNYMKSLQSGEHKFNNAVSLYDSVINTILKFLPEFQWIKLVYGDDDYKIILKKGEVELDIQQLSQGEKTIFTLVGDLARRLILLNPNLSNPLLGYGIVLIDEIDLHLHPQWQQTIIERLTSTFPNVQFVITTHSPQVLSTVSSRSVRILQEVEVDGVNDLIVSHPDYQIKGVSNQDALLYGMRTDPIPSTKENGWLEEYKKLVELNRYSSDEALLLREKVVKHFGLDHPLVQECDDLISVLEFKNKINQHFSGSKDIK

SEQ ID NO: 82599 - protein, 227 aa, Salmonella enterica subsp. enterica serovar Agona str. 0292; identical to SEQ ID NO: 82595

SEQ ID NO: 82600 - protein, 465 aa, Salmonella enterica; identical to SEQ ID NO: 81578
  subsp. enterica serovar Senftenberg str. NC_MB012510-0038

SEQ ID NO: 82601 - protein, 198 aa, Salmonella enterica; identical to SEQ ID NO: 82591
  subsp. enterica serovar Senftenberg str. NC_MB012510-0038

SEQ ID NO: 82602 - protein, 440 aa, Gloeobacter kilaueensis JS1
MLKSLKTKGIGPFSALDIEFAPRLNIVTGDNGLGKSFLLDIAWWCLTRKWPAEVNPQLTSGYMARPASIESEGSGTPSTKSTISFAFTGKSKEESYTSTFEPLEQSWTGKSGRPSNPGLVIYAQVDGSYSLWDPARNYWRKRGNIDIQERQPAYVFTAQEVWNGLEDDSNVLCNGLLLDWALWQKEKGEAFELLKTALLTLSPDSDEEIRPGELTRISLDDVRDIPTIRMPYQQDVPVLFASAGIRRILALAYLLVWAWQEHIQASKLLKQQKTNQIILLIDEIESHLHPRWQRTIMGALLRTVKQFASDDKAGVQIIAATHSPLILASLEPLFDPAFDTWFDINLQSNDRGSHAQLEQIAWRRRGDISSWLTSEAFDLKLPRAKEIEQVVDRASAALQSEQTTREQFLTIDSELRNYLSDTDPFWIRWRYITDKRGLLR

SEQ ID NO: 82603 - protein, 175 aa, Gloeobacter kilaueensis JS1
MNEQGLDLSKPKPQGVTLEPFWQDCLEELHSAYDGICAYVCVYIERVTGTPSADHFVPKSGDLNKAYEWSNYRLACQRMNARKNKYDDVLDPFSLGSNTFELELFSGRIYPSRSLSSADVQAAQATILRLKLDDPDCRELRTRYFNAYINDEISVKWLQKHSPFVWQEAQRQNLL

SEQ ID NO: 82604 - protein, 530 aa, Shewanella decolorationis S12
MKLDYLIIRSGFKNISNLKIEFDEGQLLTVLVGRNGSGKSNIIEALVRIFRALDLGELAPFSYELVYSLGAENRIWVKVDADPAYGNTPISQHQIEVAEKLGQHDMPIWNKVSLAKVQRDKAGQSAYLPKHLFAYYSGPSDRLESLFVKHRTDFYYQLLKDKVKIEDEVRPLFYAKPYHSQFVLLAFFLSGQSDEGRKFLAAQLGIKQFHSAHFVFRKPSWERSKTDAFWGAYGVVREFLNRLLPHTFGMVRATREETTSLTGKGKNNDFVHVYLPDLTALNSTAKGLGPKNFFKMLESTLLSELISSVHIKVVLNNNEIVSFSELSEGEQQLLTVFGLMQFTAESDSLFLLDEPDTHLNPAWAAKYHAFLNRFIPNKNHCHIVMVTHHPLAIAELNKEQIQVLHRDSIGLSYAEQPAESPIGMGVNGILTSDMFGMATTLDQHTSKVIEDRRKILEKDELNEDDKAKLRKLNSSLERLGYGYTHPDEDYRQFLIERKKAMHAMELKSIDTTEIRMQIVQQILKERGYSV

SEQ ID NO: 82605 - protein, 290 aa, Shewanella decolorationis S12
MRFIDPALIPACKPHDWDVKSVQWLARVAAAQDKSDEIKKLKNPWKKFKVNFANTFGDKCWYTEAARIGTTNDVDHFRPKNAVKDQFGRHVARTNAAGVVEYANYWWLAYEPLNYRYSCIFSNRANGDGGKQEFFPLEDETTRAWTPSCPYIREDVSFLDPCNSNDVQLIAFDVTVGMAEPRFSEQQDPKAFRRFQLSKKYYNLNEKTIVDARMEVLSELAKDLNLLELTWSFDPVIKASMQPALDAAKQGIVNKCSRKAKFSAAAVALVKTKQAEPWLADVLPLLDLSP

SEQ ID NO: 82606 - protein, 192 aa, Shewanella decolorationis S12
MYNPTLHLNPAWSMEYINFLKEVAGFNLDVTKEKLDSGAVDNSHIVLATHDPIVISTLKQEQIKIMKRDEDSLRVFAASPLYEPKGMGFSGILMSDMFGLRSDLDQKTLEKLDEHAILLAKKDRTAREETRYKELQGQLDNSGFLDAYSDPYFSAFVKAWIRKHGENLFKQPFLTDMTDEILAELDAEEARE

SEQ ID NO: 82607 - protein, 267 aa, Shewanella decolorationis S12
MRYIDIDDLELDLPDGWDDTVRQAWEYVNSKIDAAEAATNAKADENEWDAQLRVEQVEIEKAKARKKAISAKNDVWGQLSTVLANLSHGKCWYCESNELRSDNPIDHYRPKGKVAECPDHPGYWWLAFEWSNYRYACTYCNSRRVDVTTAGGKQDHFPVFTPPDWNKCKEDNNAEKPKLLDPTDADDYKLLTFNQNGEACPNTDDDESEAYQKAKESIDKYHLNHEPTRKARKAIRQKIRQIVADTNELLVQGLAITSNQIKKSYLS

SEQ ID NO: 82608 - protein, 465 aa, Salmonella enterica
  subsp. salamae serovar 58:l,z13,z28:z6 str. 00-0163
MRIDKLSLLNFRCFKQLDITFDEHITILVAPNGAGKTTVLDAVRLALFPFIRGFDASLYVKDKSLAIRTEDVRLVFRTEALNMEMSSPAMITATGEWESGKTATWMLDKRGEQPPHEDKTAAQLTRWGEQLQTLVREEHSLQQVELPLMLYLGTARLWYQERYEAQPTEQRLDNSAFSRLSGYDDCLSATSNYKQFEQWYSWLWLSYREHQITQLESPSAKLKEGVRVQRMKEAIQAIQQAINCLTQEVTGWHDLEYSSSHNQQLVMNHPQHGKIPLSQLSDGLRNAVAMVADIAFRCVKLNPHLRDEAALKTQGIVLIDEVDMFLHPAWQQQIIQSLRSAFPLIQFIVTTHSPQVISTVKRESIRLLEQDENGNGKALMPLGATYGEPSNDVLQSVMDVDPQPPVKEKEDLKKLTELVDQGKYNKRETQQLMATLQDALGEHHPQLKRLQRSIARQELLKGKAQ

SEQ ID NO: 82609 - protein, 194 aa, Salmonella enterica
  subsp. salamae serovar 58:l,z13,z28:z6 str. 00-0163
MNEQYQLCCYAEVRADLRGLGYHIEHVENKSQHPERTFDYQNLAASALDSANGLRQYGKNAFGGHSQGKNKSVDMAKFIHCHIPDCSRYFAYLSDGRIVPADGLNAQEMENAQYTIDLLNLNSGFLQTERRNYWEELEQIFDENIGNRQNLQLLLQINLVPSSDHKLHEFFSITRQFFQQEAEQVLHIHAPALI

SEQ ID NO: 82610 - protein, 465 aa, Salmonella enterica
  subsp. indica serovar 6,14,25:z10:1,(2),7 str. 1121
MRIDKLSLLNFRCFRQLDITFDEHITILVAPNGAGKTTVLDAIRLALFPFIRGFDASLYVKDKSLAIRTEDVRLVFRTEALNMEMSSPAMITATGEWESGKTATWMLDKRGEQPPHEDKTAAQLTRWGEQLQTLVREEHSLQQVELPLMLYLGTARLWYQERYEAQPTEQRLDNSAFSRLSGYDDCLSATSNYKQFEQWYSWLWLSYREHQITQLESPSAKLKEGVRVQRMKEAIQAIQQAINCLTQEVTGWHDLEYSSSHNQQLVMNHPQHGKIPLSQLSDGLRNAVAMVADIAFRCVKLNPHLRDEAALKTQGIVLIDEVDMFLHPAWQQQIIQSLRSAFPLIQFIVTTHSPQVISTVKRESIRLLEQDENGNGKALMPLGATYGEPSNDVLQSVMGVDPQPPVKERDDLQKLTAWVDQGKYDNPEAQQLMAALQVALGEKHPQLQRLQRSIARQKLLKGKDQ

SEQ ID NO: 82611 - protein, 201 aa, Salmonella enterica
  subsp. indica serovar 6,14,25:z10:1,(2),7 str. 1121
MTLLLNEQYHLCCYSEVRADLRGLGYHIEHVENKSQHPERTFDYLNLAASALDSGENGGLSSLKRKNAFGGHAQGKQDAVDMAKFIHCHISDCSRYFAYLSDGRIVPADELNAQETENAQYTIDLLNLNSGFLQTERRNHWEELEQLFDEHIEKDWDLQQLLQLDLVPSPDHKLHEFFSITRQFFQQEAEQVLHIHAPALI

SEQ ID NO: 82612 - protein, 469 aa, Salmonella enterica
  subsp. enterica serovar Worthington str. ATCC 9607
MRIDKLSLLNFRCFRQLDITFDEHITILVAPNGAGKTTVLDAVRLALFPFIRGFDAGLYVKDKSLAIRIEDVRLVFRPEALNMEMSSPAMITATGEWENGKTATWMLDKRGEQPPHEDKTAAQLTRWGEELQKLVRDEEHKQPVDLPLMLYLGTARLWYQERYEPQMAEQRLDNSAFSRLSGYDDCLSATSNYKQFEQWYSWLWRSHLEFQYKLIEAGRQNKSVDLVEGLRDDSMREAIQAILQAINCLTQEVTGWHDLEYSSSHNQQLVMSHPQHGKIPLAQLSDGLRNAVAMVADIAFRCVKLNPHLRDEAALKTQGIVLIDEVDMFLHPAWQQQIIQSLRSAFPLIQFIVTTHSPQVISTVKRESVRLLEQDEKGNGLASIPPGATYGEPSNDVLHSVMGVDPQPPVKEKADLQKLTAWVDQGKYDEPEAQQLMASLITSLGEKHPQLQRLQRSIARQKLLKGKAQ

SEQ ID NO: 82613 - protein, 241 aa, Salmonella enterica
  subsp. enterica serovar Worthington str. ATCC 9607
MRHVIKTRRGTDALLTAHEQPPQNSEQSTRRWQRFGRENKAALMTLLLNEQYHLCCYSEIRADLRGLGYHIEHVENKSQQPGRTFDYQNLAASALDSENGLPQLGINAFGGHAQGKNKSVDMAKFIHCHLPDCSRYFAYLSNGHVVPSIDLTEQEAEYAQYTIDHLNLNSGFLQTERRNHWEELEQLFDEHIEKVWDLQQLLQLDLVPTPDHKLHEFFSFTRQFFQQEAEQVLQDYAPELM

SEQ ID NO: 82614 - protein, 465 aa, Salmonella enterica; identical to SEQ ID NO: 81888
  subsp. enterica serovar Tennessee str. TXSC_TXSC08-21

SEQ ID NO: 82615 - protein, 241 aa, Salmonella enterica
  subsp. enterica serovar Tennessee str. TXSC_TXSC08-21
MRHVIKTRRGTDALLTAHEQPPQNSDQSTRRWQHFGRENKAALMTLLLNEQYHLCCYSEIRADLRGLGYHIEHVENKSQQPGRTFDYQNLAASALDSENGLHLFGINAFGGHARGKQEAVDMAKFIHCHLPDCSRYFAYLSDGRIVPADELNAQEMERAEYTIDLLNLNSGFLQTERRNHWEELEQLFEEHIEKGWDLQQLLQLELVPSPDHKLHEFFSITRQFFQQEAEQVLQIHAPALI

SEQ ID NO: 82616 - protein, 465 aa, Salmonella enterica; identical to SEQ ID NO: 81888
  subsp. enterica serovar Tennessee str. TXSC_TXSC08-19

SEQ ID NO: 82617 - protein, 241 aa, Salmonella enterica; identical to SEQ ID NO: 82615
  subsp. enterica serovar Tennessee str. TXSC_TXSC08-19

SEQ ID NO: 82618 - protein, 465 aa, Salmonella enterica; identical to SEQ ID NO: 81884
  subsp. enterica serovar Sloterdijk str. ATCC 15791

SEQ ID NO: 82619 - protein, 198 aa, Salmonella enterica
  subsp. enterica serovar Sloterdijk str. ATCC 15791
MTLLLNEQYHLCCYSEIRADLRGLGYHIEHVENKSQQPGRTFDYQNLAASALDSENGLHLFGINAFGGHARGKQEAVDMAKFIHCHLPDCSRYFAYLSDGRIVPADELNAQEMERAENTIVLLNLNSGFLQTERRNHWEELEQLFEEHIEKGWDLQQLLQLELVPSPDHKLHEFFSITRQFFQQEAEQVLQIHAPALI

SEQ ID NO: 82620 - protein, 465 aa, Salmonella enterica
  subsp. enterica serovar Stanley str. ATCC 7308
MRIDKLSLLNFRCFRQLDITFDEHITILVAPNGAGKTTVLDAIRLALFPFIRGFDASLYVKDKSLAIRTEDVRLVFRPEALNMEMSSPAMITATGEWESGKTATWMLDKRGEQPPHEDKTAAQLTRWGEQLQTLVREEHNLQQVELPLMLYLGTARLWYQERYETQPTEQRLDNSAFSRLSGYDDCLSATSNYKQFEQWYSWLWLSYREHQITQLESPSAKLKEGVRVQRMKEAIQAIQQAINCLTQEVTGWHDLEYSSSHNQQLVMNHPQHGKIPLSQLSDGLRNAVAMVADIAFRCVKLNPHLRDEAALKTQGIVLIDEVDMFLHPAWQQQIIQSLRSAFPLIQFIVTTHSPQVISTVKRESIRLLEQDENGNGKALMPLGATYGEPSNDVLQSVMGVDPQPPVKEKADLQKLTAWVDQGKYDEPEAQQLMAALQAALGDQHPQLQRLQRSIARQNMLKGKAQ

SEQ ID NO: 82621 - protein, 198 aa, Salmonella enterica
  subsp. enterica serovar Stanley str. ATCC 7308
MTLLLNEQYHLCCYSEIRADLRGLGYHIEHVENKSQQPGRTFDYQNLAASALDSENGLHLFGINAFGGHARGKQEAVDMAKFIHCHLPDCSRYFAYLSDGRIVPADELNAQEMERAEYTIDLLNLNSGFLQTERRNHWEELEQLFEEHIEKGWDLQQLLQLELVPSLDHKLHEFFSITRQFFQQEAEQVLQIHAPALI

SEQ ID NO: 82622 - protein, 465 aa, Salmonella enterica; identical to SEQ ID NO: 81578
  subsp. enterica serovar Senftenberg str. 604314

SEQ ID NO: 82623 - protein, 198 aa, Salmonella enterica; identical to SEQ ID NO: 82591
  subsp. enterica serovar Senftenberg str. 604314

SEQ ID NO: 82624 - protein, 465 aa, Salmonella enterica subsp. enterica serovar Soerenga str. 695
MRIDKLSLLNFRCFRQLDITFDEHITILVAPNGAGKTAVLDAIRLALFPFIRGFDASLYVKDKSLAIRTEDVRLVFRPEALNMEMSSPAMITATGEWESGKTATWMLDKRGEQPPHEDKTAAQLTRWGEQLQTLVREEHNLQQVELPLMLYLGTARLWYQERYEAQPTEQRLDNSAFSRLSGYDDCLSATSNYKQFEQWYSWLWLSYREHQITQLESPSAKLKEGVRVQRMKEAIQAIQQAINCLTQEVTGWHDLEYSSSHNQQLVMNHPQHGKIPLSQLSDGLRNAVAMVADIAFRCVKLNPHLRDEAALKTQGIVLIDEVDMFLHPAWQQQIIQSLRSAFPLIQFIVTTHSPQVISTVKRESIRLLEQDENGNGKALMPLGATYGEPSNDVLQSVMGVDPQPPVKEKADLQKLTAWVDQGKYDEPEAQQLMAALQVALGDQHPQLQRLQRSIARQNMLKGKAQ

SEQ ID NO: 82625 - protein, 198 aa, Salmonella enterica subsp. enterica serovar Soerenga str. 695
MTLLLNEQYHLCCYSEIRADLRGLGYHIEHVENKSQQPGRTFDYQNLAASALDSENGLHLFGINAFGGHARGKQEAVDMAKFIHCHLPDCSRYFAYLSDGRIVPADELNAKEMERAEYTIDLLNLNSGFLQKERRNHWEELEQLFEEHIEKGWDLQQLLQLELVPSPDHKLHEFFSITRQFFQQEAEQVLQIHAPALI

SEQ ID NO: 82626 - protein, 469 aa, Salmonella enterica
  subsp. enterica serovar Meleagridis str. 0047
MRIDKLSLLNFRCFRRLDITFDEHITILVAPNGAGKTTVLDAVRLALFPFIRGFDASLYVKDKSLAIRTEDVRLVFRAKALNMEMSSPAMITATGEWESGKTATWMLDKRGEQPPHEDKTAAQLTRWGEELQKLVRDEEHKQPVDLPLMLYLGTARLWYQERYEPQMAEQRLDNSAFSRLSGYDDCLSATSNYKQFEQWYSWLWRSHLEFQYKLIEAGRQNKSVDLVEGLRDDSMRDAIQAIQQAINCLTQEVTGWRDLEYSSSHNQQLVMSHPQHGKIPLSQLSDGLRNAVAMVADIAFRCVKLNPHLRDEAALKIQGIVLIDEVDMFLHPAWQQQIIQSLRSAFPQIQFIVTTHSPQVLSTVKRESIRLLEQDENGNGKALMPLGATYGEPSNDVLQSVMGVDPQPPVKEKADLQKLTAWVDQGKYDEPETQQLMAALQVALGDQHPQLQRLQRSIARQNLLKGKAQ

SEQ ID NO: 82627 - protein, 198 aa, Salmonella enterica
  subsp. enterica serovar Meleagridis str. 0047
MTLLLNEQYHLCCYSEIRADLRGLGYHIEHVENKSQQPGRTFDYQNLAASALDSENGLPQLGINAFGGHAQGKNKSVDMAKFIHCHLPDCSRYFAYLSNGHVVPSIDLTEQEAEYAQYTIDHLNLNSGFLQTERRNHWEELEQLFEEHIEKGWDLQQLLQLDLVPTPDHKLHEFFSFTRQFFQQEAEQVLQDYAPELM

SEQ ID NO: 82628 - protein, 408 aa, Salmonella enterica
  subsp. enterica serovar Minnesota str. ATCC 49284
MKFKRLKISDWRQFNEVSIDFHNKVTVITGSNGAGKSTVLRILAKHFSWNCDFLAMPFYDEDKGINIFTNKRQSNSYSNANHKIGEIEYSNEIISSIYIEEHPRTINYDIAIENIDRSIKGLFIHSHRASNNYEITSNIPTGVINAEDSYKNHLQAYKKHLENSSFNGNPTVEMKQSLLSMAALGVGNNYIKKNKKSEKTFTSFIEILKITLPKNIGFKNIRFEVPDVIFETDSGDFVLDSASGGIMSIIDISWQILLYSQDAEHFTALIDEPENHLHPTMQRSLINDLIKAFPNVQFVIVTHSPFIISSVKDSNVYALKHDDSNKVNSHKLDLEEKASTANKILRDVLGVSITIPQWAEDELDKICSMLTAENITENNLNELRTSLDQAGLGEFYPEALYHIVGGKK

SEQ ID NO: 82629 - protein, 222 aa, Salmonella enterica
  subsp. enterica serovar Minnesota str. ATCC 49284
MIKLIKLTEPDILAKNFKKWTDKHLSNIGSGINSSDYLKTRYSHEDIKEQLIKETNGKCAYCESKLLHIHHGDVEHIYPKSLDESKRFLWINLTLSCEICNQNKTNLDPNLNNIQDPYSGNPESVIIFCGSLVLGSGIKGLSTLAILDLNRKQLIEKRQEKLEKILLIFNQICSEALPQAARQAIYNDMIKNETSADQEYSSMVKSTIRHVSYIIPGDIKQK

SEQ ID NO: 82630 - protein, 465 aa, Salmonella enterica; identical to SEQ ID NO: 81578
  subsp. enterica serovar Senftenberg str. 423984-2

SEQ ID NO: 82631 - protein, 198 aa, Salmonella enterica; identical to SEQ ID NO: 82591
  subsp. enterica serovar Senftenberg str. 423984-2

SEQ ID NO: 82632 - protein, 349 aa, Salmonella enterica subsp. enterica serovar Miami str. 1923
MKIKGLILFTNKRQSNSYSNANHKIGEIEYSNEIISSIYIEEHPRTINYDIAIENIDRSIKGLFIHSHRASNNYEITSNIPTGVINAEDSYKNHLQAYKKHLENSSFNGNPTVEMKQSLLSMAALGVGNSYIKKNKKSEKTFTSFIEILKITLPKNIGFKNIRFEVPDVIFETDSGDFVLDSASGGIMSIIDISWQILLYSQDAEHFTALIDEPENHLHPTMQRSLINDLIKAFPNVQFVIVTHSPFIISSVKDSNVYALKHDDSNKVNSHKLDLEEKASTANKILRDVLGVSITIPQWAEDELDKICSMLTAENITENNLNELRTSLDQAGLGEFYPEALYHIVGGKK

SEQ ID NO: 82633 - protein, 222 aa, Salmonella enterica subsp. enterica serovar Miami str. 1923; identical to SEQ ID NO: 82629

SEQ ID NO: 82634 - protein, 465 aa, Salmonella enterica; identical to SEQ ID NO: 81578
  subsp. enterica serovar Senftenberg str. 316235162

SEQ ID NO: 82635 - protein, 198 aa, Salmonella enterica; identical to SEQ ID NO: 82591
  subsp. enterica serovar Senftenberg str. 316235162

SEQ ID NO: 82636 - protein, 393 aa, Salmonella enterica
  subsp. enterica serovar Indiana str. ATCC 51959
MKIQKIDIKDVGGIKRAIINFDASMNIICGPNGIGKTTILDSVAHSFINTNSYVLKRHAQSTDGQINTVLNDCDNIRESHISLEQFNPKDYSYISGLRELGRKVIYLNISRMFKYVSLSNISKDEERQDHSIYTLLTDGISVADMKNWFAKRCLFFNTPEALSENNKVNLELAKKCFSLLNAEYKFSRVDAKKFDVFVSTPNGEIWYEYLSSGFKSCLSILFGIIKEIELRMPDENCLAQHFDGIVLIDELEMHLHPEWQSKIVSVLRDTFPATQFIVTTHSPHIIQNAEPNQIIALGTDSNGYTYVRELPSNEFGYTGWTLDEVLKDVMGMEDTRSQKLQSMLAAFDQAIDEENKIEAERIYKELDRALHPANVLRKMLSIDLSSVIEEGSK

SEQ ID NO: 82637 - protein, 248 aa, Salmonella enterica
  subsp. enterica serovar Indiana str. ATCC 51959
MIKLERNFTPLFFSPQNVSRLTEKFKSSGTHVWHHDDVKNSLMELSDKKCAYCEVKLGEKSTYHEVEHFKDKNDYPDDVIEWNNLLPSCRHCNGSKGTHDVVQEPIVNPFEELPAEFFYIKNFRMKGRNEKGILTIDVLNLNDREHLVKPRCETGAIIAEKIEDSLTLFEGYLSNPISKNKRKLIGTVRGILKECQRSAIFSAVSATVLHTSEDYLTLRGNMMAHKLWDEDMENLHIMSSNIQLPTTA

SEQ ID NO: 82638 - protein, 544 aa, Salmonella enterica; identical to SEQ ID NO: 82594
  subsp. enterica serovar Agona str. 419639 2-1

SEQ ID NO: 82639 - protein, 227 aa, Salmonella enterica; identical to SEQ ID NO: 82595
  subsp. enterica serovar Agona str. 419639 2-1

SEQ ID NO: 82640 - protein, 465 aa, Salmonella enterica subsp. enterica serovar Agona str. 632182-2; identical to SEQ ID NO: 82624

SEQ ID NO: 82641 - protein, 198 aa, Salmonella enterica subsp. enterica serovar Agona str. 632182-2
MTLLLNEQYHLCCYSEIRADLRGLGYHIEHVENKSQQPGRTFDYQNLAASALDSENGLHLFSINAFGGHARGKQEAVDMAKFIHCHLPDCSRYFAYLSDGRIVPADELNAQEMERAEYTIDLLNLNSGFLQTERRNHWEELEQLFEEHIEKGWDLQQLLQLELVPSPDHKLHEFFSITRQFFQQEAEQVLQIHAPALI

SEQ ID NO: 82642 - protein, 156 aa, Salmonella enterica
  subsp. enterica serovar Nchanga str. CFSAN001092
LAQHFDGIVLIDELEMHLHPEWQSKIVSVLRDTFPATQFIVTTHSPHIIQNAEPNQIIALGTDSNGYTYVRELPSNEFGYTGWTLDEVLKDVMGMEDTRSQKLQSMLAAFDQAIDEENKIEAERIYKELDRALHPANVLRKMLSIDLSSIIEEDNK

SEQ ID NO: 82643 - protein, 65 aa, Salmonella enterica
  subsp. enterica serovar Nchanga str. CFSAN001092
MIKLERNFTPLFFSPQNVSRLTEKFKSSGTHVWHHDDVKNSLMELSDKKCAYCEVKLGEKSTYHE

SEQ ID NO: 82644 - protein, 393 aa, Salmonella enterica
  subsp. enterica serovar Nchanga str. CFSAN001091
MKIQKIDIKDVGGIKRAIINFDASMNIICGPNGIGKTTILDSVAHSFINTNSYVLKRHAQSTDGQINTVLNDCDNIRESHISLKQFNPKDYSYISGLRESGRKVIYLNISRMFKYVSLSNISKDEERQDHSIYTLLTDGISVADMKNWFAKRCLFFNTPEALSENNKVNLELAKKCFSLLNAEYKFSRVDAKKFDVFVSTPNGEIWYEYLSSGFKSCLSILFGIIKEIELRMPDEECLAQHFDGIVLIDELEMHLHPEWQSKIVSVLRDTFPATQFIVTTHSPHIIQNAEPNQIIALGTDSNGYTYVRELPSNEFGYTGWTLDEVLKDVMGMEDTRSQKLQSMLAAFDQAIDEENKIEAERIYKELDRALHPANVLRKMLSIDLSSIIEEDNK

SEQ ID NO: 82645 - protein, 144 aa, Salmonella enterica
  subsp. enterica serovar Nchanga str. CFSAN001091
MIKLERNFTPLFFSPQNVSRLTEKFKSSGTHVWHHDDVKNSLMELSDKKCAYCEVKLGEKSTYHEVEHFKDKNDYPDDVIEWNNLLPSCRHCNGSKGTHDVVQEPIVNPFEELPEEFFYIKNFRMKGRNEKGILTIDVLNLNDR

SEQ ID NO: 82646 - protein, 469 aa, Salmonella enterica; identical to SEQ ID NO: 82612
  subsp. enterica serovar Havana str. CFSAN001082

SEQ ID NO: 82647 - protein, 241 aa, Salmonella enterica; identical to SEQ ID NO: 82613
  subsp. enterica serovar Havana str. CFSAN001082

SEQ ID NO: 82648 - protein, 465 aa, Escherichia coli UMEA 3342-1; identical to SEQ ID NO: 81096

SEQ ID NO: 82649 - protein, 243 aa, Escherichia coli UMEA 3342-1; identical to SEQ ID NO: 81097

SEQ ID NO: 82650 - protein, 526 aa, Acinetobacter gyllenbergii NIPH 230
MSDNKIKYEPKGVKKEDLFFCFEMLKELKVSGQDLHKSDFYEIIEKNINENCIFLSKVVFLNYKRLSDYEVFFNERINVIIGENGVGKTSVLNGVVKNLSWMLNNILKDNNNGIHLMDDEISNVIIDKKNQTSIVKCDFYYGEYTKIEGELVKHKVGFSSKRQSKVSEYKNIGEIWREFHNLNNINLPIFSFYSVKRFNDKVGKLEAKAEINKLDAYKGALDGNVKFESFSKWLLQCLKIISNDGVDQGYKERLNQLVLAKQSLVPETEVYKLLDEEEKRLRFFIESQKNNAYIYKQLELINGLVKKIFPDFNDFKLIQTTGVDEILLTYYNRDPINLEQLSDGERVFLGLIMDIAYRLISLNPNRENPFEGSGIVVIDEIELHLHPKWQQSSVLILGKSFPNIQFIITTHSPQVLSTVDKKSIIYLKKDGVGEVSYQSKGLMSSDVLELIMNTRSIPDVKEAQDLKKLNLLLESEKYDSEEFDELLRNLTEHFGENHPEILSVNSRINFIKLRNNLKNKIRISKK

SEQ ID NO: 82651 - protein, 220 aa, Acinetobacter gyllenbergii NIPH 230
MKFLVRNAEPVCLVVMKRIYSGWGDVTFSDKQEIWLSLDEMQNNYCAFCEMTLKGMRKHIEHFISRSRKNVLTFEWTNLFGSCDNSEHCGRYKDIIISDYDENNLIKPDENDPRNFLSFSPEGDISVKLGLSEENELKATETIRVFGLDAPDLVAARRTILSGYNQIAKEYVELVELAISEGGENIKVLVDEIYAEYSITILDQPFSTALSQLLDLKFTQ

SEQ ID NO: 82652 - protein, 488 aa, Acinetobacter gyllenbergii NIPH 230
MNYINILIYNDNEIHLNQRHLIITGKSGVGKTRFLNNLRTELEKDKNTESHMKKILREQISEILKNGINNYPLSLNLKNQEIKYINKFRNNYDSEFNYTNHLLDIQNLIDNKYKFFNKKKKSYFLKTDSTTQDEHLKIENPDSILENYYYYNNPYHIDNFYKSLSKLIEDYLTNTKGISVYPINHPKNIYYFESSRVSSNLFTMTVFQSFESFKNNQQKHDVEDALGAFLVDQRMAFYDLMKFREPEEHNQSAISARLFDTNEIERWFLKIEKDLQIILENPTIELSFTKKGDQVLIIQKDKDISFSFDSLSSGFKAVFNIYANLLVRAQFQEVAPEELIGIAIIDEIDVHLHISLQKKVLPFLIKAFPKIQFIVSTHSPFVITSTDNDTVVYDISNGEFFDEDLSRYSYESLIKGLFHVDTQSDHLKTEIQTIATILNSDPNNYEKLRETLKNITPYAKQLDVESKSFYFKALNHLLDNQELGELDV

SEQ ID NO: 82653 - protein, 220 aa, Acinetobacter gyllenbergii NIPH 230
MFKVIRSAKPKEWTNSDYTDPAVVKQLKLDFLSKCYLCEQTDFGNVNVEHFVPHLNKSEELRIDWNNLYYSCSHCNGIKGSRHKELLDCCNENHNVDVAIALQAPSVPNGKIVLTNTLNNDSDLYELTNKTIALLEQCYNNANSGNQQVSHEYLKEKILEEHAYLQSLRFQLKNGWNRLRQQQKADLIENITNMLQQNYPFSAFWKTYVRNDPFLSEILK

SEQ ID NO: 82654 - protein, 389 aa, Acinetobacter oleivorans CIP 110421
MKIHSIELKDVGGIPYLKLENLNSKMNIICGENGVGKTNILDAIAASFSQFDKNHVRKRAGSDKAIITIKHDKKGSSDIHVDITDFEPNESDYFLLNNKNYEENKHLMLYIKTNRGIDYKKVKAIIADPDSTHRMRNNSSGVKNEDIKDWLLNRVLHSKHYDHLTETQLKNLESAKACFNLLNPEFKFKRLNTSNEIFVDTPTGEIFLEFLSSGFKSTLFILLGLIKEIDFRFDKNRIAAKDFEGIILIDEIELHLHPEWQGRIINILKELFPYAQFFIATHSPHVIQSAFAGEVIALERLNNEIVLRDIPNPEYGYQGWTIEEILEDVMGMADLRTKLYKSVKGRFDEALQERNRDKAYEAYCQLDKMLHPNYPLRPVFKLQLDSLGE

SEQ ID NO: 82655 - protein, 240 aa, Acinetobacter oleivorans CIP 110421; identical to SEQ ID NO: 81361

SEQ ID NO: 82656 - protein, 486 aa, Acinetobacter indicus CIP 110367; identical to SEQ ID NO: 82138

SEQ ID NO: 82657 - protein, 200 aa, Acinetobacter indicus CIP 110367; identical to SEQ ID NO: 82139

SEQ ID NO: 82658 - protein, 590 aa, Acinetobacter brisouii CIP 110357; identical to SEQ ID NO: 82028

SEQ ID NO: 82659 - protein, 260 aa, Acinetobacter brisouii CIP 110357; identical to SEQ ID NO: 82029

SEQ ID NO: 82660 - protein, 465 aa, Escherichia coli 907391; identical to SEQ ID NO: 81190

SEQ ID NO: 82661 - protein, 243 aa, Escherichia coli 907391; identical to SEQ ID NO: 81097

SEQ ID NO: 82662 - protein, 452 aa, Escherichia coli 907672; identical to SEQ ID NO: 80970

SEQ ID NO: 82663 - protein, 219 aa, Escherichia coli 907672; identical to SEQ ID NO: 80971

SEQ ID NO: 82664 - protein, 465 aa, Escherichia coli 907892; identical to SEQ ID NO: 81190

SEQ ID NO: 82665 - protein, 243 aa, Escherichia coli 907892; identical to SEQ ID NO: 81097

SEQ ID NO: 82666 - protein, 623 aa, Escherichia coli 907892; identical to SEQ ID NO: 82374

SEQ ID NO: 82667 - protein, 205 aa, Escherichia coli 907892; identical to SEQ ID NO: 82375

SEQ ID NO: 82668 - protein, 416 aa, Escherichia coli 908519; identical to SEQ ID NO: 81196

SEQ ID NO: 82669 - protein, 221 aa, Escherichia coli 908519; identical to SEQ ID NO: 81197

SEQ ID NO: 82670 - protein, 452 aa, Escherichia coli 908525; identical to SEQ ID NO: 80970

SEQ ID NO: 82671 - protein, 219 aa, Escherichia coli 908525; identical to SEQ ID NO: 80971

SEQ ID NO: 82672 - protein, 465 aa, Escherichia coli A25922R; identical to SEQ ID NO: 81190

SEQ ID NO: 82673 - protein, 243 aa, Escherichia coli A25922R; identical to SEQ ID NO: 81097

SEQ ID NO: 82674 - protein, 437 aa, Klebsiella pneumoniae UCICRE 10
MTFRILNILQDGKWLPMINYINDLENVFTVITGRNSSGKSRLLSKAINAAIFKEENLHVKFSGWYSDRPERAIAISTGKFDRFPTITHADKNKNFIGNYSYHGVKNSENPFNEIIKNFLLTTLDKNNEKTNRVRSLDYLLKYLGFGSDIKVSLSLNINTGLIKERRYEDFAKDMLKRTLRKNISVSEKYQKLFNNNMWVSFAHEVRGRLNDLDLGYDAKKITIQLNYNELKFESFSKLDSIHFLLDWDILQVSEISFNGLTEKKRLGLSTFSSGQQCMLLIILGILSSIQNNSLICIDEPEISLHPEWQLEFIKLLQDVFSSFSGCHFLIATHSPQIVSGLRDKNGYILSLEDKQLFQHDSFMKSADFQLAEVFQSPGFKNEYLIRTLLVIISKVSKNDELNSTDLKNLALANSLKEHLDERDPVMYLIKQANALVG

SEQ ID NO: 82675 - protein, 216 aa, Klebsiella pneumoniae UCICRE 10
MKKIIPQGKYKKMFEDYDRKDHSIWNATKGDIVEVRKTIREFYLKEQGYKCAYCRMEKKESHGYTWDIEHVLPKASYPEYLLEPENLAIACRECNNPKDNHEMLSHPKFRTKDYPNDKECFKIIHPHFDKYSDNMEVAILEGKRIYFPLNQDKGKYTFISCDLFRFSYKFAEWESFDKAAILSFSEFLDNCPTDATPDEIKRMLGHIKFNLKNLDF

SEQ ID NO: 82676 - protein, 550 aa, Klebsiella pneumoniae UCICRE 8
MKLDKLWVSEFKNLKNITIDFDQNELVTVIIGWNGAGKSNVIEALVIIFRDLDLHYPPAFSYDLEYVCRGRKIYIEARVNDDKKDRYKIKCHPINKPNESKNLSNKEFFEDGDKKYLPTNVFGYYSGPSDRLATHFYEHQRRFREQLIYPEKFNLNENTLPLRPLFYAQKVHSNFVLLAFFLSEDEKIKKFLKEKLFIDGLESVMFVISKPDWKSSEGDPRFWNAKGVVQPFLERLYEASLAPMDIKFTLPHPLKKNGENVDALFLFLKDLDALKNVGNHTSDKDFFKLLESIYFSSLIHEVQIRVKVNEKNGTNELLTFRELSEGEQQLITVLGLLRFTRDDESLFLLDEPDTHLNPAWSMEYINYLEEVAGFNLDRKESQQNDGSKQKIENSHIVLATHDPVVISTLKREQIQIMKRDENTLEVYAHSPLYDPKGMGFSGVLMSDMFGLRSDLDPKTLEKLDEHAILLANENRTAEEEVRFGELKEELDMLGFLEAYSDPYFSAFVKAWGRSERIDQYHQVSLTESTRDELSKMSDDILSELKREEGN

SEQ ID NO: 82677 - protein, 307 aa, Klebsiella pneumoniae UCICRE 8
MHFIDKDEIEIRLPDDWQNKIDEVWLYVQEKIQEADAAVRVKAAQEQWSDDKLSCELNKSIASARKKAINAKSDVWGQLSEILSELSFGKCWYCESTELRSDNPIDHFRPKGKVAECPDHPGYWWLAFDWSNYRYSCTYCNSRRVNTDTAGGKQDHFPILPPYTWNKRREDEFIENPILLDPTDIDDVNLLTFNINGEACPNVDDKTSPLYKRAKESVDLYHLNHTPTKNARKRVYQTVRRLVSNINSLSAQNFEANKLTIKDLKTQLHKMIRVSCPSTSFNSAARIYLREFYNSHAWVKDMLDRGY

SEQ ID NO: 82678 - protein, 573 aa, Klebsiella pneumoniae UCICRE 7
MKIDWLRLENFKNLTSFEVDFSLKSERQVIIGRNGVGKSNILESIAWIFRDLDLCEESDFEYEIKYRCRDHYVKVISKGKSSKKPRRKGTRRENIQRFKRSYWVIENAADIEDKSSEEIEKLFVELKETEFNRRNQAIKNESGVYQFRDERLLPDYVFGYYSGISARFNEAFETHERDYYSDQKDGEEMSLRTMFLAKPHHSQFSLLSFFAKQDEATAKFLLDEFDIESLSSVLFTLQEPYWSSSTKKSELEKQNKDRRFWGAGGNVEPFLNKLFSLAYAPMAGTERKEISINRTTNLETRYCFLNSQDSINKLADGLEPKEFFTRLESSIFSDILSLDGSGLKIRVRLKGVKDAITFKEMSEGEQQLLTIIGLMRFTQRDESLFLLDEPDTHLNPAWCLDLLKNLRTYGVDPKNSQILITTHSPLTFAGLDKHEVVIVDKNSDGQIYSYHPTTAPKGMGFQAILTSDFFKLRSTLDRDTLNLLDEKRELGLKEEKTDEDRQRLDELNTILGKLDFSHAARDPLYLEYIRAITEAQKEFPEIANATPDHVSWQVRKRISLDIAKRLSRKKEDV

SEQ ID NO: 82679 - protein, 269 aa, Klebsiella pneumoniae UCICRE 7
MRYIDKRQLRRLVDLTDIDLAKAQIAALPADQRSDFIDANGDRWSKLKPALWQLGNLKCWYSESELQVQQGHVEHFRPKKKPHGLNGVAHSGYWWRAFDWTNFRLSHPTCNVRITDYLTGQIVGKGAYFPLKDGDARAIDEAGERNENPVLLDPTVIGDCKLICFDTNDGRPLATFSVQQDPWKNKRAIQSIAFYHLDEGTWNYQRKDLMDEVGILCDRLIEAESSPNRDQAQCDQLADELVGYINEHQPFTSACTQVIKEKGLLEAVN

SEQ ID NO: 82680 - protein, 530 aa, Klebsiella pneumoniae UCICRE 7
MKPIENNKFIKLASKSRKGDIDSSYELYTLYQTGKFLEQDIHKAQEYLDLALKQFSQQKIRFTQLSLLNFRIIDRLNLDMTKSQIQVLVGNNGAGKTTVLDAISYSLSWLIQRIVHKGGRARDIEKSDISIGNNDGYSSIIAKIGLKHNYNSTLELCEVEEGSIVNKKSYYSSFTRLGNLYKLACDKDERFELPLLAYYGVMRSTDINSKDVSDFDETSAIEISNRFDGYNNALTGKADFKAFFRWYKRLDDVVKHEATSAFQTDPKILASLETLALTDSKSRKLLDDLILSLKERQEYEGSSSAKRKQTIINNAVSLFMEDFSNLNVELKPTLHLSIEKNNKKINVLQLSQGEKSLLALVLDICRRMMVLNPLSENPLLTAGIILIDEVDLHLHPEWQRNILKNFSRVFPNCQFIVSTHSPQVISEVKHHQICILGKDSNGNFNASKPEQSYGLTSNEVLNEIMNTGFQKLDRSPEVQKEIDDVFMLIEEGKIEEAKNKINKIELDLNGEIPELVSAKFDIELQGWDKE

SEQ ID NO: 82681 - protein, 209 aa, Klebsiella pneumoniae UCICRE 7
MREIRKGSEPRLLTEYRSRGGEYDGPNFTPVKNAIRSSLLTEQGYLCAYCMTRITAETMKVEHWACQSNNPRLQLDYSNLLGCCMGSEGEKFTSQTCDTKKGDKPLKYNPSKQQDQINNIIKYDGQGKIFSTDREFSAQINTVLNLNKVRLVQNRSYILTSVRQKLSSKTGKRSRTEIRRFLDDYLTLNQDGQLREYCGLVEYYLLSKI

SEQ ID NO: 82682 - protein, 541 aa, Klebsiella pneumoniae BWH 30
MNRTVKKIKHGADHDNSIKDQYKMFKYYKEGMFVEVDSEESSRYRQMCLNNLKESQFRLKRVKLVNYKGFNELSINLDNDVILIAANNGYGKTGILEAIYLSLSWFYRLVYGSNQGWRFGDKYINRRVSNAGMLVNLEVSVGNDKKSSDYQIDIARSLGAFSVKSDYADFKDLAEMYIEFQNSGIVAPMFAYYSVERGKNYPDGGFTSMIESGSSKLLDKLYPDSSLTLSSNIFANFIKWAAEIKIKKSVSSEDEQSEKIKSLKEFIYHINHSDLDKEIKKTLISQKEKEIETIFSSQSADKLTNLDRMEKIVDMIFAQGCAFIDDISSIQLKYDEKLDALDLVCIKRDCEISASYLSHGEKSTLSLLFDIALKLIYTCGIEDPFNGHGIVFIDEVELHLHPSWQQSLLSKLKKTFPNVKIIATTHSPNILNTVEEQAIRKIKLKDNRFYIEVPTFSYGANSSQVQSDIQDVAARPDVEPVQNLTRFREMMKNNQYDTPEAQALLKKILQWGDAHDPDVTKLKIDLELRIKRNAKKISKEQ

SEQ ID NO: 82683 - protein, 243 aa, Klebsiella pneumoniae BWH 30
MRGFRKGRLSNDILDDYIAVPGNENNGWKDEFYTTLSSHDRNRLKNEIITDQAGLCAYCEKALRDEGDNKPLGFKVEHFIPENSKTIKEKIAAGQPAPATNYSLLWTNLLGCCFGGEHPRSASYDKSLTDKSNLSCDVPKSNNNWSELILDPSQQPPDDGTWFEFDEDGLMNVSADCPIQYVTKARQSIEMLNLNCVRLTRLRLAALESISTITDEADIAALLSKDAAGIYGEFISLRKWYLA

SEQ ID NO: 82684 - protein, 410 aa, Klebsiella pneumoniae MGH 44
MKFKRLKISDWRQFNEVSIDFHNKVTVITGSNGAGKSTVLRILAKHFSWNCDFLAMPFYDEDKGINVFTNKRQSNSYSNARHQIGEIEYSNEIISSIYIEEHPRTINYDIAIENIDRSIKGLFIHSHRASNNYEITSKIPTGVINAEDSYKNHLQAYKKHLENSSFNGNPTVEMKQSLLSMAALGVGNSYIKKNKKSEKTFTSFIEILKITLPKNIGFKNIRFEVPDVIFETDSGDFVLDSASGGIMSIIDISWQILLYSQDAEHFTALIDEPENHLHPTMQRSLLNDLIKAFPNVQFVIVTHSPFIISSVKDSNVYALKHDDSNKVNSHKLDLEEKASTANKILRDVLGVSITIPQWAEDELDKICSMLTAENITENNLNELRTSLDQAGLGEFYPEALYHIVGGKKND

SEQ ID NO: 82685 - protein, 222 aa, Klebsiella pneumoniae MGH 44
MIKLIKLTEPDILAKNFKKWTDKHLSNIGSGINSSDYLKTRYSHEDIKEQLIKETNGKCAYCESKLLHIHHGDVEHIYPKSLDESKRFLWINLTLSCEICNQNKTNLDPNLNNIQDPYSGNPEGVIIFCGSLVLGSGIRGLSTLTILDLNRKQLIEKRQEKLEKILLIFNQICSEALPQAARQAIYNDMIKNETSANQEYSSMVKSTIRHVSYIIPSDIKQK

SEQ ID NO: 82686 - protein, 408 aa, Enterobacter sp. MGH 25
MLCSIDKIDIPVRFSSKRAEIDLYGKSLIITGNNGCGKTSFITQIFEHLNKAINNHNENDLDYLKNQLNWYNSQLTIIGRDDNVYSTYLAEKNRLEKRIEELLSFNIITTSNDITEIRSLLRFHDATRQSKIVSPTEVPKHSSLIKNNQHFGNDIDGSNIFESYLLSLKKNQSYAISFDKNEEKALGIKSWFVKIENDLRSLFEDPKLTLEFNTSDEKFYLIQDGKEKYTFQNLSSGFSSILSIYTDLVMRVEMWGVTPENIQGIIFIDEIDAHLHVSLQKQILRFFMKAFPKVQFIVTTHSPFVVTSVTDAVIYDLSSNEQIIDVSSYSYGIVMEELFGVATESHALTDKLRNIESLIKNINHSNIEEIDNEISSLAVDQSNMSEDAQAFLDRAKLELLKSKKRIQG

SEQ ID NO: 82687 - protein, 217 aa, Enterobacter sp. MGH 25
MFNVNRILPAPASLAAQRRYDGEDVYIALEQSFYKKCYICETKSPLDINVEHFIPHMGDINKKFDWSNLYLVCSRCNNIKLAKYKNLLDCCNDSVWDKVKLLPGFSPGAKNFFIEAMVHDAATIETADLLNEVYNNDKTINKRFTARSLRSDVVKITHRLTKLMTIYYDENSTDAQRENSIEDIKVMIRRSYQYSAFNRWIIKDDAELDELLSPFMD

SEQ ID NO: 82688 - protein, 391 aa, Enterobacter sp. MGH 23
MKFESTSLVNIITGNNGSGKSSILAEISKQEYVTGKNVICLSNTSTNKFPKIKSHRFHVLNQSSNTLTKALKKVVVSNSHDMIGSSHAHIFPRVLAYLDFNEQLTFKFTIFPYESFIRKFQSEMYNNELIGSDIDEITNHLRNLIEINDDTANFTDHGVKSSHILYLEYAFTYESEKRINTIHNRLIELMLKHERILKKNHLIHDIEITLGRGHSIIPSSHLSSGEACYMATLAFILTYISDNSVIIIDEPENSLHPRWQKKYTSNLLDLLYYFDMRIILATHSPMIVIGAVEDHSGLSVFKSENSTLYPLEGNETNIDEVMVDVFGVLTSRSRYFSYKINEILNDYNNKKIDINSARDKLDKTKSLGPDESQVKIIEAANEILNQMVKNA

SEQ ID NO: 82689 - protein, 198 aa, Enterobacter sp. MGH 23
MPNFTFTAENISHIRTAISENKFDDKVKVWEHELLKSMRRELKQYILSNRNDGIKCAYCLKDFYNEHNMNIDVEHILPKSQYPEYTFTLKNLAVACKRCNLLIKRNDVSFLNPNFIRKKPFNSKYYKIFHPVIDRKNHLSLLDVHFNGCHIIKYQTNSEKANNTYIYFKLNEVEIETLNNAQGIEQIIDLLHTYNLRN

SEQ ID NO: 82690 - protein, 412 aa, Enterobacter sp. MGH 22
MSKFLNSISRSSEIKSENDNIDVSNKNLIITGGNGCGKTTLLNDIYNKLSTHLIQRNHQPKSQVENNIKFLLNQKENAVKGSQEYHQASQQLRYHQAELERVWGGIQLEFEDANKLSLLLSEGKGVIAFFRADRQASIQAATGANKIISTDESNYLSISNQELGNTFEQHLANLKTRQSFAKTHDNNLKLFNSIENWFSELEKNIAYLMEDTTFELKFNPDEFKFFLTQEGKKPYTFQTLSSGYSSIFNIISDLIMKTEAFKISPSELQGIVMIDEIDAHLHVSLQRKILPFLTKTYPSIQFIVTTHSPFVIGSLEDSIIYDLSSKQHFKDLSSYSYETIIEGLLGVPVVSVSLEKDIKRLSLLINEDNPDIEAIDEIVQKLLPYRDKLDDESAIFLIKGMNLLKCKARGDK

SEQ ID NO: 82691 - protein, 218 aa, Enterobacter sp. MGH 22
MFPVSKNSVAPISLERRTSYSEKDVIETLSKDFHNKCYICEVKDPLVLNVEHFKPHEGDKNKKYDWNNLFFACGRCNNIKRNHFENILDCTDPSVDVLRSIKHVFPTTAYAEHVDIVPMNDDPKTIETATLISKVFNDDHTGNKDLTRIYLKKRLMRQYRKFLDLVFNYDDDDTLPEEKEIIGRKIKNMLRVEYEFSAFLRWAILDAPLLHHFKNDVF

SEQ ID NO: 82692 - protein, 408 aa, Salmonella enterica; identical to SEQ ID NO: 82628
  subsp. enterica serovar Poona str. ATCC BAA-1673

SEQ ID NO: 82693 - protein, 222 aa, Salmonella enterica; identical to SEQ ID NO: 82629
  subsp. enterica serovar Poona str. ATCC BAA-1673

SEQ ID NO: 82694 - protein, 432 aa, uncultured Thiohalocapsa sp. PB-PSB1
MHIDRLKLEQFRGARELSLNLDASLNVFVGMNGAGKSSVLDASAILLTWLVNRIRSSSASGRQILESDIQGTAGFSCLEIAVTARDRSYSWSLCKMRPGGNGYLLNKQPPPRSTLLAATELAGQMQADISEGQEGVDLPLFVYYPVNRAVLDIPLRIRKKHQFSLLAAYQDALTSGANFRTFFEWFRETEDLENEQKIDLDNVGAPQGAIRYQDPQLKAVRTALSQFMPEFVNWRVRRNPLRMEVDKSGKRLTVNQLSDGEKCLMAMIGDLARRLAIANPVRDNPLEGEGVILIDEIDLHLHPKWQRMLFPRLTEVFPNCQFLISTHSPHVITQVEPKNLFLLTMDDNGLSALRPAESYGKTVERVLEDLMGLETTRPDEVKQALRDIYQQIDTGALAAAREAIADLEQRIGDDPELTKAGVLIKRKELIGK

SEQ ID NO: 82695 - protein, 163 aa, uncultured Thiohalocapsa sp. PB-PSB1
MKYIQKRQEPQAFADWKAQENNNWQPTYKALSGPPKAALKQALMAEQGEICCYCERRLTWDDSHIEHFRPQHDDLVDPLDYGNLLCSCQNRIQKGEPRHCGNLKDKWFDDALLISPLDPACQARFRFSGDGEIKPLTDTDAVAETTIAKLGLDIPKLNALRAP

SEQ ID NO: 82696 - protein, 438 aa, uncultured Thiohalocapsa sp. PB-PSB1
MSETNQAVYLSSVSVANLACFGPRQTLDLTVADGQPARWTLILGDNGTGKTTLLQAIAGLTPVAKGNQSSPWIVNWPPAFSLMRGQSKDALTIMATFLIGPRLHAQSVARKGFAASIAIDPPGSPSDFIVRNAGRYQQINNFLCYGYGATRRPGAARLGWRELLEFESATLFDDQEQLISPGEWLLRMDYAAAKQAAGDDSEYGARKERVKKLLIRILPDVEAVDIQIHDGPGAEVFFKTAYGKVPFERMGLGYRTMTAWVIDLAARMFRCWPDAEDPLSEPAVVLVDEIDLHLHPSWQRHLMGWLSELFPNTQFVATAHSPLMVQAAQDARIAVLKREGDHAVVDQSFSSVTGWRVDQLLTSDLFGLPTARAARYDEIIAERTALLSKSALSDADEQRVIELDAHMAALPAGENAVDIEAMDIIRRAADALKRGGDG

SEQ ID NO: 82697 - protein, 186 aa, uncultured Thiohalocapsa sp. PB-PSB1
MSHIAYGDVEHFRPKGGFRQHQDDALGRPGYYWLAYEWENLLFSCQLCNQRFKKNLFPLADPALRARNHKDTLGRETPLLVDPSNEDPSQSIGFRAEVAYGLDRAGRGERTLRALGLNRIELVESRRDYLKDLQAFRQIVSLAEAKPDNAPLQQAAQAAEQRLMRAVQDSAAYAGMARSMMAADGS

SEQ ID NO: 82698 - protein, 381 aa, Enterobacter cloacae S611
MRIKCESFSGVVWDRTEKRDKSKKTLNVIPPAVGLKALNEHVDTFINAHNEGEHYTLPVFIYYGTGRGVFDVPMRKRDFKSTFTRFEALDGALESRTNFRRFVQYFYGLEERESRLQREQRSFDIELPELSAIRLAIKRLMPQFSNIRSVEPAGIMVDWEKQYVAHDSDADSQIKLTPLPESSNIKKSEIHQLKIEQLSDGYRTTLAMVMDIAARLAEANPFSSDPLACEGIILIDEVDLHLHPEWQREFMPRLVDVFPNLQFIVSTHSPFILQSVKEGELIDLDQFNVNHTPDLGKEMSVEDIAQEWMGMDNVQRSALFNRQVEAARRYYALLNSGKSESDPQVAALSEELDRLETYFGDNPVYVALLRAERRKRIKEAK

SEQ ID NO: 82699 - protein, 204 aa, Enterobacter cloacae S611
MRPVERPAYTGPAVTHYQAYLQPLIEAFGTYCSYCERLDKFDVEHVAPKSLNPALATTWSNMLLGCPRCNRDFKRSNNNSRLNYVWPDTHNTYKLLKYWPDGRVQPASGLDEDMHEYVVNTINLVCLDDSAQPQNHLNLARRAAFNVAELFLAHYENETMSIDDVLTGATQGHWSVWFTVFQAHPQVLAALETLHPNTAIHRPY

SEQ ID NO: 82700 - protein, 503 aa, Shinella sp. DD12
MYAIDDFQLLEARTSQVQLDTPWRSKRHYFDPNVRFIDRSHQLTSGASEHITALIGKNGTGKSHLLSSIVQTFVLIEQIQRKKKRSIRDVPLEHLSYRIDGKHCVVQWFDSPRRLECSVDGVAVDVRWLPIPKRVVALTISPFDKFPVPRSVRNSIKPAEPSIYEYLGLRDQFGKASMESLLFRSLNNLFEESENEPLRRINIGSVFEFLGLEPFLTVIYRIRISPDLQKRLQSGFRGDILTYLNRSDGRNVEEFLRGDMDLTTLTSLLALAVEKSEDGFVRTTADFRHGGNLDDAFRALQPLRRAGLLRLSNVEVKQVNGPYSNLRRASSGQLSMISALLALASVIDNASLVLIDEPELSLHPEWQVDYVNLLSKTFARFKGCHFVVATHSPMVVSQLPKHANLITLDQPSLPPSEKISGQSADYLLAEVFGAPMPGNLYIRERVVEALGLIAEGQANSRAFQTVLADLAKIVDVVRPEDPIKSIIGDISEVARVAGTKALK

SEQ ID NO: 82701 - protein, 212 aa, Shinella sp. DD12
MRPVQYSRASQAIVDAFEARSGDQQVGSYWGDDEASEVRKEIKDHYISEQKRRCCYCTVLIPTDHNGVWDGEHVISRHGAARFMFKPENLAISCKDCNGAKREKEVRRNTARVSFPDKSEHYLIVHPHFDEYPEHIRWVGNVVYPTSRKGIATVAMCDLHRYGLNEAGASVVPTHHAMDHQIGVLLNPQADLTEMKLAIAAAKSYLETVSQE

SEQ ID NO: 82702 - protein, 465 aa, Escherichia coli CE418; identical to SEQ ID NO: 81096

SEQ ID NO: 82703 - protein, 243 aa, Escherichia coli CE418
MRHVIKTQRGTVALLTAHENPPQDADQSTRRWRNFRRDKAAVMVQLINEQYHLCCYSEIRSDLRGLGYHIEHVENKSQHPERTFDYQNLAASALDSGENGGLSSLKGKNAFGGHAQGKQDVVDMAKFIHCHIRDCSRYFAYLSDGRIVPADELNAQETENAQYTIDLLNLNSGFLQTERRNHWEELEQLFDEHIEKDWDLQQLLQLDLVPTPDHKLHEFFSITRQFFQQEAEQVLQSHAPALI

SEQ ID NO: 82704 - protein, 474 aa, Proteus hauseri ZMd44
MKIDKVIIKNFRCFEQLEVTFHPQMTVLIAPNGAGKTTILDAVRIALWPFVKGFDLGSQTGKAATIQIDDVRLRRLDQNMEPALPSEIEAFSNQKDDILPASWLQFREKVTPKTGTKGDKLTTVLTNIAKKYQSEIYKSSKIAKESLTQENTNLPLIVYLGTGRLWYQGRYSSETQDKKLDNSVHSRFWGYQNCLTATSSYKQFLTWYSWVYRSHRELQITQLESQLTPQDEVAQKKFSAAINVVQTSINKLTQKLTGWHDLQYRASMGQQLVMLHPEQGYIPLSLLSDGLRNMVAMISDIAFRCIKLNPHLGEMAAVKTSGIVLIDEVDMFLHPTWQQTVLSSLMEAFPNIQFIVTTHSPQVISTVHSDCIRVIGEDHKGEAIASKPLANTYGNPSNQVLESVMHVDPQPPIKEKEMLNKLTELIDQGESHTDLVQSLLNELTCLLGKSHPQLQRLQRSIRRQKHFSDLEGKQ

SEQ ID NO: 82705 - protein, 237 aa, Proteus hauseri ZMd44
MRFIKQSPLNVYGLTQANENPPTIQAESTSRWSSFGYKTEVLQKLCRQQCQLCCYSEVRADKLGLEYHIEHIENKSQNPTRTFDESNLAASVFSSDCLKKLQKEDIFGGHTLAKQTSVDITRFVSCYQNDCEHYFAFLSDGRIVPKKNLDPNKKDKAEYTINLLNLNCHFLINLRKQHWDDLDELYEEHLEKNWDLEQLCYLELVSCDNQNGLSPFYSLTKQFFGKVADKVIQQQIN

SEQ ID NO: 82706 - protein, 439 aa, Mesorhizobium sp. L103C131B0
MFGKHAGEIMFLETLRIQNIRSIADIAVDFADRSVSEPAVRKWSLLVGQNGTGKSTILKAAALLLAGSDALPDLVRDPKEWVRNGESAGRISGRLRTQDWEPRDISLDIVSADGRSDILKRNDAGLAALDQALSHASQNYFTAAYGPYRRVSDDSRALSTGQLPRANCLTTLFDKNAVVYPLATWAMSLDYQLGEDGLGIVRKALDDLLPGIQFSGIDKGQGRLLFQTDDGIVPLDQLSDGFQNVAAWIGDLLYRITEAFAHRRDPLKARGLLLIDEIDAHLHPAWQRRLREFLTTTLPNFQIVATTHSALTLQQAKQDETIILSRDANRRVLAAPFPGDPSKLRLHQLYDLAFRISSLDSWEIEQNKEIYRDLSAKPAAALTPEEVSALESARQTLELVPESKVDGLGNEALESYFTKLSSAVDALERSAPGQVRAVE

SEQ ID NO: 82707 - protein, 277 aa, Mesorhizobium sp. L103C131B0
MIQLSRDRAAVPTAFLEPGCRANLLELYRAARDNQLDLKAVKDKLFSSSRWGIAKQQLAVESAGKCAFCESPTSAAYYGDVEHFRPKAIYWWLAYCYDNYLYSCRICNGKKSDKHLLSGKTAAGPVVLPDMNDTSLLALAATASPQPSDVERITALAAQLLGESPWLPHPYDEDGETIFTWKEDEVLREVRIAARPGTARAALALQAVEQILDLNRSELLTARWQVYTQMKRLNDLAGLGDAVVRAIAITGIKEAMNGRYPYSGMVRYYGRERWNLI

SEQ ID NO: 82708 - protein, 389 aa, Mesorhizobium sp. L2C054A000
MHIKSIVIEDIGGIRHLSINFSPGMNVLCGPNGIGKTTILECVAHSFTTTQSQILKRNAQASEGSVSIRLDIDETETNHKFTLNEFSPVKNSSVTGLHNFANKLLSLKVTRSLNYMQIDAIRTDLERPVHIMYEEAKNGINTYEFKNWFVNRHMWSKHENSLTEQQMSNYHLAVKSFSILDKDYQFSRILADSNEIMLNSPRGEIFYEYLSSGFKSTLSVIFGIIKEIEFRFKDPHVKAEDFDGVILIDELELHLHPDWQARIPNVLRSLFPKCQFIATTHSPHIIQAADPNEIIALEGSDGHTVQRQLPNAEFGFKGWTIEEVLSDVMGMSDTRTKQFDENLAEFNAAIDGTDAERAEQAFSKLNKMIHPANQLRKLLRLQLASIRID

SEQ ID NO: 82709 - protein, 244 aa, Mesorhizobium sp. L2C054A000
MIRLTRSEKPTYLSDSKVKELTDEFKATGNSVWRNRQIVEPLLASSFGKCAYCECRLTEESKYVEVEHFLNKNDFPDLVVKWINLLPACKRCNASKSTHDVGTSPIINPYEDTPKNHVTMRFYRMVGLDEKGDTTIDVVSLNDTDRATTKRFQIGEQLHSNIADIGDKLEKFISEETVIRRNKLVSAVRNLLRECQRKAEYAATAATIVVNDQKFLKVLAAMQGMGLWSAELSALHEEANDIAL

SEQ ID NO: 82710 - protein, 803 aa, Mesorhizobium sp. L2C054A000
MLTSSGVWYMFYFDHKTRYEESAGEFHELVATGYESVARYYEINAAERVQMDVPPVWKRSLDSRVLRLLQALSYGRCPFCERANVALQPYRFRPPAYAEPISKPEEKASYLWLAFHWDNFFPICDDCVPRRKNFFPVSADRAPNPASTSTSDDLKSLATLERPLLLYPGELENPQTAFIAQLDGTLVGRTKRAAATIKHFGLNRTELVAERSAATERLLVELETRRKVDDAPATPFTHREFGGFLYLVLRRVAWEFGRQARSTLPVSQATIQASFHRWMERSDYRTTLHEALRALREAGLAAGSRSPGTGAWEPPEIGGRLEGVTITNFKSLANIGIKLPPAPDVSNDPLLTLTGDEDDARRLSQGFLILGENAAGKSSLLEAIALAAMPSDQANNVIERSDRELIPLDPRYMESLAPQPQGPQRRSAEVHLVFEGGQQRSISIDPQRGEIELQADNVFQPVVFAYGARRLFGSPRRRGAIRHVDTLFKRDAQISNPEPWLIDLWKRDRDALSEVVSALRHIIQIEGRFEDIDVEVDASGLEHCMIKLKKQRSNGEEFIMLQRLDAASSGYRAILALVCDVLQGLMKSERSSSRPGKRRASRLDHARAARRLSAIVLVDEIEAHLHPRWKLSIMTGLRRALPNANFIVTSHDPLCLRGMRNGEVGMLNRYLLPDREAEAVELVANFTNFENLTIEQLLTSNLFQLFSTDHQRTDSALAKAASILSRNPPSSNPLSGPAEAAIDAFNDEIASALPYGRSEVTQLVQEAVAEYLAERRTEGSHRSEDLRRRAKKQVLDYLRGGVG

SEQ ID NO: 82711 - protein, 346 aa, Mesorhizobium sp. L2C054A000
MRRVDRASVAEPAILQKPFKDGRTEFDRAAAHYAGGSAGSYEFARYSDASVKQALETLFHGKCAYCESAYSNVHPVDVEHYRPKSAVEGVRNHRGYWWLGMQWDNLLPSCIDCNRRRDQKVPVPTEATAEPFFMPGAMDPSQSLLAGKATLFPLARESFRATEIDRNIDSEERLLLDPTRDDPRLHLRFYVDRSRLVGLVYPAGETAILPNPQVNLSDLALAAARAGVSAMGAVSIQVYGLNRLGLVQARTRHLRDLEFLYKLSVELAELSAEFGEAIAMRKARLAKLPAARAKTAGKDIETDEKVCKRLEEFATEIRSKLKELMDPKAPYSELSGAWLRVLLRDA

SEQ ID NO: 82712 - protein, 397 aa, Mesorhizobium sp. LSJC265A00
MNVLLGINGAGKSTMLDAIALAAMSPVVSESSGFRPYALIRRVASGDAPKTASIDAEIVVHPQDIVEAPKKRVEVIREIGATVERRGDLEVLKAVQHPDPLWEGMFKDQSPAFLMVGYGATRRVETNAQVDEALRSRTRVLRYERIASLFEDHFTLRPLSSWLPDWQTKNPGRYKQVVTLINKLSLKHIKFTGRIERGEYLFEVGKNLVPFSAMSDGFKAFIGWIGDLLYHVCMGCPSGKRLVDNKGVVLVDEIDLHIHPEWQQTMIPVLALALPNLQFIFTSHSPLVVGSLERANIIHVETGANGTARMARPDEEMYGKTADQILRSDMFGLNSTRAPEFRAQLDKLAEAATGGDREAALDFMRQAARGSGATEAARSDERREMPSWLKPPSMAEK

SEQ ID NO: 82713 - protein, 299 aa, Mesorhizobium sp. LSJC265A00
MIRYADATLENVWALVDAEKPTWRSDAETRTAAIVAAGAFSKGAPSWSDIKAIFMRLQSNKCAFCEFPLGGEFAGKATQDVEHFRPKNAVKAWPHKTKKPSYPFSTGGTGSGYYWLAYDLSNYAAACKACNTARKSNYFPIAGARGAAASTAAELNAIERPYLVFPLGETDEDPESLITFAGLIALPAHDADGHAHRRGRVTIDFFALNQREELWEDRFRTIYALFDAVEITKTSANRARIEIARRRIEDMTSTAGAQAACARSFLRLLETDPQKAWDFYVAAEEFITHNRKKRAPKLS

SEQ ID NO: 82714 - protein, 742 aa, Mesorhizobium sp. LSJC265A00
MKTVIKVDRDSVPFPEVLRRGRGGAADEEFQKASAFYSEFDKKRQHSRFEFKLYRHKTVRDALAKLFNGKCAYCESQIAAIGYGDVDNFRPKGGVLDAGSTYLPLHYWWLTNEWTNLYLSCSMCSRAKGGRFPLEDEKDRAPVLASASELLKECPLLLDPCVDDVENILLFSSNGTVSCNDPRGLTTIEILSLNRAELVKARQQTARAVLSQLEVLSLSEGSPDGPQINTEIVNRLKEMMSPEAPYASMCRQLVSQAIAAKPNGMVALAFANDPLAASVKAFTSGEERAAQTALNKFQADQESYSLEAETEQTVAAYVSTRDRLIESVRIKNLRAIANLDLNVIDGSERAPWLMLLGENATGKSTVLHSIALALVGERYRGKLVDALHLDVPRMVRNGADFGEVSIRLTGATEPRTLRIQADGTITATGREAQLMLLAYGSTRLLPRKPNSEVQGTNYARVENLFDPFIPLVDAQQWLLTAPAEAFDYAAGAIKKALTVDVERELVRQDGEVGIIERGGLIPLPRLCDGYQTVIALIADILSVVLPAWKTPDLAQGLVLIDEVGNHLHPSWKLRFVESVRSILPGMQVIATTHEPLCLRGLHHGEVAVLQRGPRGGIHMRADLPAIDGMRVDQILMSEHFGLQSTLDPSLQSLFDEYYALLREDNPSPDDRQRMETLRNDINQKQKLGVNERERRMLEAIDRFLARRIEVPDQIELAEREQSLDAELSSIWSEALVRVEGAA

SEQ ID NO: 82715 - protein, 356 aa, Mesorhizobium sp. LSJC265A00
MIPVVRDQAVAACAALNKIGSNGLTELEHALWFFGGIAPQKNPLPPKPTKPPAFSVYKEEPVRDALRALFGTRCAYCESNYPHLAQMEVEHYRPKGGYIDEHGVLKKPGYYWLAASWVNLLPSCIDCNRERKQHHRSRDGKIVKSKSGKANRFPILPGTSYATTPAAVALERPMLLNPCEDQPHLHLQFFADGFLQPALTAEEGAAGRGRSTIDVCGLARDALVGVRREWALRTKGAMEAVLRADRNRRVYPHDPVMAAQLTDAETNLHTFVDGEAPYHAMTAAMMAAFVEVRSLLEPYFTALEAWKANQSVGNRQALLERATAIQQLRRDARFDEQLVNFLLDKAGVSEAPPGKT

SEQ ID NO: 82716 - protein, 772 aa, Mesorhizobium sp. LNHC209A00
MQRIDRPEQAPLVLRSRVADDARRRMREFWALERQRRAQTSVPAPSIQANDEQLVEAVSVLTGGRCAFCEASDNLLVHRFRPAGNALPLPSSSNAHLYYLWLVDAWQNLYPICRGCVPLEPQFPVVASRAPLPVLRQIDVYVKNANGLWPSFPPRENILLLDPCRDREFEKHLLPKLDGELIGESKKGETTVLVFNLNRSDRRNQRYHAYQMLIERLTRLIASPGVQSEHPDWQQLFDFPAMEFGGTWFLLLRRLARWIGGSSGVRVRSSRTQIRVFFLRMASEPDAKQRLGSALEAIAREDNGLRAGRWVVGSVYSVRAPIASVQITNFKAIEQLELTFAKPFEPLEGLSYRRAPSLIILGENATGKSSILEAIALAVTTPAARTALDVLWSRLVLDPSQLGQERTRGGQRRAKVQVALATGQSVSLAIEQGAAVVQSELGNQQVPVFAYGAFRRFLTATRRPAPHKHIRNLFDGSTLSNPEPWLKSLPEDRFNMVIRTLRDLLSIEGDFDVIQRERGTRQLRMVTSIAEPNGQFRYSRAPLQSVSSGYRSMLAMLCDIMRGLLDPQVYEGFESFQTAQGVVLIDEIEAHLHPRWKVQVMTSLRTALPGMSFIVTTHDPLCLRGMGEGEVVVLQRVAATDSTRETQMPIVVERVEGLPAVADLRIEQLLTSDFFQLLSSDDAASDRRLAQIGDLIRAKAEGERLTDSDQQILRQFETDIAKALPVGSSEVHRIVQEAVAEYLQRRRIASSVTLKRLRDKAKAEILAALEAL

SEQ ID NO: 82717 - protein, 309 aa, Mesorhizobium sp. LNHC209A00
MRRVNRSAVDTPKSLLPGAAGEEELEAARAHRNNPDPKKKAFKYRVYKRADIQAALEVLFHGKCAYCETSYAASAPVDVEHYRPKGAVAEDEAHGGYWWIAMDWENLLPSCIDCNRRRGQKLFVVSESLAASAANAKPVAGQAGKKDSFPLAVTGVRAVYQATDFTGERALLIDPCRDDPKASLMYSFDPAHPAGLIVPKGDPGQKVRGATSIQIYGLNRLKLVQDRTRLLRRLEFLGDFVLELAASIEDLEAPQVVAAIAGTPAEGVTSKLRLLRDRTLAELKAAADDREAYSSMAGAWLEQFKARFL

SEQ ID NO: 82718 - protein, 445 aa, Porphyromonas gingivalis SJD2; identical to SEQ ID NO: 80880

SEQ ID NO: 82719 - protein, 199 aa, Porphyromonas gingivalis SJD2
MRKIIKGREPDAWLKYRCTPGAVYQRKPALADSLLLEQGYVCAYCEKRIDVQDLRVEHIKPRSQYPDQQLSYSNMVACCSGQSQGSAHCDCSKKDEEITLNLFTDALFLSISYEHDGTISSANKSWNDDINITLNLNCLSLKENRKLALEGLLEIIKKEGYRKGVLKRLKARYEAKDKGHKFAEYRGIILYYIDKKLSP

SEQ ID NO: 82720 - protein, 545 aa, Streptomyces albulus PD-1; identical to SEQ ID NO: 82098

SEQ ID NO: 82721 - protein, 369 aa, Streptomyces albulus PD-1; identical to SEQ ID NO: 82099

SEQ ID NO: 82722 - protein, 436 aa, Asaia sp. SF2.1
MYVSSLSIRNIRAISDFRFEVKPAECAGWHVILGDNASGKSSLIKSLAIIFAGGPKVSASRQIWEDWLSQGSSTGEIAVVINRNEPFDQYALRGRQPKTFTMRATIERKQMDLTPGTRAEVTILFSSQNSRTAERTIWANGNGWFSSSFGPFRRFSGGDRDWERLFVSPEYRRIAAHLSAFGEDVAFTEALYWLQQLKVTSLESPSSKDGQILEAVKNFVNSSQLLPHNSQIADITTKAITLKDAAGASVNVDQMSDGYRSVLSLTFELLRQMFLSFGEDIMLKALTVNPGTVEVPGVVAIDEIDAHLHPTWQTRIGDWFVDHFPKIQFVITTHSPLVCRAARRGSIWRLPTPGSNGNAVRVQGQELDRLVKGNILEAYGTDYFGKDVDVPEASKVAEQNIARLSMLKVQGRISPEQDEILRSLQAARPTVASKID

SEQ ID NO: 82723 - protein, 264 aa, Asaia sp. SF2.1
MLTTAVCELVDQDKMALRTKQDEIDRVLDFKTRVGLAKQLFNDKSRVLFSRVRAALAVASGDLVRCGYCEDSCADEVEHVWPKNFYPGRTFDHSNYMFVCGICNPAKNDKFSVRCEGEWLDLPTQRKVVGFVDPLSTESRFIDPLSEDPLDFLWLDILAGTFMIVPIHDPGTLEYERADYTINVLRLNKEDLVEARKNAYTGFCDRMHRYVDCKLSGEGQPQLDHRLLELRRAPHQTVRKEMQRQSGVLDAPHPAIESALEVFS

SEQ ID NO: 82724 - protein, 465 aa, Escherichia coli LAU-EC6; identical to SEQ ID NO: 81190

SEQ ID NO: 82725 - protein, 243 aa, Escherichia coli LAU-EC6; identical to SEQ ID NO: 81097

SEQ ID NO: 82726 - protein, 452 aa, Escherichia coli LAU-EC9; identical to SEQ ID NO: 82562

SEQ ID NO: 82727 - protein, 219 aa, Escherichia coli LAU-EC9; identical to SEQ ID NO: 82563

SEQ ID NO: 82728 - protein, 452 aa, Escherichia coli LAU-EC8; identical to SEQ ID NO: 82562

SEQ ID NO: 82729 - protein, 219 aa, Escherichia coli LAU-EC8; identical to SEQ ID NO: 82563

SEQ ID NO: 82730 - protein, 465 aa, Escherichia coli HVH 23 (4-6066488); identical to SEQ ID NO: 81096

SEQ ID NO: 82731 - protein, 243 aa, Escherichia coli HVH 23 (4-6066488); identical to SEQ ID NO: 81097

SEQ ID NO: 82732 - protein, 781 aa, Pseudomonas sp. TKP
MQFFERSAEPPPKFFRGSVASGARHRLLQFFELDPVERAQTRFSDHALDLKDGTVFDGLGRLFRGKCAFCETRGETFPYRFRPSASATPEAKNSHLYYSWLANAWENIYPICHRCVPRQSEFFPVTGNRVRLPDIDDIQWYVDEDLGSWRGYPIAERQLLIDPCRNERFYDYFFISITGMLQKQGARGALTIEHFKLNREYLVEKRRIRLGEYRRLLLTPDTTERLVVVEGNFPIFDFSNLEFGGLWYLQCRMIVQHLSRALKKKVDVSRTKVGHSFRALSLHKGFDEYREILQSWIETGDFGRYPSIAITQPERVEPTSMSDEQLPVTPSVYPSLLSIELTHFKAIDYLKLQLTLPSADSVLSSEPMHSAMLILGENATGKSSILEATALALSDRKTRKALGLKASDLVLDSTQLGAKNQDGMLSAQIRLGFDEGPDTVLEINKAGWKPQTSFLRPPVFAYGAFRQYQKNSDKFKLGHSVFNLFNSNRLLPDPEPWLLALKDDDLNEVTRALRFIMTVEENIQVIEKSEDELRCFIVTVQGGVKVKTPLTQVSSGYRSVLAMVCDIMRRLMDRSTNPHYQSLENARAIVLIDEVEAHLHPRWKIQIMGALRMALPKVTFIATSHDPLCVRGMRNGEVIVVHRTTTTSDGEGGDTEQRALVEQLQHLPDISQLTIEQLLTSDFFNVASTDQPVMNLKMAKLADLLSASYRGELSDPEDQQLVARFKQEINDVLPVGTTRGQQVVQEAVARFLQARTTASSEQLKALDEAAKREILDLLEGF

SEQ ID NO: 82733 - protein, 366 aa, Pseudomonas sp. TKP
MRYVDRSQYSTPKVMVAVLGHRSEAELELVKVEAYIKEKARIRALNEQNKAQAKLAGLKPPATVAKPPSPFQLYGHDSVRARLNEMFHRKCAYCESLYYATSAMEVEHYRPKESVQGEADHEGYWWLGAAWDNLLPSCIYCNQRRSQSLPRASGKPVVLLEHKGQFEDPRSAFTGKGTHFPVLGARVTDRTGDSSKELPLLLNPCLDQPKDHLDYYIDFKNIIGLMLARPNVGAIPSSIGLDPKTREEFRDELALTLRHNLDLRGSVSILIYGLNRLGLVQDRTRVLRQLMFMESQVVEITTFIKKLKLRASKPAYDYADEDKLIEQGLKHLRDRTVQQMKSMAKPQAPYSMMVRAYLECFTARLN

SEQ ID NO: 82734 - protein, 403 aa, Veillonella sp. DORA_B_18_19_23
MKLKRLELNNIGGIKHLSLELNSHINVICGMNGIGKSTILKSILSSIPATRTRVKPNVDSNNGEIIFTYDDSKRFIVNISNKSPSDYDLINNNNEFYTPGEIIFFDTERNIEYKKLKQIELEPELFYSRDNSDRGYEFSLGVKLENIKDWFLMLALHAESIHEHLSSYQSDYFDAAIAALNILSSGELHYKCIDYSTNEILLKDVHYNSPIIFEYLSSGYKSCIYIIWGIIKEIKERFDITLNKSDHGKHNIKEFDGIVIIDEIDLHLHPVWQKEIVGILSKIFSNAQFIISTHSPSVLQNLDKSAIIPLTLNDQGIITINSLDLSDYGLQGWTFEEILIYVMGDNKLETDLYRNYIDEFVSSVKSKDKNHAKHCFNELKKMLHPSNPQLVLLEYQLKGVLND

SEQ ID NO: 82735 - protein, 250 aa, Veillonella sp. DORA_B_18_19_23
MIKLVRPLKPQQLDDETIRLLTEKFINNRKESVWNQPYIKDTLLESSYGKCCYCECKYDKGNLHIEHFHPKSLYPDEVVCWENLLLSCAKCNRAKGTLDTVNNKLVNPYDDDPKDYIGINKEYILIGVDQNGVGEFFINTIYKNGYVFKLALQYHTIYTQFQIDLEDLYNIYNARDIDENSDSLVFKLCNILEMVQSDKPYSGALSALVINNSNFIYLKNKIESSLSEDLISDFYYLYNEALNNALRFFP

SEQ ID NO: 82736 - protein, 445 aa, Photobacterium leiognathi lrivu.4.1
MSIRKIQINNFRSIKKLDVSITSKNKVLCFVGENGSSKTALMTTITEAIASHTKLEFPNYSIRSGKRLRLLSASEIMEGEKFYSIEIDYEKLKGAEHTFKKIVATNKTIDPSVYSDVIQGITLQNDSSKEISTLTKADAHDDFLFDSVFLFRPGERYEKDGMLIEKDGDWEGELSVARHIDLSMPYPYIVAHSGNDTQTTILDLFFDSQVGYEDARFGFSNILTILNKVTGKNFGRFQIAKSPYRQVFSSTLGELSSFSQGELDLLVTISTIVKQQSFFFDRYSDIERENLSINNLFHIPGIILIDEVDLHLHPKAQENYLKILTDIFPNIQFIVTTHSPFVIRGLPENSIVVQLPSGRKFENNFSAMNIDSITNIIFGHDGGFSEDTRSLLDKFKLHLVEEVPNRDELQRIYQQLSSSHSAKEELDLYLATFAKEELINIVRGV

SEQ ID NO: 82737 - protein, 276 aa, Photobacterium leiognathi lrivu.4.1
MRQVDRALVTFPERLKAQNITNVNKAQLIDHKKISGDVYRHQDVKDSLKELYFEKCYICDCDVTGNFKVEHYLPKKHFPQLGYTWDNLHKSCEGCNLAKEDNGFLVKDIKGTVIDINLLDPSNSTYKIADYMRFNITATVELVQIGNDPLIINKAKNTIKYLNGEYKNEYSKTLKYLRSDKANNFLRYYMTNLFKHKELIFTLRKLGIANYIEPIDHIERDMHIDLCQGLINLDNIYLGEAAPFSTCTRVYMTDALRMTYPDLLALKEKMRITLGI

SEQ ID NO: 82738 - protein, 424 aa, Pseudomonas sp. FH1
MRIDSIKLTNFRGALDLRLTLNERINVFAGVNGAGKSSVLDALALALSWAVSRIRHTTASGRPIAEPDITNGKSTATIELSCHSARGSVAWKLSKSRAGHASEDKSSFHELKEFIHDLQEQISQTQERCNLPLFVYYPVNRAVLDIPLRIKERHRFSPLSAYDDALTSGANFRTFFEWFREREDLENEHRKYRDDLVKPDDYCFPDRELEAVRRALACFMPDFTNLTVRRNPLRMEVEKLGKRLSVSQLSDGEKCMIALIGDLARRLAIANPTLDDPLQGQGVVLIDEVDLHLHPKWQRLMVPKLIEVFGQCQFILSTHSAHVITHVQPDCLYLLGQTEQGLQTEHPRESFGMSAERVLEDLMGLPTTRPESVETDLHALFLAIDKNELSEAKKKIDALRNDIGDDPDLARADVLIRRKEVIGR

SEQ ID NO: 82739 - protein, 215 aa, Pseudomonas sp. FH1
MRHISKQPEPQALFDWKAQANADWQPAYELLSGAPKLALKLALMVEQGFICCYCERRLHDDDAHIEHFRPQSDPACDALDYANLLCSCQNRIERGAPRHCGNLKEDWFDEQLLVSPLLEGCERQFAFAGDGSIRPANPDDQSAAITIEKLGLNIRKLQDLRKAAIEPFLDPELSDADLQLFTQAYLARDADNRLGEFCSTVAHLFGHVEQGVNGA

SEQ ID NO: 82740 - protein, 728 aa, Pseudomonas fluorescens FH5
MLRIFRPKAAPGFLRSPKVLEERRKILSYLRRDASERRQRRDNLNEDLFFDPGLRFELARVFHFKCAFCESPLNDDGHVLHMRPVRRVEGDAEDNWDYYLWLAFEWRNLFYACDVCIKCKGDRFPLENERADFLAAFTDVISHERALLIDPTAEDPGKNVFYSAGGLICPKTPKGAATIDVFTLNRPRLVEARHEAIQRVLHLLDGSLVSELHRSLDLSAPHSGAVINILQRILLIWRPDGRSSVGAEAKFADRFVELWENCTSEAKARLPLAIDEVRSGRLDPPKPPALDHGLHMETIRTPEWSLKSGDIASVHISNFKAIEQLNLKMPIRRPERAGAPALMILGENSSGKSSVLAAIALAAIGTHEAKKLKKYLPALAHSAALNRFDQLDQQVVNVKIDFHFHEQPAVFEYDPAHHQPEGFKDPALKILAYGPRRFFDTKKRYHKPGAAARVRTLFDPLATIPYPGDWLRAQTGARFDTIAAALRVILALGEDDELIIEPDHLAVRANGRVTPIDALSEGYRSVFVMTVDIIRELIDESQNLEKAEALVLIDELETHLHPRWKMQVMTSLRKVFPRVQFIVTTHDPLCLRGMDDGEVMVLQRDQSGRIQALEDLPNVRGMTAEQLLTSDYFGLASTTDPATEIKLASIAGDVAHTSDRGIVTVTPAAATSQLVGRLFVGDSPSEQVVQEALATYLERRESERGSIRPKLRAEAVEAIIEALTRAED

SEQ ID NO: 82741 - protein, 299 aa, Pseudomonas fluorescens FH5
MRYVDRTTVTAPPSLAGPSRPVQEEKTAAAVSYSTYDPTAKPRPKTYTFLQYKNDDVTISLRTLFHDKCAYCETDVGDDMDVEHFRPKGGVTGEDNHPGYWWLTHSWENLLPACTPCNQNRFQHIATENLTEEDLLALRARKPDQAHGKANQFPIAGVRAYFGGSLNDERHHLLDPMVDDPADYLKWSKSTYSIVLANTDDEWVKVRALSTISVFALNRLKLVQSRTRVLNLLRYQAERTLMELEEDIREGGSPRLIQRALNRVDEMRQSMAPGMPHTAMVSSFIEDFVIELRARIAGI

SEQ ID NO: 82742 - protein, 281 aa, Leisingera methylohalidivorans DSM 14336
MDRAFSAFKFAQNNYGTENRYHGETRRQLGDPLLPFKEILIGFAGFGSDNSDMKADPEVKGMFQAFQDILRKTLPREIGFKSLEVRRPELILKTDTGEFPIDGASGGLMSVMQVVWQIFLYTKSGKSHPTIVLDEPENHLHPSLQREFLRNLVTAFPLVQFVVATHSPFIVSSVREAHVYALRALPVLPKKNGPSEVKNSSSFRAEMIDLKEQAGPATQVLSEVLGVPITLPIWAEEDLVRIIRKYEERELSRDLLDEMKKELQTAGLGCLFPEALAGLAR

SEQ ID NO: 82743 - protein, 214 aa, Leisingera methylohalidivorans DSM 14336
MRKLSKGPKPQVLLDNEEQWKKELMDAIASGDKEEIAKKTKRYGHKDIKDALVAENYGKCAYCEAYVRHVSHGDIEHISPKSKAREKTFDWNNLTLACERCNQKKSDAEGVIDPHVDAPEDHLLFLAAVVRGRTTKGMRSIKPTRGLDLNRTELVERRGAQISRYADSFERIIQEQDEDKRSILVEALQDDLADPKTEYSAMLKALHQVFELNA

SEQ ID NO: 82744 - protein, 422 aa, Pseudomonas moraviensis R28-S
MRLDRLHIRNFRCYEDATFDFQPGFNLVVGVNGSGKTSLLQAIAVSFIEFGNAVKPSQISIKDEDIRFVIDRFENRSRFERQYPLLVQGTGVFFGATEWILKRDGDGFPPLVNSAFEAELVKLRQKINLAMPVDLPMLAFYRSNRRWQGAGVSAEFAAKQRLSRFDGYANWFDAVADLSDFESWLIGRTLERMQDLLDANQHSADFNDELVWVNSAIACAIPHAQNLRYDLRLQSLLIDIDQKTIPFNHLSDGQRGMIALFTDIARRMCILNPHMGKDALKNTSGVIIIDELDIHLHPAWQRSIVPALTAAFPNVQFIAASHSPQIIGSLKPEEVIVLHNGESSHPRVTYGLDSSSVLEEVMGVEQREPEIENLLSELFSTLENNDLQRAKSQLEALKKKAPDLPEFAGAEALLRRKEILGK

SEQ ID NO: 82745 - protein, 214 aa, Pseudomonas moraviensis R28-S
MKRVLKGTEPASFTDWKSSANDEWVPTYPVLQNPQKRELHAALLEEQGSLCCYCGREIEPATSHIEHFRPQEHFEALALDYENLFASCLRETRPGNPLHCGHRKGNWFEEALHISPMDEQCELRFRYLQNGGIQPADTEDLPTAKMIEVLALDIAYLNNRRRDTIRRLFDDEFIASVSNEDLERLVTVIRAAKASDQKPFDHIIARYAEQLLGR

SEQ ID NO: 82746 - protein, 452 aa, Escherichia coli IS5; identical to SEQ ID NO: 82562

SEQ ID NO: 82747 - protein, 219 aa, Escherichia coli IS5; identical to SEQ ID NO: 82563

SEQ ID NO: 82748 - protein, 274 aa, Acinetobacter baumannii UH12208
MSEGILSEQQEYLLHDLKALELGGANNSSSPLHPMYLKLKKSFEDQTSQQFNHNTNKLLEIINSVYRQIYQDFIRLELVNNDDGKDKVRMVLKDDSLFLHQLSDGQRVFLGMIGDIARRLILLNDSSDNPLMGQGIIIIDEVELHLHPKWQQKIIGVLRKCFPNIQFIVSTHSPQILGEVESKHLRILTLQDTREIKVTIPEQSYGLTSSEIVEELMGGNGRNQDIKKKIDHIFKLIDQENLVEAENKIEELQSELNGEIPELIEAKSLILMMK

SEQ ID NO: 82749 - protein, 213 aa, Acinetobacter baumannii UH12208
MLNITRLHEPSSLTIYRYQPDAKYDGPLFTTVKSDIREALVISQGYLCAYCMQRIYNDRSTTKIEHWQCQDTYSQRQLDFTNMFAVCLGTTQDQLHCDSSKGNKQITIDPASRSQLVESYIRYTNSGEIYVQNNELLNKELNIILNLNHSRIQNNRQAVLKAVTTQLSKYKGTVPKSELQSLLGKWSNIDAEGKKRPYSGVAIFYLKNKLSKA

SEQ ID NO: 82750 - protein, 274 aa, Acinetobacter baumannii UH16208; identical to SEQ ID NO: 82748

SEQ ID NO: 82751 - protein, 213 aa, Acinetobacter baumannii UH16208; identical to SEQ ID NO: 82749

SEQ ID NO: 82752 - protein, 274 aa, Acinetobacter baumannii UH19608; identical to SEQ ID NO: 82748

SEQ ID NO: 82753 - protein, 213 aa, Acinetobacter baumannii UH19608; identical to SEQ ID NO: 82749

SEQ ID NO: 82754 - protein, 274 aa, Acinetobacter baumannii UH22908; identical to SEQ ID NO: 82748

SEQ ID NO: 82755 - protein, 213 aa, Acinetobacter baumannii UH22908; identical to SEQ ID NO: 82749

SEQ ID NO: 82756 - protein, 514 aa, Acinetobacter baumannii UH6907
MENMLTHLVSNAYDQQFDSAYQLFMNYHQGLNKFHKNESEAEKFFNLAIKLYEKDLFLSNMEISNYKIITNLKINFDKELTIIIGNNGVGKTSILNAIRKHIMWIAASIRKDNASGGTISPDEINNKSSDNNNGAYIDCAFNIGSKNTVRGRIARVKDTSTIPLKSELTNYREIGQKIRDLNEYRDTNFPLFAFYGIDRLSSKKNLSSDLVFNKVDGYEESLNKVSNFNIFLEWLIQILKMSEGILSEQQEYLLHDLKALELGGANNSSSPLHPMYLKLKKSFEDQTSQQFNHNTNKLLEIINSVYRQIYQDFIRLELVNNDDGKDKVRMVLKDDSLFLHQLSDGQRVFLGMIGDIARRLILLNDSSDNPLMGQGIIIIDEVELHLHPKWQQKIIGVLRKCFPNIQFIVSTHSPQILGEVESKHLRILTLQDTREIKVTIPEQSYGLTSSEIVEELMGGNGRNQDIKKKIDHIFKLIDQENLVEAENKIEELQSELNGEIPELIEAKSLILMMK

SEQ ID NO: 82757 - protein, 213 aa, Acinetobacter baumannii UH6907; identical to SEQ ID NO: 82749

SEQ ID NO: 82758 - protein, 454 aa, Acinetobacter baumannii UH7607
MEISNYKIITNLKINFDKELTIIIGNNGVGKTSILNAIRKHIMWIAASIRKDNASGGTISPDEINNKSSDNNNGAYIDCAFNIGSKNTVRGRIARVKDTSTIPLKSELTNYREIGQKIRDLNEYRDTNFPLFAFYGIDRLSSKKNLSSDLVFNKVDGYEESLNKVSNFNIFLEWLIQILKMSEGILSEQQEYLLHDLKALELGGANNSSSPLHPMYLKLKKSFEDQTSQQFNHNTNKLLEIINSVYRQIYQDFIRLELVNNDDGKDKVRMVLKDDSLFLHQLSDGQRVFLGMIGDIARRLILLNDSSDNPLMGQGIIIIDEVELHLHPKWQQKIIGVLRKCFPNIQFIVSTHSPQILGEVESKHLRILTLQDTREIKVTIPEQSYGLTSSEIVEELMGGNGRNQDIKKKIDHIFKLIDQENLVEAENKIEELQSELNGEIPELIEAKSLILMMK

SEQ ID NO: 82759 - protein, 213 aa, Acinetobacter baumannii UH7607; identical to SEQ ID NO: 82749

SEQ ID NO: 82760 - protein, 514 aa, Acinetobacter baumannii UH7907; identical to SEQ ID NO: 82756

SEQ ID NO: 82761 - protein, 213 aa, Acinetobacter baumannii UH7907; identical to SEQ ID NO: 82749

SEQ ID NO: 82762 - protein, 461 aa, Candidatus Magnetoglobus multicellularis str. Araruama
MKLKTITIKNFRCFDQLTLDLHPELTVLIAPNGAGKTTLLDASRIAVWPFVKAFDLGSQTGKSATIQIDDVRKVMRENGNMEPVTPSKIIANGQWQDNSTFETWEQKREKLKPRTQSTYDTTAKSLMQFGESLQKEIRKESQSTPVNLPVVAYLGTGRIWYQGRHSSVVEDKPLDQSIYSRTWGYRDCLSMSSNYKQFEEWYGWIYRSFREQQIICLEKNIPLNGAALIFQDAIEVIKTAVNGTIQDDTGWHDIAYSASHQQQIVLTHPNHGEIPLSLLSDGLRNTVVMVAEIAFRCIKLNPHFGKEAARKTTGIVMIDEIDMFLHPAWQQTIIDSLRNVFPRVQFIITTHSPQVLSTIDSESIRIFKGSNVHHAPKGTKGAESSRILKRVLGVEVRPQNDKNTQLLNRYLELVYADKWLSDEAKVKRLQLDNIYADEEPALTEADLYIENREWEKEIEKN

SEQ ID NO: 82763 - protein, 206 aa, Candidatus Magnetoglobus multicellularis str. Araruama
MKKIKKTPGPNSLTNYEKEYPGANWSDFKNFNAGEDYQCIRNQVLKDQGGLCAYCETKIINLPPHKQRVEHFHAKSDRVTSNKNWALDWNNIFGVCIGGDDSDKKLHPLPENLSCDSHKNHLVNKKQLPEACEKFLVNPLTMIATPCLFDFHKATGELRPNIKTQKHASKENDYEVSEELLKQSIDILNLNCDRLKQQRLLILKKI

SEQ ID NO: 82764 - protein, 156 aa, Candidatus Magnetoglobus multicellularis str. Araruama
MYLSEAKNKIILIDEPELSLHPNWQNRIFKLYEVFAEKNNNQIILATHSPHIIASAGSESVKVLKIENGFVEVIEESNQSYGLEFSKILTDIMGVEHLRPPEIAEKFDEVKKLIISNESNSQRFKQLWDELEDLLGDNDLDLQLLKLDKMVKDKNA

SEQ ID NO: 82765 - protein, 209 aa, Candidatus Magnetoglobus multicellularis str. Araruama
MRKINKSTQPAYFTKAIKKISTPKQSSAWSCKEISSIRHQLRDHMLINEQLSLCVYCEKKINSDRRNSNIDHYKKRSLFPQLTLEYTNLVVSCNSEGRCSRHKDSQQRIAYHKVINPVKENPEDYFDYLIAGDIHPKKDLNKTDKAKAEYTIDVFNLNHIGLIQERKKVVYSIKSYQGQLELEDILKCFPYYPTFVKCIWEKLSATASS

SEQ ID NO: 82766 - protein, 533 aa, Candidatus Magnetoglobus multicellularis str. Araruama
MDFNPYKRVEVECEFDKSHIIETNIEKLDIGSILRVYCPYCGKWGNGTIKGFVNDKSESQLLQTVSTLKLSDREKFNVLTEDRKRSLTEDMKRSFFPKKPPVIKIQSIKLENIGIFKSLNLDFNSQCSVIIGPNGRGKTTILRAIILALIGYDKNLNNQADSLLAIKGRKDTKCEWESGKIQLSLDIDGEIFSNKVELKPDLKGEKIQVVAEPMPGIFDARGRHLKSLIIAFGQNRVSCVEKSKSPIEVKLPKIGDLLPLLNNDNENRLLSFASWVAQLDYKALKGSYSKKNLINKAFEIFSDIAGEKIEFDTVTSLDPLEIWVKTKDSRQGIPLELTSMGYQMLMSWVGYLLQRMYEANNGSIKFYESHCIVFIDEIDLFLHPIWQQKILSVLRKFFPNTQFIVTTHSPLVVDGLDRQQIIQLKYKEDTIVAESNPVDIWAWNYNDILERFFHTFQNFSEYEENILPQIKELQNISERTQEQEDELERLESILHRLENSRAATDEIFAIKQRLENEEQELFNLLQSYKKKAT

SEQ ID NO: 82767 - protein, 252 aa, Candidatus Magnetoglobus multicellularis str. Araruama
MHYVNHGTKPEKLKEYHSQFTQKWVDHYLKGRGGKPVDAHWTKDEIREPLIECFEDNCGYCGTSMGKRPSKSGKMIPIGQVDHFLPKSKCPEFVYYWENYIWSCTDCNKAKGDFYEQEMILYPGCKKDMEALELRNNGKYYLKMEFAKNELLQKRYRATCEKTIMNFGIHPNERKAIKDELEYRLSGIITYGDMIRSDVFNKADSKIQSFIKDKYQKTRSNIKQILNSSHYKKMIQSIINKSCKKNQSYLLF

SEQ ID NO: 82768 - protein, 437 aa, Candidatus Magnetoglobus multicellularis str. Araruama
MIFKYKAYNTDASLNFDINLEKNKNVYCFIGENAAGKTNLFENMAKSLIFSHSLFKNTDQHLYSKIFWKESIQENIKGLKLFLPALIFINDSEVKNDDSWQVTYFENIINYNLQFVFDKPVIFIGANNRGYTKNIDRKHIRVLGNYADTFNEAFLKTYNYINGNTVEDTDLAEWISSRLIINPNFVESTDDRTSEVNHCLALIDKLETNSDQKIRNLSEKEYCFSFREGLLWLNNIPVNKLSTGYISILKIFQDIINNFSAWIRLQNSDLKEHDLNNFEAIVFIDELESHLHPKWQHKFIPLLKEFFPKITFYIATHSPVIISTTNEGEAYELVRDDFNVTAKKLGNPKEWYLADIFSQAFHVNLNKSISLSDTNDSNIPQLLKKFSILVKNYAVNQDDRLKKEVEELYKKILPNLSPDDPRRRSLDSLRSLVNESN

SEQ ID NO: 82769 - protein, 249 aa, Candidatus Magnetoglobus multicellularis str. Araruama
MKAIDRLSPPDCLNNEIEDSRKNKISFYKNLWDKYGKVYPRWNSTCKDVDGISNIRKQLLKMSNSSCAYCGKKIGNSSLDVDHYLPLSQFPYIAYCWYNLIPACKACNQSSKRDFIPSSIKSKIIVEDIVANTIENKLLYNHKNLLTELHDRIIEPTFDNPEEHIQFNPEFYYYEPKTEIGKITINMFFNHKEVAEEWEKLSELIKELVQHNVSESLIIRIIDLYGYEYVGLKFYEYWLREKEEGRINR

SEQ ID NO: 82770 - protein, 207 aa, Candidatus Magnetoglobus multicellularis str. Araruama
MFERLLPNVSQIVLEDDQIFYIENGYKATIHQIGSGNKTILSMVGDIVIRLFEMQPKETAPENLSGIVVIDELDLHLHPVNQRYLPEILSDIFPDIQFICSTHSPIPLLGAPKNSIFFVVERDRQKSITTIRDYEIDISNLQPNTLLTSPLFGMESIRSVQNSIFAEFRTENDYRDYLHRKKRDESLKQYAEKGIHLPKEFMDKIYD

SEQ ID NO: 82771 - protein, 208 aa, Candidatus Magnetoglobus multicellularis str. Araruama
MIRVIKESIPPEILQTKAENLRIKALKECKKHKFSTRYYGHPSVKKKLLEIYCKKCAYCESSISEGAALQVEHYRPKKNLMEDMNHPGYYWLAYEWTNLLLSCPSCNRSKSNSFPIMGERVKSPQNDHKEWHINSESFISEKPLLFNPEFDNLEKQFKFYIDGSIAGEDKNRRSEETIRICNLNRENLRAARKKKLKLLYSEILDIEH

SEQ ID NO: 82772 - protein, 409 aa, Vibrio parahaemolyticus B-265; identical to SEQ ID NO: 81298

SEQ ID NO: 82773 - protein, 221 aa, Vibrio parahaemolyticus B-265; identical to SEQ ID NO: 81113

SEQ ID NO: 82774 - protein, 391 aa, Vibrio parahaemolyticus B-265; identical to SEQ ID NO: 82348

SEQ ID NO: 82775 - protein, 214 aa, Vibrio parahaemolyticus B-265; identical to SEQ ID NO: 81297

SEQ ID NO: 82776 - protein, 550 aa, Photorhabdus temperata subsp. khanii NC19
MTKQLERKAKGGSLLSAFELYQREKNEDPHGLNDKAEEWFEFCWNYLQKPAHNSLGIYHPENPFCLRSMSFTDFRRFPQLDINFEEDLTIIIGNNGQGKTSILYAIAKTLSWFTANILKEDSSGQRLNEHSDIRNDSDNNFSDISSNFFFGKGLKNISIRLSRSTLGAAERRESIIKPAKEVADIWRVINESRMVNLPIFALYSVERSHPFSKPAKDSIEKREDRFDAYNHALTGAGRFDHFVEWFIYLHKRTEAQGTSAIELLEEQVNNLKQSVENGLTSMVPLLEETQKKLLTAQMRKVTLQSVNMLTETAQMDIVSRAITTVVPSISRIWVETASGTDIIKVTNDLQDVTIEQLSDGQRVFLALVADLARRMIMLNPLLKNPLEGRGIVLIDEIELHLHPKWQQEVITILRTVFPNIQFVITTHSPIVLSTTETRCIREFRENSESGELFLDSPPIQTKGSENSEILEQVMGVFSTPPNIAESYLVSNFEKSLIGEKDALSAESLSLYNKIVSHFGQHSSELKKADSLIRLHRMKNKISKAKREKDN

SEQ ID NO: 82777 - protein, 215 aa, Photorhabdus temperata subsp. khanii NC19
MKSLNRSVGPTHLHQFRAGRDPWMSVDQNNIWPQLLEMQGEFCAYCECSLNRKHIEHFRPRGKFPALTFEWGNLFGSCGDSSKTGGWQRCGIFKDNGAGNYNPDHLIKPDDDNPDDYLLFLTTGQVVPAKVLSGPKLLKAQETIRVFNLNGDPSLLGSRKKALNCIMEEVMLLHESYEDLGDELWREMRNAEIQATGNKEFSTALKHAWLHNSEY

SEQ ID NO: 82778 - protein, 369 aa, Pseudomonas cichorii JBC1
MKCDEKNLPVEDVRFVVDKYEGRSRFERKLPVFIKAEGDIFGLPDWGTIQLADIWEAAVDPSFLTHMEEVHAKWNAGERIDLPVLAFYRANRRWKSANVSAEFSAQQKLSRFDGYLNWFDAVADLRDFESWLIARTLERLQDKLDSKSDSEPEDELKWVNQAIQLAIPDALDLRYDLRLQSLVVDMGPGKTVPFHDLSDGQRSLIALIADIARRMCILNPQMGKDVLESTNGIVIIDELDIHLHPAWQRNIAPTLKKAFPKVQFIATSHSPQIIGSLKPEEVILLHNGKASNPRTTYGMDSSSVLEEVMGVTQRDPEIEKLLNQLFSTLEDNNLEQAKQQLEKLKALTPDLPEYARAQALITRKEIIGR

SEQ ID NO: 82779 - protein, 222 aa, Pseudomonas cichorii JBC1
MADEESTQGIEPLSFTNWKAKAERENRKPTYKSLTRSAPQKKKEVHESLLREQAYLCCYCGDEISEQTSHIEHFRPKSDYTPLELDYNNLHASCLRDVGELQQREPDYLLHCGHKKGNLFDETRHISPQDENCESRFQYTLNGEIKPTDADDDAASKMIEILALDTLRLNNRREETMLGIFNDDFLLTASKEELQIIAQRARGQQTRFCHVIARYAEQLLTP

SEQ ID NO: 82780 - protein, 439 aa, Rhizobium leguminosarum bv. trifolii WSM1689
MKIERLSLANVRAFEEAEFTFNPGFNLIIGINGAGKSTALDAIRFCGSHLLSNLQRMPFRPFGFGIDDIHGNAPFAEAALYVQLGGDADAFVRLREWREQVAAEATENVERLRREILETARPRDRLRNQLRELQETVSPAEPVFFYPSKNDLKARAVSEACAPLVIHYSTARSIMNEQAERKSAAGTSQLAYVNALQSNALSLRQFADWMRAQIELASERPTSRHLVGGISTALERFLPGYSNLRPSVESASRVEIDINGKTLDVRQLSDGERCVLALILDIAKRLAQANPGLDDPLTSAEAVILIDEIDLHLHPQWQRKIVGNLEKTFPNCQFIATTHSPQVIGEVAHDKIQMIREGKVYSPSRSFGIDSSRVLEEVMGTKSRNAGVEDAIGKIARLIGDGRGEEAKAAIKGLSEEIGDDDPEITRAITLLDFMEGDA

SEQ ID NO: 82781 - protein, 204 aa, Rhizobium leguminosarum bv. trifolii WSM1689
MRMITKGAEPNSLTHHRAQAHSDYDNYTQKADLRAALVGEQKGLCCYCTGRVRAESTAMKIEHWQSQANYPQQQLVYGNLLGACLGGEGKSPAEQHCDTKKANRDLKWNPADTAHVIETRLSYLVDGTVACSDEDFNTQLNHTLGLNFSYLKSSRKAVLDSVLHWWRSTPNARQKVQQQINYRLNAAEYQPFSPVAIWLLRQKL

SEQ ID NO: 82782 - protein, 384 aa, Paenibacillus sp. FSL R5-192
MKVESIKIKNINGIKDLSIDMNSHINIICGMNGVGKSTILEVIAQAFSFATSTKLKRNVRADKGSAWVKVDGKQGFFDTLAFLPNDNQREKLDVVGEALKVIYIKEHRVLEHQSLSGITPDEVRDEPNHKHYMINGVNPQTIKTWLANRILFEPQGRFSEAEIFNLSMAKQTFSILDKSVEFSFIDHTTLDIMVKTSRGEIFFEYLSSGYKSLFFILLGIIKEIEFNFNPKVKVTEFNGIILIDEADAHIHPYWQATLIESLRTIFSSAQIIVTTHSPHMIQAAENEELIPLGLDENNEVIRLETINSEYGFKGWTVEEILEDVMGLKETRSNEYINIRKDFENALEDENHENAVKSFEILTKMLHPRSPMRKILEIQLGSLGD

SEQ ID NO: 82783 - protein, 252 aa, Paenibacillus sp. FSL R5-192
MIKIIRTSPPHQFDSEKVKRLTQEYINTKRNVWNLEYIKSALLDMSNSKCIFCECKLGEESKYIEVEHFHPKSLYPEEVLSWTNLLPICKRCNGLKRDHDTKINPIINPTVDEPKDHLFIKDYRYRGLNDIGKRTIKVLQLNDSDRLVLPRFKIGDAIAAAIESLVKVKDKINMDTKIEDENELIGKLRNLLFSCQPDSEYSTICSYALLTDDNYFEVKDYLVHQGLWDLELERLETISLQHSLIRDKINLA

SEQ ID NO: 82784 - protein, 384 aa, Paenibacillus sp. FSL R7-269
MKADYINIVNIGGIKSLSIKFNDRINLICGMNGVGKSTILECIVHSFGYVYSNKIKRNQRSLIGEWVLSVDDQEITFKTKSFQPFETLIDFQAAFIEKVLKIIYVKDQRFIEYTPNEGIRKDEERTKEQHQHQVILGIRPETIKTWFSNRVLFEPHGNLSDAEIENISIAKKIFSLLDDSVEYEKIDHASLDLIISTSRGSIHFEYLSSGFKSAFFVLLGIIKEIEFNSNPKIRVSEFDGIILIDEADAHLHPQWQGPFFKALKEIFISAQIIITTHSPHMIQVADSEELIVLGFDGQGEVKQLDTIKSEYGFKGWTVEEILEDVMGLTETRSDDYLNIKNKFEDALNSEDKELATELYIVIEKMLHPRSHMRKVYQLQLGSLG

SEQ ID NO: 82785 - protein, 255 aa, Paenibacillus sp. FSL R7-269
MIKVERSEPPAKLTTEKVKELTEEYIKTDNNVWNQDYIKKALLNMSNNKCIFCECRLGEESKYIEVEHFHPKSIYPEEVVDWENLLPICKRCNGLKRNHDTKSVPIINPTLINPRDHLIIKKFRFFGKDELGKKTIGVLSLNDSDRLFYPRVRIGEAISNILDSLGKWVDKIKFESSIEDQNELVCKMRNLLKACQPDAEYSTICSYALFEDDNYHETKKFMQQVEIWDEDLSTLEANCIKYSLTEYGHLRSNVC

SEQ ID NO: 82786 - protein, 692 aa, Paenibacillus sp. FSL H8-237
MIFVERSHLSVPDWFKSQKAITLKSEISNFYSSNSIELLAQRSLRENQNYRRMLSQVSRVPEVRSELKLLFNNKCAFCETSFSELFVAHFRPKSVYEWLAFEWENLMLCCRDCNNAQRDSFPINGLRGEVMSSIEELRKKEDYLLVDPCYDIPEEHISFNYNGEILSLTNKGEETIRTFELNRPSLVRGRRMRINEVENIVNRLRENFEINPTQATFDELALKISQIYKFPDQPFQGCVRAVFIMELDKLRRKLRNEVLQVNSDSLGKHVNHLTKIRKISSIKVENLLYMEDCEIQLNESDGSDWLMILGENGTGKSTLLKLLAINLAGEEKRRILRHGILSPKDLVKPGYSSGYIQIVFTGEPVITRKLIFNLDETWAGSADHPFDGNVLSYGPVRIVMKELNFDDIIQNQFNSFSCLLDMNMWLVEKYKSDMATYSAAVRCIRAMLPIEASVAQNFLLEPDENRLVFRNLHHEQNKIPLDSLSSGYRTVFSLVCDIFRKLDGKDESSLEGIVLLDEIDVHLHPRWKMRIVGQLKALFPSVQFITTAHDPLCLRGLNKQEIVVLNRNSNGVRVHSDNLPNPEGLRADQLLTSEFFGLSSTLDPEIEVIFSEYYSLLAKRAKGSADEQRIEEYKESLKQWGYMGNNRREQLMYRAIDLFLAEERILSTSELRQHAEDNNLMDKLRNIWNKKE

SEQ ID NO: 82787 - protein, 308 aa, Paenibacillus sp. FSL H8-237
MIKVTRPTEIPATLVSECAPGGRLEKAIKVYSDYFKSLEVDGEVKSEKIHKFLNYDEPDVRQKLTELFHRKCAYCESFYAGTGLLEIEHFRPKAEVRQDRDVPKQRTGYYWLAWEWKNLLPSCHNCNSVIFQYVVGSDNPEVKVLRGKGNLFPLLDNNKRVINHENSDFLANEIPLLLNPCEDDPKSYLEFSDEGHICPKEIEDSLIYEKGYWSILTYGLDRKDLFIERNYIANLITKQIGRVRRCMTKWMSDNNNNSLEEELIQERDDLYDFMRPERKFSLMASQIIHRFCVDAGLDCPCCITSTIE

SEQ ID NO: 82788 - protein, 391 aa, Vibrio parahaemolyticus 605; identical to SEQ ID NO: 82348

SEQ ID NO: 82789 - protein, 214 aa, Vibrio parahaemolyticus 605; identical to SEQ ID NO: 81297

SEQ ID NO: 82790 - protein, 409 aa, Vibrio parahaemolyticus 605; identical to SEQ ID NO: 81298

SEQ ID NO: 82791 - protein, 221 aa, Vibrio parahaemolyticus 605; identical to SEQ ID NO: 81113

SEQ ID NO: 82792 - protein, 576 aa, Pseudomonas aeruginosa BWHPSA045
MRLDKLTIGSPKKSRTHQFKNLKNVTIDFEQDHWVTVVIGWNGTGKSNVLEALAIIFRDLITKERKPAFAFQLAYRMGADESLRHIHIDADPDRKKEPFTIHVATDAQARGEGTLTSLIEDEKAVSALRGKAIKLTSFLNAGGEYLPRYVFSYYSGESLRMHEVFRPYLENYDSKLRNGEDPGLKRLFYAMPVHSQFVLLAFLIQQSDVVQTFLDEHLGLDPDEGIESVLFVLRQPPWKSKAADGDPRFWNARGVVRDFLSRLYNIALAPIEVSRRVSTSIWNKETLQFKYLYVKDIAALRRLVGNQAPAQFFRDLESTYVSELIEEVRIRVRLKKNDGSVTFRELSEGEQQLLTVLGLLRFTAEDESLFLLDEPDTHLNPRWSVDYISYLKQFIASGTKQEETSHILLTTHNPLAVAELDREQVQILRMTKQDGQRQIVACYPEMAPRGMGYAAIVTSDMFGIASSLDQPTQELLEAQRAYAAKEQLTPDELRELDRINAQLDRLGFRFFHPDDEYSRYLRLRNDLLVQKFGAMQPTELASHVVQMSRAGREALAKQLIAELLANESNLPKGTAS

SEQ ID NO: 82793 - protein, 270 aa, Pseudomonas aeruginosa BWHPSA045
MRYVDRLKLVKPTGWSQRAHTATQAVANGEDPNDHSQVWRDLKDGLAALLHDKCWYCETPMDRSDNAVDHFRPKNRVADAANPHAGYRWLAFDESNFRYACTYCNSRRIDQEGGTAGGKADRFPLVNEAQRVYVAGSLVAEQPMLLDPCEISDWRLLGCHQENGQPCATGTDPVSKRRAEESIEIYHLHYEPTCKRRHTAAVQLMADVDEGKRLFDLATQDPNREGDFKVVAARLRRAIDRDSPYSGDMHFLLRGQRSDAHPWIQELLEA

SEQ ID NO: 82794 - protein, 410 aa, Rhizobium leguminosarum bv. trifolii CB782
MYAKSLTIYDFKCFQRAKLDLQYPGRKTAGSSEISNVNLILGDNGGGKSSVLRALAIAVLAPALQRSGFVPYRLVRRQVPGMPEVSHCLLKVIGKADSHEGALGLKNRIELLARLDPPARGNLDRIYLEYTPDSPVTPLLEDDFSPAFFVVGYGATRRVETGDYSESSARRSRGLRYQRIAGLFEDHVALRPLTTWLSRLKPGSPRFAEAVSLLNDVLPNDIAFTGAFLPEDEQYLFDFEGAPTPFNSLSDGYKAFIGWIGDLIGHLADVASQDEPLNSINGIVLVDEIDLHLHPSWQRQVVQLLSKTFPRLQFVFTSHSPLVATSVKRENIFITDRAENGTATISQIAEHAFGQSVEQMLLSSYFGLTTTRPESFEQESQSLFKRVADGDSGAALEFLKRVTSPSRSAG

SEQ ID NO: 82795 - protein, 291 aa, Rhizobium leguminosarum bv. trifolii CB782
MIRHQFDIAAVEEAVAELDANWLQKARKRTAKFIAQKAYKEASSIWSTVKPVYMRLQHDKCVFCEQRLEGGAYGPVIWDLEHFRPKSNVEIWPDPTRHSDLTYANIGTASASGYYWLAYELRNYAASCKVCNSIFKLNWFPIAAVRALSETDAVDQEHAFLCYPLEEGDLDPEELITFTLTTAVPTHREGPLNLRGRIIIDFFGLNKRDTLHRDRAQMIGSIGMLLEERDRGTASAEKLAAIEQLSGPHVPHAACVRAFKRLWEVDAVAARRGYEMCLAYGFDLSRAPPAL

SEQ ID NO: 82796 - protein, 391 aa, Vibrio parahaemolyticus IDH02640; identical to SEQ ID NO: 82348

SEQ ID NO: 82797 - protein, 214 aa, Vibrio parahaemolyticus IDH02640; identical to SEQ ID NO: 81297

SEQ ID NO: 82798 - protein, 409 aa, Vibrio parahaemolyticus IDH02640; identical to SEQ ID NO: 81298

SEQ ID NO: 82799 - protein, 221 aa, Vibrio parahaemolyticus IDH02640; identical to SEQ ID NO: 81113

SEQ ID NO: 82800 - protein, 391 aa, Citrobacter freundii UCI 32
MLNKFDIINNQEDCYILVGRNGSGKSSLLFELAEDFHNAGYNVIAVSNTLFDKFLVHKNSDQYDYIGGKLGRSFPALAIKRTISANKNDRLGRIFFVLKEIGYDQRVGVRIKFRRKFKEIFRYPGDTMRDHYKAFFDNIDEDIPDELMSALNKAVYKTGNRLSVLDWLEGEDNVFYESDFNSYLQLIRYERLLKKAKIISSIEIFLSKHGSSFPLNHASSGELSFIALLVHVAFCVTDNSYIFIDEPENSLHPQWQNEYLELLKGVIGYNQCVIVVATHSPLIVTSLSAQDNAAIFKRTKNGFEKVEAYDDNAEEIYIDYFDTLTPKNRALSNRCVEIIDEYTLGKTTLHKAKEQLFTYERMSSDSAQIEFLSGVEAILDNIDKNKGKHHG

SEQ ID NO: 82801 - protein, 210 aa, Citrobacter freundii UCI 32
MANFSFTEEEKSLIRSAIAKGHGFWGDGSLADIKGKVKVFLRERQVEVCCYCSRNTDNEFKMVLDIEHVIPKSVLVSEMFELNNLAASCKRCNMSIKKEDVSFINEDINTFKAGGRYYLSESYKFLHPNLDKWDDNLHYYVVQRNDRKMVYYNVVEGSEKGEYTKKYFRLADIQVNTFDEVQEATARKEPVDPEVASKYIKLVDSMLSKN

SEQ ID NO: 82802 - protein, 419 aa, Citrobacter freundii UCI 31
MYIRKIQLENIKSFKNFTWQLEDEENPVGWHVILGDNGSGKSTFIKSVSLALLGTTDAKRTKVPFGEWVKQGSSAGFIRLEIQHTKIDNWAGKGKQQSENLKFSLKLSSNGELTHHGTPSPTRHVWGGKTGWFSAAYGPYRRFTGGSSDYQKLFYSAPLLARHLSVFGEDIALSETLDWLKELKFKSLETNGAKKYELLNNIITFINQDDLLPNSVKLNEVTSDGITFIDGFDNIVDINSLSDGYRTVLSMMLELIRQMTICYDTDSIFSPDLKRIIKPGVVFIDEIDVHLHPKWQRTIGKWLTSHFPEIQFIVSTHSALICQSANPGSIWKLPSPHYPGERITGNALNRLIYGDLLEAISTGAFGNEIKRSDDAKFLMEELADLNIQAMIQELNEEQKERRKDLQAIFGSNSNLTSKG

SEQ ID NO: 82803 - protein, 262 aa, Citrobacter freundii UCI 31
MIVMTAHNFLATTETHLNLKQQEINNETSYAGKVVKANNLWKSKSKKHFDDIRTVLDKMCVGSRRCNYCEDSVADEVEHIKPKSLYPDDCFKSENYLYACGPCNGPKNNKYAIFDQQRNVIDVSRKKGDAVIPPQNGNSVFINPKTEDPLDFIILDLNTFIFIPLPGKGKIEIARAKYTIETLELNSRDYLVNARKHAFHSYKDSLETYINKKLNGEASDQLLIRKNEINGRHHPTVWSEMKRQSSFHPELKKLFDAAPELI

SEQ ID NO: 82804 - protein, 409 aa, Vibrio parahaemolyticus EKP-028; identical to SEQ ID NO: 81298

SEQ ID NO: 82805 - protein, 221 aa, Vibrio parahaemolyticus EKP-028; identical to SEQ ID NO: 81113

SEQ ID NO: 82806 - protein, 409 aa, Vibrio parahaemolyticus IDH02189; identical to SEQ ID NO: 81298

SEQ ID NO: 82807 - protein, 221 aa, Vibrio parahaemolyticus IDH02189; identical to SEQ ID NO: 81113

SEQ ID NO: 82808 - protein, 391 aa, Vibrio parahaemolyticus IDH02189; identical to SEQ ID NO: 82348

SEQ ID NO: 82809 - protein, 214 aa, Vibrio parahaemolyticus IDH02189; identical to SEQ ID NO: 81297

SEQ ID NO: 82810 - protein, 409 aa, Vibrio parahaemolyticus Peru-288; identical to SEQ ID NO: 81298

SEQ ID NO: 82811 - protein, 221 aa, Vibrio parahaemolyticus Peru-288; identical to SEQ ID NO: 81113

SEQ ID NO: 82812 - protein, 470 aa, Vibrio parahaemolyticus Peru-288; identical to SEQ ID NO: 81302

SEQ ID NO: 82813 - protein, 214 aa, Vibrio parahaemolyticus Peru-288; identical to SEQ ID NO: 81297

SEQ ID NO: 82814 - protein, 452 aa, Escherichia coli BIDMC 43b; identical to SEQ ID NO: 82562

SEQ ID NO: 82815 - protein, 219 aa, Escherichia coli BIDMC 43b; identical to SEQ ID NO: 82563

SEQ ID NO: 82816 - protein, 452 aa, Escherichia coli BIDMC 43a; identical to SEQ ID NO: 82562

SEQ ID NO: 82817 - protein, 219 aa, Escherichia coli BIDMC 43a; identical to SEQ ID NO: 82563

SEQ ID NO: 82818 - protein, 452 aa, Escherichia coli BIDMC 19B; identical to SEQ ID NO: 82562

SEQ ID NO: 82819 - protein, 219 aa, Escherichia coli BIDMC 19B; identical to SEQ ID NO: 82563

SEQ ID NO: 82820 - protein, 452 aa, Escherichia coli BIDMC 19A; identical to SEQ ID NO: 82562

SEQ ID NO: 82821 - protein, 219 aa, Escherichia coli BIDMC 19A; identical to SEQ ID NO: 82563

SEQ ID NO: 82822 - protein, 452 aa, Escherichia coli BIDMC 17B; identical to SEQ ID NO: 82562

SEQ ID NO: 82823 - protein, 219 aa, Escherichia coli BIDMC 17B; identical to SEQ ID NO: 82563

SEQ ID NO: 82824 - protein, 452 aa, Escherichia coli BIDMC 17A; identical to SEQ ID NO: 82562

SEQ ID NO: 82825 - protein, 219 aa, Escherichia coli BIDMC 17A; identical to SEQ ID NO: 82563

SEQ ID NO: 82826 - protein, 452 aa, Escherichia coli BIDMC 15; identical to SEQ ID NO: 82562

SEQ ID NO: 82827 - protein, 219 aa, Escherichia coli BIDMC 15; identical to SEQ ID NO: 82563

SEQ ID NO: 82828 - protein, 452 aa, Escherichia coli BIDMC 9; identical to SEQ ID NO: 82562

SEQ ID NO: 82829 - protein, 219 aa, Escherichia coli BIDMC 9; identical to SEQ ID NO: 82563

SEQ ID NO: 82830 - protein, 452 aa, Escherichia coli BIDMC 3; identical to SEQ ID NO: 82562

SEQ ID NO: 82831 - protein, 219 aa, Escherichia coli BIDMC 3; identical to SEQ ID NO: 82563

SEQ ID NO: 82832 - protein, 452 aa, Escherichia coli BIDMC 2B; identical to SEQ ID NO: 82562

SEQ ID NO: 82833 - protein, 219 aa, Escherichia coli BIDMC 2B; identical to SEQ ID NO: 82563

SEQ ID NO: 82834 - protein, 452 aa, Escherichia coli BIDMC 6; identical to SEQ ID NO: 82562

SEQ ID NO: 82835 - protein, 219 aa, Escherichia coli BIDMC 6; identical to SEQ ID NO: 82563

SEQ ID NO: 82836 - protein, 435 aa, Candidatus Entotheonella sp. TSY1
MARTRRNGDSAPEGRFTALRLQNVRCFEEVAIQLDPQMTVMIGENGTGKTTVAEALASLSYGETEGLSHFPLRRDTRHGEIALFDAAHTDSVAIWRHDEASATHQRLPLTRYLFAYGRYRRIHDPGTWEDPESLVNVSSLLDELANAVTERRTTTLNHPDGRLLRDLSRYLVAIHEARSFDPRMDTIWDRLQQSLRELRQGLERIEMVEGEMAYIPMVVRRGVRLGLNELSDGYQAVLVIVFDLILRYTFLFSTLSDPLAGTATVMIDEVDLHLHVRWQRLVLRQLTTLFPGTQFVVTTHSPAVVQAAIDDGHHIITLREKKGTVEATPLSARKRKQLQGAGIDSLFIEKLLFGADSRYSAQVQTDEDEVRRLRRKVESDRATDTDRERLFVLLNRLEGLVASEAERHESGPLISEMTKLQLAFLKELAMELDEK

SEQ ID NO: 82837 - protein, 255 aa, Candidatus Entotheonella sp. TSY1
MRSLDRTAINAPADWQDKVNDKLPDPEAYASKAQEFEQLPINGQQRRNSFTKYAPEELPKRRRKPYFPTVWSSDRRVKSALATWSHSKCAYCEDKINARRSQQVEHFKPKSLFPSLAYDWDNYFLACNGCNGTKSDKWPESGKYVRPDQDQPETLFAFDEQGGMKARETSSDAQRTVDDFGLDRPGLREARKVAIRQPLNTMRTVLAQRLPDNMKRRLAQRIVTEAEHPEVSYSQAKGQNLRRLWHEHFPNVSLF

SEQ ID NO: 82838 - protein, 446 aa, Candidatus Entotheonella sp. TSY1
MAGAFRLGLVIVRLCFSVVGNQTWDKVVMFLKSIRLKNCKCFDDLELTFAEEDGSVRSWTVLLGENGTGKSTLLKAIAVVTSGSNALGELLEEPSDWIRYRKTYCELEAVLVTQELEERHLQVRINKGDTITDVIVRNLQGLDALDRALKYAERNYFVVGFGASRRLSPDIGRRAKTSAFRSARAQNVATLFDADAVLNPLESWAMDLDYANRTGIRTIRHVLNQFLPDVTFHRIDKKQGRLLFKTPDGIVPLQALSDGYQNIAAWVGDLLYRITEVFEDYRNPLNARGLLLIDEVDLHLHPNWQRELLAFLGNHLPNFQCIVTTHSPVTAQQAGQGHLHYLTREDGSIRIEPFSGAPSRLLINQLLMSDAFGVVSDESLDLQQKKDRYRELRDQDHLSANEEAEMADLMAFLQEQPTGGRSNVHLHDAQVALLQKIERELAEPPS

SEQ ID NO: 82839 - protein, 182 aa, Candidatus Entotheonella sp. TSY1
MAAVHRNFRDTRKQSFEAELLYNQRRIVRGELDKHPFETERWKQAKSQLIIETHGKCAYCEAPTTMVAYGDVEHYRPKSIYWWLAYSCENYLVSCQLCNQKFKKDRFPVRHTRMRGPSIRRNTTDAYIESKAGSLAPNPLDLNQVSEFLERHEQERPLLINPYVDEPAAYFAWRADDVLTAI

SEQ ID NO: 82840 - protein, 734 aa, Candidatus Entotheonella sp. TSY2
MPGPPEPLIDACQNGNCVLYVGAGVSAPAQFPVWKTLVEDMMSWAGSEMSMSPSLLQAVEGAVQAGEFTLAADSIVSELQSGDELEHLHAYLQHIFDRPADLTPLHQLFRELPLSAVITTNFDRMLEQTFPEAGDRVLTPHDTERLLELSAKREFFIAKLYGSLDRPETLLVSPAQYEDAIVGNRQFAEFMESIFVSRTLLFLGSSLEGISAYLEGIRFRGGEQQHYALVAVSGSAWKAKAAMLQRRYGIQVLAYPENDAHPEVYAFFNRLVNEVKRRERASSRTTATLKRVVLENIGPFEHLELELTNTWNVLLGDNGVGKSTILKAIALAMCGRDAKPYANRLLRSGTRHGRITLETNQGRSYATDIFMSSRGIEVESRPVGIMEIEGWLALGFPPIRAMSWRGSFGPQGEPALQRPTTNDLLPMMSDEPDPRLDEVKQWIINLDYMKRTADDDSQHDRAFYSRLQDQFFDMIRTLTGELEVEFAGVQPEMWQVMVRTDDGLVPIESVSQGTAALIGWTGLLLKRLYAVVGDMENPMQAYAIVLIDEIDAHMHPRWQQSLLHDLSKLFPNVQFMATTHSPLVVSGMQADQVFRFERDAEGRVERIEVPQDMLFGRADQILTGRGFDLLSTSDYETQKLIQEYKELVRQSHRKPAADDKAAQPLEHRIATLEAQLRQRLPTPEEEPVKRRAIELIDALLDETLSADLPEAKDMLRDRAQKLFDELERQPERWR

SEQ ID NO: 82841 - protein, 311 aa, Candidatus Entotheonella sp. TSY2
MRHVDFDPDQLSEKADQDWWRQWLSEAEAATAALILKWRASEPISADDFQSALWKALKVWLMEHVFHGKCAYCEIHLTGARQPGDAEHYRPKGEVRFVPDGRRRSIRASAYDEKGNSVDHPGYFWLAYHWRNLLPTCTMCNRAVKRNLFPTEDRHVFVIELTDDRLGELSEEPNETPIPFEAGSNGYLLPPMALDQHEAPQLLHPYRDDPSKHLRFGEGGVVVELSPQGESSIRVYKLDDNDLARERQKAQQRAWWQYQAAFQHAEANLNMTQDECHAFGWTFLTDWKDGREPFSAAGLDYVVYVKKAPEL

SEQ ID NO: 82842 - protein, 549 aa, Candidatus Entotheonella sp. TSY2
MGDWEDPRLAERVRNAVRRKQQDTNERRAFAAAHPDSAVDVQLAFAGHTDSIALTSAADCLRAQIAEVIDMPSEFVSLNRVSKTSPEASLRFANPEDALRLFAMVRTGDAFMTELFQHWSIDIERFQQVNRETSERLRQAEVEPDIGPEPIETSPLRLIRIELKNFRCFPYLRLELDQPSTLDGHWTCLAGINGSGKTAILQAMSLALLGHPTTHELGEGLLARTRRLENGQHVDAEINLWCRDHHGNHYVSLHITENGTVSESYDRGMRAFWDRVRSSVILAYGATRNLSEFLDSRHHNASEETQRQITLFDPLARLMSAGTLLQSHAPDSAFTHLFEQLLESILGEELRLSDHGSGIRFTVEDEPVPAIDLPDGFRSSVVWLADLCEAWCQKFPERAENARPEDIEAIVLLDEIDLHLHPTLQRRLVPALRKALPGVQWIVTTHSPQVLSSFDRNEIIALDRHEPSGARELDRQILGWTTDAVINWLMGAESTSAALDDRIAEAAQNPGGTEDRSLAELLEQSPDASEEEARQRIEQLASRLDRLDL

SEQ ID NO: 82843 - protein, 313 aa, Candidatus Entotheonella sp. TSY2
MAARHRQLKADAPATKLTFRDHWNRPDVRGTLYARQGRICTYCGRCLPDNDKGDVEHFRPKGKVAEDDAHGGYWWLAYTFSNYLMSCSVCNRVYKRDRFPLRPGARQRVTFETRQRLRHEARLLVHPFDTDPIHGSIEQWLQVDWQETNCFIWPRETLSPKQRVQVQGTLDFFRINRSPRLIQERNNIRNNVLNALDQGDNVQVKQSASRFRPHSLIARQMIQDRQRLDLMPTPLEELRDFVLAELTLLDIAFRLLDQHPEDDSLKRVAQEQLWILVALWYDPPVATSSDAERFLPPMIQDRLRPYLNQFGEA

SEQ ID NO: 82844 - protein, 413 aa, Fusobacterium sp. CM1
MKIEKVHIKNIKGIKDLELSFKKNNKILDVIVLAGVNGSGKTTILESIKDFFNNKNVNYDEPKKSNVNLNIFFEEFEKKKIKEAEKSSNNNKRPLWDFFSALQNYEIYIKRSDKHYHTHIAKKFDIPPKIIYVPAENKFEEIQTYSTTLSKEYEFINTINSNVIRDIPSYIATRRNYLATIEEDLTMKEVTNKVVNEINGIFSILELDVKLKGFSKDEKTLPIFENSAGEEFDINDLSSGEKQLFLRTLSIKMLEPKNSIILIDEPELSLHPKWQQRIIEVYKKIGENNQIIVATHSPHILGSVSNENIFILYRNENGKIEAKTGDELYSSYGQPVDRVLKDIMELKSLRIPKIEKDLEELRKLVDENKYETDEFIEKYNKLLKILGNTDEDLFLIDMDIKMKQKVNSNVESK

SEQ ID NO: 82845 - protein, 196 aa, Fusobacterium sp. CM1
MLKVNKKKSEPEEFTKYKSKHKIINWDSFTPEIKQVLKQYLLEEQENSCCPYCEIEIHLEDSHIEHIKPKDKFPKLLADYNNFIACCLEKKICGDSKASKWSELFINPIIEDPEDYFEYDIKTGKIIPIFKEGNRREKAKYTIDLLNLNDNRLCEIRKKYIFEFLSYSKNNKYSLNNFPVKFPSLRRYLEGAVANL

SEQ ID NO: 82846 - protein, 413 aa, Fusobacterium sp. OBRC1
MKIEKVHIKNIKGIKDLELSFKKDDKILDLIVLAGVNGSGKTTILESIKDFFNNKNINYEEPKKSNVDLDIFFEKFEKKNIEEAEKSSNNYKQPLWNFFNALQSYQYEKYNNNGLYQNLIAKRFENPPKIIYVPAENKFEEIQTYSTTLSKEYKFINIVNSNVIRDIPSYIATRRNYLATIEEDLTMKEITNKVVNEINSIFDIFELDVKLKGFSKDEKTMPIFENSAGEEFDINDLSSGEKQLFLRTLSIKMLEPKNSIILIDEPELSLHPKWQQRIIEVYKKIGENNQIIVATHSPHILGSVSNENIFILYKNENGKIEAKTGDELYSSYGQPVDRVLKDIMGLKSVRTPKIDRDIQELRKLVDEDKYNTEEFKEKYNNLLEILGSTDEDLFLIDMDAKLKQKVNSNVESK

SEQ ID NO: 82847 - protein, 194 aa, Fusobacterium sp. OBRC1
MLKVNKRSEPEEFTKYKKKNKVLNWKDFASESEIKKLLKEALLKEQENSCCPYCEIEINLNDSQIEHIKPKDKFPELLIDYNNLIACCLENKRCGNSKANKWNELFINPVTKNPEDYFEYDIKTGKIISIFKDGEKYEKAEYTIDLLNLNDNRLCNIRRKYILEFLSYSSNNENNLSDYPIKFPSLRRYLEGRL

SEQ ID NO: 82848 - protein, 409 aa, Vibrio parahaemolyticus 861; identical to SEQ ID NO: 81298

SEQ ID NO: 82849 - protein, 221 aa, Vibrio parahaemolyticus 861; identical to SEQ ID NO: 81113

SEQ ID NO: 82850 - protein, 391 aa, Vibrio parahaemolyticus 861; identical to SEQ ID NO: 82348

SEQ ID NO: 82851 - protein, 214 aa, Vibrio parahaemolyticus 861; identical to SEQ ID NO: 81297

SEQ ID NO: 82852 - protein, 470 aa, Vibrio parahaemolyticus EKP-026; identical to SEQ ID NO: 81302

SEQ ID NO: 82853 - protein, 214 aa, Vibrio parahaemolyticus EKP-026; identical to SEQ ID NO: 81297

SEQ ID NO: 82854 - protein, 409 aa, Vibrio parahaemolyticus EKP-026; identical to SEQ ID NO: 81298

SEQ ID NO: 82855 - protein, 221 aa, Vibrio parahaemolyticus EKP-026; identical to SEQ ID NO: 81113

SEQ ID NO: 82856 - protein, 427 aa, Kutzneria albida DSM 43870
MYVARVRVRDIRGFTGAREVDLTLTRPDGTHAGWTVLAGDNGSGKTTLLRAVALAVRGERAALRLHSHDGWLTRGAERGECTVDLVRDPVADQFSEQVGADLPGVRARMSWDEEMGPTGEPSVLASAGPWRDEPQGWLCAGYGPFRRLVGKPLRHPATIGALATLFDEEATLVEGVEWLVFQYLRSLESHGGSARLMATALRVLGDGLLPDGYEVDRVDSAGLWVTRGGQRFALREMSEGYRTVAALVVDLIRQVHEAFGELPTEGARITAPGVVLIDEVGAHLHVSWQKRIGGWLTEHFPNVQFIVSTHSPYVCQAADPGGLIRLPGPDEDVPPHVADEQLYGRVVYGSADDAVLSELFGLRSGYSDRAQLLRRELTRLEIEVVSGRADEEQVRRYRELTGLLTSSPSARVDEVTARLVLERITGE

SEQ ID NO: 82857 - protein, 246 aa, Kutzneria albida DSM 43870
MIRIRRLPLPTAATGQLAAQTAAIGAVREHAERVRFARERWRRGSALRKPIRETLARMAPGLERCMYCGDNQGSSVDHHEPVSRNPLRTFDWLNHLLTCSLCNSHYKGDKFPLDARGEPLLIDPSAEDPLDHMVLALSTGEYLPLSEKGRVTIEVCGLSRPVLNRGRVLARSLLTSRLRDWGLAQRARDSRRMAEVVRDVHTQPFADVCQSMLRQATSPGAEIVFERDPGTLKLLRRPDLREALLI

SEQ ID NO: 82858 - protein, 693 aa, Listeria weihenstephanensis FSL R9-0317
MMSLSNESKKIYMQMVKDYFAYENIDQSRDLIEYPLPIPGIFCKEVKSKCPFCGGIEELFLSDFIPMKFHPWEKKDVEEGWSFNEQIYIERLERNKSLISNKIVICGNCLKYRRGIFPVNSKGERELLNPLNLNTKINSHFNYTDEGALFGITRKGKVSIEVYGLMRRILIDTRAEMRFIERLPGYDKSKPLDLNDDFACEQIDFLRYRFLNDELFYLESEKYFDDSIERMVNQLILRNFKSKIFKKEDNIVRDEVTHPEFGVIEHRIKDNNSAVSKKDWINNGEVYSFRKGFFSIGREKDVYGEQIKPVFINRVQIKNYKTVKDIEFNIRTEKGIKPWVTILGENGAGKTSILQAIALAMVHPEYSNQIIGSELDYEVNVFSELGDIYTFNNNNGKYPLVIGYGSTRLRDGENVESSNYPSSIKNLFDSRIGLVNSEEYLSTLSAMDFETVANVVKKIFMQPTDIYLEQKTLFFKNYDWIAKFNELSDGYGTMVALVVDIMKTIKNHYSHFDGQAIVLIDEIENHLHPNWIINLSDIFKKIFPYIQFITTSHNPLSIRNLKPFEVLRLERMDGKLTMSDIYMDQSNFSLEGVLNSNLFKLYDTNPQKNERISNLYSEIERLRLSENNKQNLLEDITKELKEEVRNFQGSTQTMNYQYYLEAKLTKEFEISGLSMKERIDSLVNKLLDGGLNE

SEQ ID NO: 82859 - protein, 263 aa, Listeria weihenstephanensis FSL R9-0317
MNKCCYCGTKVPLHVSHAHIEHFRPKTAVTTLTGKVKPGYYWLVAEWSNLLYACPLCNENKDTHFPVSDERQRKIEIEDILEEKELLVNISSRNYRFDDNYSYDFGCKESWISEAVVLEGKSEKGWKTISICKLSRPELNAKRMEIKQSVLKECSMFLEFLKLCEQAISKDNYLVKRRYCECAKDFLNKYFSKKSLELEHYSLRVKILEMAIIKDSKSLIKFNKVVEKESQAIKIYEEQEDEDVLTELNDMGVIDVIISNYEL

SEQ ID NO: 82860 - protein, 420 aa, Providencia alcalifaciens 205/92
MKYLNNIDGGIPHTGISDINIPLNGRNLIITGKNGSGKTSFLSLLSDKILLHLGKEIQDEQKIQEQLAYWEAEKRKGPPGSSLYSQAQDQIDYYRKKIDAFHHGLQLVFVNELELISNYDDLKAIFVFFSAMRISSIQETKQTSSIEEEKRSSIDDLKNKRPTNFGSKLEQHLVNIKVNQSLAITEDNNQEQAHKFQEWFYNFDEHLKFLFEDSSAKLVFYRQSFKFKISLNGREFDFQNLSSGYLAIFDILADLIVRTEFFEITPTQLKGIVIIDEIDAHLHISLQQKILPFFTKLFPQIQFIVSTHSPFVITSTNNDTVIYDISSNEFFEGDLSNYSYEAIIKGLFHVDPITPEIKDSIERLKTLLNEESFNFSEIRTTIKKLTPLDKNNVLDKRVRNIYLQAINLLADYDELGELDV

SEQ ID NO: 82861 - protein, 227 aa, Providencia alcalifaciens 205/92
MFKVTKSPRPTEWVTRDYKDPTVVRQLKKDFYGKCYICEQKHFPNLNVEHFIPHENDEDLKLDWNNLYYACSRCNSIKNKYFDNMLDCCDSSHLVEEWIKVYYRMPDEDIEVINACPSDNQFYDKASTSKKLITCCFNNENSGVQEVSKEDLRERIIEEHSDFLSLRYVFFKSLDKWLDSEKIIAVEKIKLRLQPHYPFSAILRGHLEKDTRWREAIEEIEKLSIPS

SEQ ID NO: 82862 - protein, 479 aa, Acinetobacter pittii 42F; identical to SEQ ID NO: 81176

SEQ ID NO: 82863 - protein, 223 aa, Acinetobacter pittii 42F; identical to SEQ ID NO: 81177

SEQ ID NO: 82864 - protein, 419 aa, Peptoclostridium difficile E23; identical to SEQ ID NO: 82314

SEQ ID NO: 82865 - protein, 252 aa, Peptoclostridium difficile E23; identical to SEQ ID NO: 82311

SEQ ID NO: 82866 - protein, 419 aa, Peptoclostridium difficile T10; identical to SEQ ID NO: 82314

SEQ ID NO: 82867 - protein, 252 aa, Peptoclostridium difficile T10; identical to SEQ ID NO: 82311

SEQ ID NO: 82868 - protein, 433 aa, Candidatus Contendobacter odensis Run_B_J11
MYIGKVILKNIRGFSDLQFDFVRPDGGYAGWTVFTGDNGSGKSTLLKAIAVGLTGKDTARALQPSFHRWIRQGAEDDEASIQLEIVRQGEDDTLTDSGKKPGKAFPAKITLKSGGKETTLQSAIPVKKPKNYSTPDRTIWSTDAKGWFSCGYGPFRRVFGASPEAARQMVAPSTERFVTMFQEAASLAEVDQWLRNLKHKELENKAAEREQLTLLLNILRDELMPNQITLDRVDSDGLWLKDRNGVQLSWREMSDGYRAALALLADILRHLINAYGMDGLTEQGPDGKFFIKRSGVVLVDEIDAHLHPEWQREIGFWLKRHFPNIQFLVTTHSPIICQAADEKGLFVLPEPGSDIPPQQLNDEEYRKVIASRPDTILLTSAFGLQNTRSPRAVEGRAELAKLRAKQRAGGKLTAEEANKDKQLEIFVADEEEL

SEQ ID NO: 82869 - protein, 251 aa, Candidatus Contendobacter odensis Run_B_J11
MRHVIRAHLKADVENKLKKRQNEVNRKRTGGSLDIEREWRNARKTHPLQVVLATLKGMMGVRERCMYCLDSHGTDIEHFWPKMPYPEKMFVWPNLLLCCAECGRFKGSRFPLSDDDQPLLVNPTVENPWQHLDFDPITGNMVARFDVQVNDWSPKGLKTVEVLQLDRREALASGYRKTFMRLSALVEQYLATGTPTATDLITELWEGDDHGLLNWCFFGSGQTMPPFGTLRANHPQAWAESIAALEMLVNP

SEQ ID NO: 82870 - protein, 452 aa, Candidatus Contendobacter odensis Run_B_J11
MPHRTWIKRLELKNYRCFAHLTIDFDERLTVLIAHNGAGKTTVLDALAVALGTFVGSFYTGKRTGINSEDVRLRMTQIELREMEPQFPVVINARGEVNSESIEWARWLNTPKSGTTIKEAKPLTAIGERMQYAVTQKQSVVLPLVAYYGTGRLWNQKKKTEKKVFESEFYSRTVGYQDCLDPASSYKFFEDWLRYTAQADFDWRHQQRERLGNNHAETDTPYTPLIAAVRQAVDECLMTTTGWRNLRYSFTHQTVVMEHPESGVLEVNQLSDGVRNMIALVADIAYRMARLNSDFGRNAAKQTPGLILIDEVDMHLHPEWQQVVLQDLTFAFPQIQFVVTTHSPQVISTVKREHVRVLSENQEGDAIAAIPPARTYGRSNADVMQSVMGVSPEPEIHESKDLRNYLAVVEQGDWRTEEIQALRSKLTDALGNDHPLLRRAELIMRRREALGQ

SEQ ID NO: 82871 - protein, 222 aa, Candidatus Contendobacter odensis Run_B_J11
MRDGTASPKAWENFRANRDTRDLCLLEQFGLCAYSETLLDANDLGMHLDHVRPRSKFPADTFDHHNLLLSAIDDISFRKLIKRDVFGGHARSNHYSKSDFIHPIRPDCQRFFHYASDGRIEPALTLSESNKRKAVYTIAILNLNAPLLINSRRRWLETLEEEIDQLLEMPAALENFAEAELCLTNNKLRPFHSAVRERFGALGERVIRQHCIHITSDHETPL

SEQ ID NO: 82872 - protein, 419 aa, Peptoclostridium difficile E25; identical to SEQ ID NO: 82314

SEQ ID NO: 82873 - protein, 252 aa, Peptoclostridium difficile E25; identical to SEQ ID NO: 82311

SEQ ID NO: 82874 - protein, 89 aa, Xenorhabdus cabanillasii JM26
MILIDEPEISLHPEWQETYIHLLMEVFTHIKGCHFIVATHSPQIISNLSEKNCFVTLIENGDIIPAKSYVNKSADFQLATLFEAPGVEN

SEQ ID NO: 82875 - protein, 216 aa, Xenorhabdus cabanillasii JM26
MINEIIYSEQSSRRILEKMEEENFCGGSWGDDDLEVVRREIKDFYIREQKHTCAYCKQEIRSNHGRHWDIEHIISRESVHEFMFEPKNLCVSCPECNQRKGSNKVTHSKARKKLPLNSLDYFIVHPHLDNYEDHIEPVKIGEFYFSKSEKGEKTISICGLNRFYEFAGYNQAVTTDNQILQFANLLSDTTNENQRKSLLREIATVALRQLTNETSD

SEQ ID NO: 82876 - protein, 408 aa, Enterobacter sp. MGH 37; identical to SEQ ID NO: 82686

SEQ ID NO: 82877 - protein, 217 aa, Enterobacter sp. MGH 37; identical to SEQ ID NO: 82687

SEQ ID NO: 82878 - protein, 459 aa, Enterobacter sp. MGH 15; identical to SEQ ID NO: 82560

SEQ ID NO: 82879 - protein, 211 aa, Enterobacter sp. MGH 15; identical to SEQ ID NO: 82561

SEQ ID NO: 82880 - protein, 459 aa, Enterobacter sp. MGH 3; identical to SEQ ID NO: 82560

SEQ ID NO: 82881 - protein, 211 aa, Enterobacter sp. MGH 3; identical to SEQ ID NO: 82561

SEQ ID NO: 82882 - protein, 459 aa, Enterobacter sp. MGH 3; identical to SEQ ID NO: 82560

SEQ ID NO: 82883 - protein, 211 aa, Enterobacter sp. MGH 3; identical to SEQ ID NO: 82561

SEQ ID NO: 82884 - protein, 409 aa, Vibrio parahaemolyticus V14/01; identical to SEQ ID NO: 81298

SEQ ID NO: 82885 - protein, 221 aa, Vibrio parahaemolyticus V14/01; identical to SEQ ID NO: 81113

SEQ ID NO: 82886 - protein, 470 aa, Vibrio parahaemolyticus V14/01; identical to SEQ ID NO: 81302

SEQ ID NO: 82887 - protein, 214 aa, Vibrio parahaemolyticus V14/01; identical to SEQ ID NO: 81297

SEQ ID NO: 82888 - protein, 409 aa, Vibrio parahaemolyticus V-223/04; identical to SEQ ID NO: 81298

SEQ ID NO: 82889 - protein, 221 aa, Vibrio parahaemolyticus V-223/04; identical to SEQ ID NO: 81113

SEQ ID NO: 82890 - protein, 391 aa, Vibrio parahaemolyticus V-223/04
MEREYGHRLPRKLIAASTSQFEKFKANWSVRNDLVPSGFYAYIGSKPYMPSLSPSTRIASKAIQQLLGAEYFEERKHKALVGFLSKFDFGQKLLLKFELTFPNEDLENIQNQSLTEPETQLILKNAYIEHDEMELVELLGYCERIIEAPAFALTVGNQNLNLIHLKGSEQKPFSKLIISRMLRAGLITLSSIQTMKDKSLINDQSTVNIESSAISSLSKRSSGEQCLFLLFMSIISSIEDNALICIDEPEISLHPQWQERFVDILSESFSSYRGCHFLIATHSPLIVSDISAKNCCVYDMATNTLVDAAPYGERSSDYQLATLFHNPGNNNEYLLSQVIEVLDDICQSKEIASETKTKAHWLLSYEPRLPDGDKVKRLLSILEQTLEAFSK

SEQ ID NO: 82891 - protein, 214 aa, Vibrio parahaemolyticus V-223/04; identical to SEQ ID NO: 81297

SEQ ID NO: 82892 - protein, 482 aa, Klebsiella pneumoniae UCI 26
MFKLDTIKNHRKDDVIVSIDNKLNNESFYTLITGENGCGKSTLLSKAINSFLFINPRKSKECQVSSSSKSQPSRIIAICNARYNKFALKKTFLEKNKIYNPDYYIQADPTLEVGRALNEVIQSSLREITNTQNEVNNKTVRTIQDKERCFKAFSMIGIHPEIRFNLELNVDRICKIKDAYQRPELNEPSHVSVDHSISRDFLYLARMNHISSSDIEDFFNFYDCIDNKIISLGEGVLHFDSPRYQILSEQTNTDLLKIGIAVGFIAPTKIKVQRDNSLKWVSHHDLSSGQQSLLLNAILISIFAKKNSLICIDEPENSLHPEWQINYMKFLDCLCPSNLQSHIFIATHSPQIISGLQSNNGCIVSLLNLNPMHKNNRNHISTSGEIISINWQELHSASSYRRKSAAHQLVEIFKSPGFDNEAIINKLLLILTKQTKKIEINYEDENFIDGVQNLIRNEKIDDCDPVLVMYRQIKAIANLREF

SEQ ID NO: 82893 - protein, 232 aa, Klebsiella pneumoniae UCI 26
MILQAIEFKGDLLRHVETFDGDSGHWDGTDKIRVKLRGAIRKHYLAQQDYHCAYCNRFRQDFHGYCWDIDHIIPKDTHPQFTYEPHNYALTCKDCNTKKGEFNVLEPSVIAAVKYPKNSNDYIIINPHFDDYSVHMAVDYNINKQVYHIPKTKKGTETFRMCNLSRFTEVIAKTSEVVEDENITIGFSDAEFREIYINYKAIMNNNELTPSERKQRLISRLTELLGVDINNM

SEQ ID NO: 82894 - protein, 573 aa, Klebsiella pneumoniae BIDMC 35; identical to SEQ ID NO: 82678

SEQ ID NO: 82895 - protein, 269 aa, Klebsiella pneumoniae BIDMC 35; identical to SEQ ID NO: 82679

SEQ ID NO: 82896 - protein, 530 aa, Klebsiella pneumoniae BIDMC 35; identical to SEQ ID NO: 82680

SEQ ID NO: 82897 - protein, 209 aa, Klebsiella pneumoniae BIDMC 35; identical to SEQ ID NO: 82681

SEQ ID NO: 82898 - protein, 410 aa, Klebsiella pneumoniae MGH 39
MANLIKRINQLVGDVKRNIRLDGKNLIIVGNNGAGKTIFLKTLDLHLKEIFMHQSVELISDIQVNLKNHYDALKNYKVDSQDYNNFMSSIGYLEDIIEKKKKFDILFDSTTNVIQSIKKQQLILRFFKAGREYVSANINLLTSVESLYDRFKSSNANNQNTSDYFESYLVSMSNYALLEKGAGEIDEYNRVTNIINQIQSDLRDLFEDENLVLNFNRKKLRMEIVQKHKNPFGLDELPSGFASILAVYSELIMLSELSKQDKDEVKGIVLIDEIDAHLHVTLQKKVFNFFTNSFPNVQFIISTHSPFVVQSVSNAIIYNLSNNEQMEDLSIYSYSSIVNGLLGETTNSDDLEALLLEVDELSKNKNFGDRFKEVMNILESKVGVLDPRAKAIYLGAKSRLVDWREEQGNV

SEQ ID NO: 82899 - protein, 224 aa, Klebsiella pneumoniae MGH 39
MFNVVRPLQVPPSLALQRTYKSEDVIDALRVMFHNKCYLCEQDSLADPEVEHFVPHNRDPLLKFGWGNLFYACRRCNGIKSNSHVNLLDCTLPNSNVSSEIVHFAGNAAVGEILIRASSNNPSQQVINTVNLINKCFNLDNTSLRKVSKESLMEKLLIELGNYLPLRDVLATRLSTQNDIQSAKNSLAIMCADNYPFSIFWKWHILKDVQLSQRFPNLRTELGF

SEQ ID NO: 82900 - protein, 410 aa, Enterobacter sp. DC1
MLTAINEISIPIPFTEKKAELVLNGKNLIITGGNGSGKTSFINSIYEYLKEGLDQPRNNNRQQLEQQLSSHETQIRIGGRDSSSYSWYQQEIIKIKKRLHALDNFHITTFSNNSAETRSLLRFHKALREAAITAPQYVPRLSALFEENAHFSNEKDGDNIFENYLISLKTSQSYAISFDKDEEKAKKIQNWFDKIEMDLQGLFEDTQLKLRFDSTEGKFYLHQDMKDKFTFQTLSSGYSSILRIYADLIMRIEMWELTPESIEGIVFIDEIDAHLHVSLQKKILRFFSNSFPKIQFIVTTHSPFVVSSVTDAVIYDLSSNQQIVDVSSYSNNIILQELFGVNPMSIVLSDKLEEIEKIIQDLDNNNIETAIKIIQSLASSEESMDTEASAFVDFAKLQIIKFKKENAQEK

SEQ ID NO: 82901 - protein, 217 aa, Enterobacter sp. DC1
MFRVNRTYPAPVSLARKLRYDGPDVHEALQECFFGKCYICENKDPLDINIEHFVSRKNDDEKSYDWDNLYLSCGRCNNIKLAKHDELLDCCNEVVWNRIKLLPGFSARAKKVTVEPLFNDKKTITTADLLEKVYNSDHTINKRLTSAALRSQITKTTQKLIRNIIEYYEDDTPIDRKLYLIEKIKVLIRRDAKFSAFCRWIVLDDAELCEILEPFMD

SEQ ID NO: 82902 - protein, 451 aa, Vibrio parahaemolyticus UCM-V493
MNIQKLKIHNFRSISMLDLSLGTENRVVCFVGENGSAKTSVLSLIAEAIVSQSKLKFPDFESHSGKRYRLMSNSEINSDSSFYSVELHYSNFENRSYQFKKLVGRKKGLPATEYQEVIQGVSLTREYYSEFSTLSRLEANQDYLVSHIFLIRPSTRYEKDGFEVSEARSQTPAYSVGERYNEEMPYPLTVSHIGESIQSIILDMILDATIGYEDAAHAFRLITHILDKITGKEFGQLQVSQSPYRQVVSSNYGPIKSLSQGELDLLVTVSSILSRQLFHFKQYTKDQKKELGFNTLLDTPGIVLIDEVDLHLHPRAQESYIKTLISIFPNIQFIITTHSPFVVRGLPKHSKVVNLPSGRVFEENFEAMDIDSITNIIFGYDGSFSEAIKNKLGQFKNALVLEEPNVQLLQQLYGELSSSDSAKEELLLYLASYADEALINTVKGEGDAQSR

SEQ ID NO: 82903 - protein, 276 aa, Vibrio parahaemolyticus UCM-V493
MRKVDRSSVPFPNRLLQQNLTEDNLAHLENYKQISGSIYGHQDVKNSLKMLYFDKCYICEGDISSGDYDVEHYLPKRYFPQLGYTWQNLHKACTGCNLAKENKNFFVTDEEGNVTDIKLLDPSSLEYDIADYICFTIDSKAERVDIGQNPIVITKAINTIHYLNGDYPSAYGKELCYLRSNKSSSFLRFCNETLVEHRGRLREIKLTISTYQLPEDSALLEIDQSICQSLINADNEYLSEKAPFSTSTRVQLFPTLRITYAELIRIKNHMKQTLGM

SEQ ID NO: 82904 - protein, 448 aa, Sulfurospirillum multivorans DSM 12446
MKSPKNIGASYEEIQGSKIIFENNDLRILQTDTNFYDMASVVITSIKNTIKFNNNEFSNNVKPIFLQDLNDVNLLLNVLQDDLKREKNRSKKSEEPSYISSIKIKNIFSIKEIMLENLDDKKEIYIVGENGDGKTLLLQSLALGLKGIDEGVVFDFIKSQKEIYSIEIEDTHKVVYNSKNGIYKNLFAYGANRNNNCQMKEDETGYLTLFHPSFDLKNPIEWLQRIDYNDKAGTKNIISVEDAKKLLKELLNSDVEIEISPSAVTFSEKGSHVNFEQLSAGYRGVITIIADLLIRLSENQPDVKHLKEFKGIVIIDEVELHLHPKWKYSFVKKLRDVFPHLQFIMTTHSPTVLLGASQEAVFYKIYKEDGEVQISNQIKNEGYTSNSLVSSPLFELETITSRDYTKSVSNDDYVYAKIHQVISEKIKNESAIDEQEILKLIEEELAKL

SEQ ID NO: 82905 - protein, 256 aa, Sulfurospirillum multivorans DSM 12446
MTKVEKNFEDIPSILKHASRKDAFEKNVNARAYSFGKTLYKTKEAQKNLKEIYHLKCAFCEKKLLDADKHIEHYRSKNTYYWLAYSWDNLLLACGNCNRAKGKKFKTENSKVIYKNETFEEIHALGKSYDEIEKPFIIHPEKEDVLQYIKYDKEGKVSSENPRVQHTIEEACKLNREELVQKRLSVLNDFINQINKHYILFTQEKSSLSRFKPDIETFIEKADKESEFYSFRYFILHNIEIFFENKNIQKILISFW

SEQ ID NO: 82906 - protein, 439 aa, Sulfurospirillum multivorans DSM 12446
MKIDTFKIKNIVILNYKKYAQLSLDINSDFNLIIGENGSGKTTVLDAMATLLGGYLQAFQNIPAGERHSINKSDIKIEIQDYENNISVEYKLPISISGTLSIDNEDVIIERFRRSMVSTKTELLKQQNQAIYTLVKTLESSEDKMFPLISYHGTGRLWEQDYKSSAKMEKLTRYDGYKDCLNAKSNYRNFISWFEKQEKNSFNLRKEIAVLEAVRNTVKEMIGLLTKKEVELFIYREGDLELKFKNEATRERVSNLSDGYRNIIGIVSDIAYRMAILNPTLGLDVVKKTSGVVLIDEIDLHLHPKWQKEIVGLLQELFPKVQFIATTHSPFIIQSMQSDQIIKLDDNSRTLEADATMMSIEDIVENIQKIELPQMSSRKIEMLRAADEYLSILEKLEDNNSLQTEEVKRKLDELIEPFEENMAYVAFLRRKRLLTENKQ

SEQ ID NO: 82907 - protein, 221 aa, Sulfurospirillum multivorans DSM 12446
MRPINKGLAPKSYTSYNQAKDDLRNAIGSFCSYCEINISNQPDIEHVNPKSKNPDAENNWDNFLLACKTCNIMKSNNNDNRDGYIFPDTHNTAYAYKYKQTKVEVNPEISEEEKDLAVATIELIKLNRQHDTNGREDDRIFARVREWDKALESLADYKSCSNDEMARQIGRSPSGFHSSWLEVFSDYREVKQEILKNVNGTAMECYCDDLYPCNNLGRTSC

SEQ ID NO: 82908 - protein, 551 aa, Lysinibacillus sphaericus CBAM5
MELFRQFIELREEQERLTNLINDIQENGFEINFIKKKIYLYKNGIAYIGLDCQNIEREKLISVFLIKESKSRRIQEIDSYFIDYFNANLKDIVINLEIENLFLESKAYLLEELFMLEQLISEDLTVDFRINSIKFEEYKCFKDEEITFEERITVLVGKNASGKTSILDAISVAIGAYLSGIDESTDTKSILKSDVRFTSKDVHGTKVVKHHAPTRINFNSDFINKRFDWSRTRSKLKSTKLTTKDSKQVVNLSRFLYREINNNDLRNITLPVFSYHGTGRVANFTKNMNQLEKTENISRFFGYKDCLKPASNYKTFISWYSKMQYRAFMLNKRIEVLDQVTKCLKETFVFLTEEDKNKVSDVIYLEGSLHLKYSNGDMIPIEFLSDGYKDIIGIISDIAYRMAILNPHLEKDVIKATPGIVLIDEIDLHLHPRWQQKIIKLLKNLFPKVQFVVTTHSALVVSSTEYREAKELKVVEENLNENFTIVAEIIGDSKEWYIHDILRNVFHVDPLLHTRLTSEYIDQDEVDDLINDLNEYVKKYLVSREEHILKK

SEQ ID NO: 82909 - protein, 243 aa, Lysinibacillus sphaericus CBAM5; identical to SEQ ID NO: 80951

SEQ ID NO: 82910 - protein, 551 aa, Lysinibacillus sphaericus CBAM5; identical to SEQ ID NO: 82908

SEQ ID NO: 82911 - protein, 243 aa, Lysinibacillus sphaericus CBAM5; identical to SEQ ID NO: 80951

SEQ ID NO: 82912 - protein, 263 aa, Vibrio parahaemolyticus EKP-021
MKQAGKSQNFEQDSSNQFEKYLVSYYNYGSHVIARENNPEKEQQINAWFEKVQNDLRDLFEDHGLILQYNPEEQAFYIHQEGKDPYRFNNLSSGYSSILSIYADLLMKVELRDIPAEDITGFVLIDEIDAHLHVSIQRKIFSFFDKAFPKIQFIVTTHSPFVVQSVNDSIIYDLSKLEPLEDLSMYSYESILKGLLGVESTSDILNKRLDEMAEIINQEPVNTEKLQELIDSIEPYEGQLNARSRAFLLLGKNALLDSTDGEG

SEQ ID NO: 82913 - protein, 221 aa, Vibrio parahaemolyticus EKP-021; identical to SEQ ID NO: 81113

SEQ ID NO: 82914 - protein, 391 aa, Vibrio parahaemolyticus EKP-021; identical to SEQ ID NO: 82348

SEQ ID NO: 82915 - protein, 214 aa, Vibrio parahaemolyticus EKP-021; identical to SEQ ID NO: 81297

SEQ ID NO: 82916 - protein, 238 aa, Methylibium sp. T29
MNSSGPIKLRVEVQPSFSLIVKGDIKAMTLLVSSGLLTVEGAYIGNYSTTDAYSLSELSSGQWHILSSLLFTAASVEDGTLLLVDEPENSLHPSWQQQYLGLLNDMIEGVKGVHVVVATHSPLVASSLPPGRCEVVQIRQTRGRLIARALPSGPFGWTADEMLKDVFGLSSSRSLEFSQEMAGALRLFGAGDRDNPKLVSAVENLARLKEGLPEDDLARSVIETLSSVVLGGSSKGEV

SEQ ID NO: 82917 - protein, 245 aa, Methylibium sp. T29
MATILIPTFERIKKIRVSHADQTKLAACIASVGEKWGSSTFNWYKTWLIQKLRCLQNDKCCYCRRVILFNKGAREIEHIVDKGKQTRFMFEVSNLALACKDCNNNKGVKSVFASTFTLAPGAAYPMSASSYNWVHPYIHKYSSHIVIYQGWLYEPKNKSPQGAAVIKNCKLNDLEALESKNRIAAICAAQTLEAAVTRAAGMADEAGLDRICREVSPALAAMWSGKSSKKIEVAIRQAHGSVTSI

SEQ ID NO: 82918 - protein, 393 aa, Escherichia coli MP1; identical to SEQ ID NO: 81986

SEQ ID NO: 82919 - protein, 248 aa, Escherichia coli MP1; identical to SEQ ID NO: 81987

SEQ ID NO: 82920 - protein, 449 aa, Bacteroides xylanisolvens SD CC 1b; identical to SEQ ID NO: 81136

SEQ ID NO: 82921 - protein, 249 aa, Bacteroides xylanisolvens SD CC 1b; identical to SEQ ID NO: 81137

SEQ ID NO: 82922 - protein, 449 aa, Bacteroides xylanisolvens SD CC 2a; identical to SEQ ID NO: 81136

SEQ ID NO: 82923 - protein, 249 aa, Bacteroides xylanisolvens SD CC 2a; identical to SEQ ID NO: 81137

SEQ ID NO: 82924 - protein, 447 aa, Acinetobacter baumannii 118362
MTIKSIKINNFKSISNLDLTIDKNQKVICFVGENGSSKTSLLSLIVDTIITNQSISFPDYDPNNGKRFRSISQQEIGEITDRYQFKLEYISNEQHIINYNRIVFDKYKTAENSEIFQNSDDILILENNFHGEKNTPNLNKSNHYFLENIFLFRPSYRYESDALEITSTDENFHFQVSTKAKADVDYPFPFKIAHSGYNIENLIIELFLDMHIGYQDSGSAFSIIPKILNKITNKDYGNFQISRHPYRRLWSSTKGMVTSLSQGELDLLVTISSIIARQLHIYNQNPIMKNKYDNFRDIPGLVIIDEVDLHLHPRAQETYIETLTSMFKNVQFLVTTHSPFVIRGLPEDSIVIQLPTGITIKESFSMMDIDSITNFIFNYDGRFSIEVENDLKIFKKMISQFNQQDNNLHYLSNMYKKYRSSPSIINELDTYLSIFSSPDFTIKITGE

SEQ ID NO: 82925 - protein, 283 aa, Acinetobacter baumannii 118362
MRQIDRTLVNHPYNLLNLTAEQMAHLTNHKNIRSAIYAHENVKQALKSIYHEKCYICECYVGDNYAVEHYLPKQYFSHLGYTWDNLHKVCDQCNLAKESDQFFIKDQSDNIVDILLLDPSNPSYNISDYLSFNLDGEAILVSYGVDQSIRRKAEHTVNYLNGNLRKAQGKPFEHASKLNHLRSSRIGAFERFLRETNLMIYRQNILSINSTISTYQAQNNTEKQQLDLDTYHFLANLFKNFLNDECVYCSTLRDYCFTVFRIKFKNLKIILEHLRNIYRLPDY

SEQ ID NO: 82926 - protein, 330 aa, Acinetobacter baumannii 1289694
MVYVALQVLLCQALDELTSFQKFFKINFNERETNNSTIFSFFDVNSRLQVPEKYIHMGNMYDVKDLTYYLEELKLNFDSDIEGALERYLLEKREELRNSEDNICEEIYKIFSDIENDLKLIFDDETTVLSFDDFNNRVLIIQKNENISFGFDELPSGFKSIFKIYSNLLIKSKLIKTRKNKLNGIVLIDEIDSHLHISLQQKVLPFFTKAFPNLQFIVSTHSPFVITSTNDNTVVFDLSNNEFFEDNLSHYSHESIIKELFHVKEENENIKILSDQLLQFIESRNLTQDLNAIQELLNEINKDFEKLSVELQLQYMIAKNKLTKLKHEAK

SEQ ID NO: 82927 - protein, 223 aa, Acinetobacter baumannii 1289694; identical to SEQ ID NO: 81177

SEQ ID NO: 82928 - protein, 412 aa, Acinetobacter baumannii 1295743
MINYYLRAFHAENFRQFSKISMTFGKKFNFITGPNGCGKSGILTGINHCLSYDWSSSRLNNNTSFYVQIEMEDKIIFSGLGKNSFNSRNTYRQNSLDNWTTPEVDVSGVDKNYSIITPNNNEIMPLFLGTKRSIDYQRIEGARREEDVQQSVQKYRSHSLESNSSNVKQWFINRYFFIDKEWAVEEKLNWNVLIENLPKLAPFDSDFKYIRTERDLEPIFSLYGQECYLEELSAGFQAIFSIIANIIEWIEATNPIGHKDIQKAVGTVLIDELDLHLHPEWQFSIRDGLEAIFQNLQFIVTTHSPHLLSSAKEGEVIVMTRTNGVMEYEFTPSSKRYSGWNTDQILEDVMGVKSLNNKDYEQLVNQALDAYEQRNKAELIALIQRLKDIAHSNDTIVQVLEIRLASLELVND

SEQ ID NO: 82929 - protein, 157 aa, Acinetobacter baumannii 1295743
MIKLERPTNVPQILQDKAEEWTNNLLELVKEYGTYEKIPLKLKNAAIKHYRHQDIKDILFESAYRKCAFCEGFPEDNGNIEVEHFHPKSSYPHETFLWENLLPCCRKCNSAKDAHDTKEKVIINPYINNPEEHLAVSFMRIIGKDEIGVRTEVDQEI

SEQ ID NO: 82930 - protein, 479 aa, Acinetobacter baumannii 1475718; identical to SEQ ID NO: 81176

SEQ ID NO: 82931 - protein, 223 aa, Acinetobacter baumannii 1475718; identical to SEQ ID NO: 81177

SEQ ID NO: 82932 - protein, 316 aa, Acinetobacter baumannii 1267820
RYYAYKDSWDGKLKLDDFFTLICVIYNKSKLNNDLEEINSLKNKLDQLKSINFSDLEIINLLQKQLNELKSKNNFDSSHSESELDFKKFVETIKESLINDLLGIKDISFNNFSGRTQVYFHLSDGNIVNSKQLSHGQKVTYSLIGDICLRLLLLNPNLKNPLKGQGIILIDELELHLHPKWQQRILVSLRNTFPNIQFIVSTHSPQILSTIDKKHIRILEENDSIIEPIYQTEGTRSSDILEQLMSTHSTPDIRINTLYNKYLALIEQNIYETQEAQELGAELASHYGEKHPKIQEIKSLIRLKELKNKIASKKMD

SEQ ID NO: 82933 - protein, 219 aa, Acinetobacter baumannii 1267820
MKKLDRNSVPEPSCLKKYKYGQDDWGVLSRNKAENQEIWDSLLPLQSENCAYCESNLSHHRHIEHFFQRNTNGYEHLTFVWDNIFGSCCNPNSCGKYKDDKFKGDLRKIIKPDLDDPNDYFIFLRNGNIQIKEGLNENEKIKAKLTLSAFNLNGDSKLVNSRSAAIKPYIKEADEIYSLIESDENALEIIKVLIDEKIQEISSQPFSTALIHLFQYNQY

SEQ ID NO: 82934 - protein, 229 aa, Acinetobacter baumannii 1396970
NEHNRTEIFDLELNLSNRSKDENTNLLNSLSFLANYDLIELRDIKFSKNNRSFYLTDSSSGELSLIFNLLSIAGEIENDSLILIDEPEISLHPEWQSNFLPLLSKMFSNYQRCHFIIATHSPQILSSTNDKNIFIINLEDSNKLIRSEEISKMSADYQLAYVFKEPGYKNEYLTRIALTTFTNVNKKKLFSEDDLNSLSLLLENMSHLDQNDPLHQLILSLKEMRNLYA

SEQ ID NO: 82935 - protein, 223 aa, Acinetobacter baumannii 1396970; identical to SEQ ID NO: 81791

SEQ ID NO: 82936 - protein, 409 aa, Acinetobacter baumannii 1461963; identical to SEQ ID NO: 81754

SEQ ID NO: 82937 - protein, 220 aa, Acinetobacter baumannii 1461963; identical to SEQ ID NO: 81755

SEQ ID NO: 82938 - protein, 427 aa, Acinetobacter baumannii 1106579; identical to SEQ ID NO: 81756

SEQ ID NO: 82939 - protein, 222 aa, Acinetobacter baumannii 1106579; identical to SEQ ID NO: 81757

SEQ ID NO: 82940 - protein, 427 aa, Acinetobacter baumannii 83444; identical to SEQ ID NO: 81756

SEQ ID NO: 82941 - protein, 222 aa, Acinetobacter baumannii 83444; identical to SEQ ID NO: 81757

SEQ ID NO: 82942 - protein, 484 aa, Acinetobacter baumannii 83444; identical to SEQ ID NO: 82002

SEQ ID NO: 82943 - protein, 223 aa, Acinetobacter baumannii 83444
MFSVTRPTTFPKSLTKSTKDYRAADVVEVLQDIFFSKCYLCERKGFSDVNIEHRDPHEGDLIKKYDWNNLFYGCVRCNGIKANIYKNIIDCCQTLDVAQAIELHCPIVNNDDHKVIVTVGSLASTIEIESTIKLLDQCFNDTNTALKGISRHTLIKQIQKYQTKLLIIKDELLDDSLILTSSEKNLRIEKLKVMCDPEFPFSAFWKWYITRDVDLSKIVGNVF

SEQ ID NO: 82944 - protein, 501 aa, Acinetobacter baumannii 532279
MKYLQSITGSIKGLSVKIDIPLRGKNLIITGKNGVGKTFFLNQINNTISKELLSKLNSLSEESLYVKRRFFRSLERVLDRYPSFLSLIDTQSLKRIKILSMKRNLKEEENNEFYIRSKEIIYEIYKINKKTNHDVENYKIMFDSEYEISESLYQESKLSKKFIMEAEELLYNLENMSKLLNNFDKFTTLGSDLKVIIENIEDLSRNLKSAKVTFNYFTAFRQTQITHSTNTTSLDDYINNAKNGYENNLGQLFEQYLVNIKIDRSLALTESKNIELVYKIDNWFDKLNEDLKFLFEDESTYLDFDMNTKKFSINQNSKKFSFQTLSSGYSSIFTIYTELMLRSQFLNILPDELNGIVLIDEIDAHLHISLQRKILPFFVKSFPNIQFIVTTHSPFVITSSSDDTVIFDLTDGSFIDENLSKYSIESITQELFHVKPISEQFLSLSNKIIEFIENNTYQTNLNDIKLTLDEVEQDFDKLSIESQLQFIVAKNKLAKLKHGEN

SEQ ID NO: 82945 - protein, 229 aa, Acinetobacter baumannii 532279
MFTVTRPTEIPKSLINPPKNYRAEDVVNTLKKIFHGKCYLCERSNISDVEIEHLVPHRGDEIKKFNWNNLFYSCSRCNNIKSYTHIDIIDCSMNNYDVSKYIILECPLINNKERKVTVNSNTIPSSISIEPTIKLLYECYNNTSTAIKGISRSELIKDIQKYSFQFQKLKNDILYPTEPLTQSEINIKIEKLKAMCSPKFSYSSFWKSAIMLDEDLSDLVGNVFDLNIL

SEQ ID NO: 82946 - protein, 427 aa, Acinetobacter baumannii 983759
MKFNSLQLTEWQQFKKIEIDFHPKVTIITGANGSGKSTILKLLSTHFGWNIPFLATPYLIPRQGTYKYLSQFIPITATPWGTLFENSTDILGDITYTNQTLAHIMLDYELSNDPQFDFKIHNRQNIDGLHINSHRPIPSYLRLDSIPTNPMNAKNAFDSYYSETQNLYRRSYSNHTPMSRMKEAIISMAAFGHGNDSIQKNEHIERSFLTFKNILKNVLPKSLGFQDLSIRVPDIVLITDSGEFLLDACSGGIMSIIDLAWQIFLYSHDKDEFVVTIDEPENHLHPSMQRSLLNDFVEAFPNAQFIVVTHSPFVVSSIKDSNVYALKYQDFRDSQNHEKIVKKVVSHKLDLNQKASTAHEILREVLGVPVTLPQWAEEDLQNICSRFTAQDVTVSGLALLRSELEQAGLGEFYPQALNNIVVSNFHD

SEQ ID NO: 82947 - protein, 222 aa, Acinetobacter baumannii 983759
MIKLTKLDKPAVLIKHENKWKARLLQNIKDGKTSTYYLLSRYSDPEIKQKIIEETDGKCAYCESKLLHIHHGDIEHIFPKSLDQSLRYEWNNLTLACEICNQNKSNKDPNLNHILNPYLDDPEKSIVFFGSFAKNINIKGLCTINYIELNRSDLILERNDRFLDIEFILNKLTDDRIPLDMRKAIYQDLITVEANNSKKYASMVRSAIRCFDIAIPPEVKAA

SEQ ID NO: 82948 - protein, 306 aa, Vibrio parahaemolyticus AQ3810; identical to SEQ ID NO: 81112

SEQ ID NO: 82949 - protein, 221 aa, Vibrio parahaemolyticus AQ3810; identical to SEQ ID NO: 81113

SEQ ID NO: 82950 - protein, 420 aa, Acinetobacter baumannii 1294596
MQNFYLHSFTAKHYRHFSSLFIKFNKKFNFITGSNGCGKTSILHGIMHCFDQSNHINTRFGDNSSISTNLIIGDDRFDPLKITVGFGQGSFRTKEYRGSTLYTYLPPSIVIDEFELFNANQFKETFPYVIPLNITSDRNIKYKFIEGTRRILPNDQQRDSYLNAGLTPHYTDDDRSVKQWMINRYAWIDKEWAYDYKQNWDHLIRYLPKLAPNDSDFEFVEIRDDLEPRFSIYGQECYLEELSAGFQAIFTVVANIIEWIENTNSDGQRFIGDATGTVLIDELDLHLHPEWQFNIRGGLEALFPNLQFIVTTHSPHLLASAKEGEVIIMNREIGKTEYHFEPSNKRYSGWNTDQILEDVMGVKSLKNKDYERLIDEALDAYESKDKTKLLSVMEHLKNITHSDDTIVQVLEMKMASLELE

SEQ ID NO: 82951 - protein, 250 aa, Acinetobacter baumannii 1294596
MIKLEKQNDIPQILQDKQREWTDHLLALVSKYGTYKNIPKEEKASALSHYRHKDITTPLFASSHQKCAFCEGSPKDSGNIEVEHFYPKSIYHDKAFDWDNFLPSCRKCNDSKLTHDVGVEPILNPYDEDFDPSQQFEFVLARMKGKTEIAKRTIDVCGLKSRLYDPYSKLIKVFCEYEQTLEEALEELNEKDTNRKRLNQIRRISDSIDRIESLMKPTEKYSYFCSYIIRSSEVYNEAKRILSLELQQVG

SEQ ID NO: 82952 - protein, 479 aa, Acinetobacter baumannii 263903-2; identical to SEQ ID NO: 81794

SEQ ID NO: 82953 - protein, 223 aa, Acinetobacter baumannii 263903-2; identical to SEQ ID NO: 81177

SEQ ID NO: 82954 - protein, 241 aa, Acinetobacter baumannii 478810
MEKREELRNSEDNICEEIYKIFSDIENDLKLIFDDETTVLSFDDFNNRVLIIQKNENISFGFDELPSGFKSIFKIYSNLLIKSKLIKTRKNKLNGIVLIDEIDSHLHISLQQKVLPFFTKAFPNLQFIVSTHSPFVITSTNDNTVVFDLSNNEFFEDNLSHYSHESIIKELFHVKEENENIKILSDQLLQFIESRNLTQDLNAIQELLNEINKDFEKLSVELQLQYMIAKNKLTKLKHEAK

SEQ ID NO: 82955 - protein, 223 aa, Acinetobacter baumannii 478810; identical to SEQ ID NO: 81177

SEQ ID NO: 82956 - protein, 206 aa, Acinetobacter baumannii 723929
MKLQYFHLSFNNRVLIIQKNENISFGFDELPSGFKSIFKIYSNLLIKSKLIKTRKNKLNGIVLIDEIDSHLHISLQQKVLPFFTKAFPNLQFIVSTHSPFVITSTNDNTVVFDLSNNEFFEDNLSHYSHESIIKELFHVKEENENIKILSDQLLQFIESRNLTQDLNAIQELLNEINKDFEKLSVELQLQYMIAKNKLTKLKHEAK

SEQ ID NO: 82957 - protein, 223 aa, Acinetobacter baumannii 723929; identical to SEQ ID NO: 81177

SEQ ID NO: 82958 - protein, 427 aa, Acinetobacter baumannii 318814
MKFKKILLNDWRQFQNIDIDFHPNVTIITGANGSGKSTILKLLSKHFGWYQPFLGTPILSKEQGVFHYKTVFRPLNKEYQTSHYGHNIHILGNIFYSNDAFSDIFIHEQIYSDAQFDLQFGGNVPVVKGVHISSHRPIPKYERLQNIPTNPMDASQAFNSYFQETVNLFNNNYTQHTPIYRMKEAIVSMAAFGPGNQFVQKNERIEKQFSDFKDILKQILPADLGFKDLSVRIPDLVLETETGDFLLDASSGGIMSIIDLAWQIFLYSHDKDEFVVTIDEPENHLHPSMQRSLLNDFVKAFPKAQFIVVTHSPFIVSSIRESNVYALKHEKNNVSDQQSGWAKKVVSYKLDLNQKAATASEILRDVLGVPVTLPKWADDELQKICSTFTVQDITTEGLSRLRAELNNAGLGEFYPEALSNIVGESGL

SEQ ID NO: 82959 - protein, 222 aa, Acinetobacter baumannii 318814
MIKIIKKQKPAVLIKNASKWKSRLLDDIKAEKKSTKYLLTRYSHPEIKETLIEETHGKCAYCESKLLHIHHGDIEHIFPKALDQSKRYEWNNLTLSCEICNQNKSNHDPNLNHILNPYIDNPESSLIFFGTFAHGMDNKGEATRFLLELNRTALVERRQERLDKIRLIVKELNNTGLPIVARKAIYQDLIENEASHESEYTSMVKLAIRCFDASIPTEVKAA

SEQ ID NO: 82960 - protein, 446 aa, Acinetobacter baumannii 1412924
MTIKSIQINNFKSISNLDLNIDKNQKVICFVGENGSSKTSLLSLIVDTIITHQSISFPDYNPDKGKRFRSVSQREIGEATDRYQYKLEYISNDEHIINYKRIVFNKKKTTENSEIFQNSDDIFILDNSFHGEKNTPELNKSNNYFRENIFLFRPSYRYEADALEINSTDENFNFQVTTKTEDVDYPFPFKISHSGYNLENLIIELFLDMHIGYQDSGSAFTLIPKILNKITNKDYGNFQISRYPYRRLWSSTKGMITSLSQGELDLLVTITSIIARQLHIYNESSSIKNKYNNFQDIPGLVIIDEVDLHLHPKAQETYIKTLTSIFKNVQFLVTTHSPFVIRGLPEESIVIQLPTGLTIKESFSMMDIDSITNLIFNYDGRFSLDVESDLKLFKKMISQTNEQDDNLQSLSNIYKKYKSSPSIINELDTYLSIFSSPDFTQKIIGD

SEQ ID NO: 82961 - protein, 284 aa, Acinetobacter baumannii 1412924
MRQVDRNITTTPNNLLILTAEQQGHLTNHKNIRSDIYAHEDVKKALKVIYHEKCYICECFVGDNYAVEHYKPKKYFPDLGYTWGNLHKVCTQCNLAKESQQFFIKDPISDDIIDILLLDPSDQSYCISDYLSFNLDGEAVLASFGTDPNLRNKAENTVKYLNGELRKAQGKPFEHAAQLKYLRASRICAFERTLRETNLRNFLGNILDIYSTLNTYQAKTDPKSQKLDLDTYHFLANLFKNFLDDHCPYCSTLREYCFNVFKIKFDDLKNILSCLVITYRLPAY

SEQ ID NO: 82962 - protein, 415 aa, Acinetobacter baumannii 1412924
MNIRGDIPHAKIENINIPLNRRNLIITGKNGSGKTSFLNSLSNKINIHLKKEAQNKEDDEKHVAMWIEKQKNTLIGSLDFTLAQKQIEFHSNRLSKINDGLRLDFINEYDLIAHYDDLRAVFVSFKAMRMAEIIETKQTSSIEDEKNKAIQSLKSTNPESFGKKLEQHLVNIKVNQSLALTEDNNQDQAKQFQEWFDNFDSHLKFLFENESAHLVFYRQNFKFKISLDNREFDFQTLSSGYLAIFEILADLLVRSEFFEITPHELQGIVLIDEIDAHLHISLQKKIMPFFTRLFPQIQFIVSTHSPFVITSTDDDTVVYDISSNEFYEDDLSKYSIESIIKELFHVETDSLNLKNSIDKIYNAIQGHDTNLDILNHELKNLQPYKSKLNPEAKSIYMQAINYLIDHEALGSDLDV

SEQ ID NO: 82963 - protein, 223 aa, Acinetobacter baumannii 1412924
MFEIIRSLPAPTDLAKNKYNTAPIVEALAEICYSKCYLCENDEVQEVEVEHFLPHSKHPHLKFEWDNLFYSCKRCNRIKGDNYEYILNPCDSSHNVFRNIRLIPPSRLNDEITIENLCPESDSLHPNVEKTRDLLEKCFNDVSTPARRISRTDLINRLLDELAEILQIRGRLKSKRLTPNEENEEIEKLKKMTSPQYPFSAFWRWYVLDDLLLFSKMGSNINF

SEQ ID NO: 82964 - protein, 409 aa, Acinetobacter baumannii 1293320; identical to SEQ ID NO: 81754

SEQ ID NO: 82965 - protein, 220 aa, Acinetobacter baumannii 1293320; identical to SEQ ID NO: 81755

SEQ ID NO: 82966 - protein, 388 aa, Acinetobacter baumannii 216872
MKITSLGLENVGGISNLNLENLNPQMNIICGENGVGKTNILDSIASWFSENDKNTLKKKVGSDKGKILVITDNLGSNHYEISIDKFDPEQYDSYLNNQNYGNVKKSLLYLKTNRGIDYKKISSIQADPDIEHRARYNATGINNDDIKDWLLNRILHSGHEKHLSEIQLKNLEFAKESFSLLNPDFKYSRLNTSNELFVNTPTGEIYFEYLSSGFKSIIYILLGIIKEIDYRLKHDDTAARDYNGIILIDEIELHLHPEWQGRICEVLKVAFPNAQFFISTHSPHVVQTALKGEVVALERKDGNVGRRELPESQYGYQGWTVEEILEDVMGMVDLRTQKYKEIKGRFDKALEDKDRNAAHIAYEELDKMLHPQYPLRPVFRMQLDSLGE

SEQ ID NO: 82967 - protein, 239 aa, Acinetobacter baumannii 216872
MIKLQRGVRPTYLSDQKVQELTDIFKADKNKTVWKQESIGESLLTSSSFKCAYCECKLQIEDSYMQVEHFKDKDTYPDDVVDWENLLPSCGRCNRKKWTLDVITNPIVNPYIDEPKVHLCQESFRLYGKDEKGKTTVKKLFLNDDDRVVLPRFLVCNELNRQLSIAASSFTDIDNSRDSMSTILSSCQSDKPYSAFLATTLHTNQDYLYIKKHLEDCQMWDHDLEALHQLSLKLVLDQR

SEQ ID NO: 82968 - protein, 313 aa, Candidatus Accumulibacter sp. SK-01
MSARTLTGELEAGMKETRAALANLKSAAHPPLAVYFSPKRQLPGQPRSLPEAKPFDPSIAYGRALNDREVELREFMHWFRTQEKLGAANEPRRFKVLDALRAVVGELVPEFSNLRIQEQPRLGFVVDKRGQPFYLHQLSDGERGLLALMFDLTRRLAIANSDSDNPIADGVALVLIDEIELHLHPKWQRDVLQRLRDIFKACQFVVTTHSPLVLGEVPARCVRFLEFVNGKVGVTVPTEAYGMDANRILQEFMGAPVRNREVDGELKTLFELIDQERFDEARSAIAALEHKLCEDEPELTRASSLIRFLEGAE

SEQ ID NO: 82969 - protein, 209 aa, Candidatus Accumulibacter sp. SK-01
MRTIQKGPEPATLTQHRQQPHTDYDNYADKAALRQALVAEQRGLCCYCQSRIRATPEGMKIEHWQCQADHPGRQLDYNNLLGACLGGQGRPEREQHCDTRKGNNDLCFSVCDPAHPIERHIRFLGDGKISADDADIDKAINAVLNLNLPRLVSNRKAVLAAFQQRLEDGRRVDPSRELPRWDGSEPGALPEFAQVVVYWLRKRQARAAA

SEQ ID NO: 82970 - protein, 421 aa, Candidatus Accumulibacter sp. SK-12
MLKHLHLKNVGLAPDLRVEWAPRLNLITGDNGLGKSFLLDLAWWALTRTWAGAVALPPLSARNPQIEYVIQGKAGDAKPVVSKFRRSDETWPVDAKRPPMPGIVVYIRIDGGFSVWDPARNYWRSDPGRPAAYHFAADEVWEGLDVRGQRVCEGLERDWINWQEGRKPQFKALAEVLRVLSPVAETLRAGPPQRLFIGEGRDRPTLLIGSQTVPVALASAGVRRVLALAYFLVWAWNEHHVAAGLLGKRPETRVVILFDEPETHLHPRWQRTIVPSVLAAVDALRGPSDAPPQVLLASHAPLIAASLEPLFDSAQDDVARLDVRDGVVAIDQGVWAPQGDAANWLVSETFGLEQARSLEAEQAIEAAEAFMRGDRAALPKGLDCRAAIHKALTRLLPAHDHFWPRWIVTTRQLPSKREERR

SEQ ID NO: 82971 - protein, 199 aa, Candidatus Accumulibacter sp. SK-12
MIQAPMLPEPADFDAQVRQPGTQWLAANPTALRPRALWTRYTPVLEAGYERLCGYAAMADFTGGTVDHYRSFTNHRALAYEWRNYRFASATMNSKKRAADERVLDPEEVRAGWFEILLPSLQMRATDRVPARLRSKAEHTLDRLGLADGERVIRWRRSWFELYQHGDLSIEGLRTVAPLIAEAVERDGNPSGKQGALQP

SEQ ID NO: 82972 - protein, 526 aa, Candidatus Accumulibacter sp. BA-92
MRLDRVYIDGFKNLKQLSADFDERQLTTVIIGQNGAGKSNLIEAITSIFRWVDLRRNAPRFHYRVDYRIDGARVALSNLADEPAIAVDQKEVSRAEFERRKTEWFPDLVFGYYSGSSRRLEALFDDHQRRYYDAIKLEASDEACARAQAERRLFYGRPIHGILALLAFFAFPDAKVKAELASKLGIKGFHSMLTLFREPWYAKGSRNQKIQDAHDFWGATGPAGRTARTLQTAAFHPIRLVGNSIDDYRNKQQIEAQYATFLPALANLQKFGSAFKGESEMFYALEAMDISDLIRTVDLWVTRSNDISGDVGFADLSDGERQLLMALGLIRVSRGKRALFLLDEPDTHLNPHWQHSYLKLIEDWTGIAADAANCHIILTSHNPLTISALTREEVRVMTVETDGRISVLPPYTDPKGMGFTATLTEIFGLATSLDIETQRLIDERNALAQLLQKSDPEERRLIEINDQLARLGFLFEDREPLYQDFLRAWHSIRYADRPPLTASDVDVRQNAMKALIKQLMAQEAKP

SEQ ID NO: 82973 - protein, 280 aa, Candidatus Accumulibacter sp. BA-92
MIYVKRDPSLIPEKVLKVAERAQQTLESLMPNRRKAFIEQKAHIWRAFGRHLAKMSYGKCWYSESNDPQSFFDVDHFRPKKEAKRAEGVADDGYPWLAFSWENFRYSAGRSNRLNTDDATAAVLGKGSWFPLLEGSVRANWTNRCEDKESAVLLDPTNRDDVGLIEINSEDGRATPSVTCVGQAKQERAKRSIEIYGLNLGNLITARKRVMRDLQDDYLTLMEICSAGTDMAAVSRLQNKFRRATLPSAPYSRAARAKMHSLPYGPKFCAQPEDEPEALA

SEQ ID NO: 82974 - protein, 431 aa, Thiorhodococcus sp. AK35
MYITRIFLRNIRGFAELDFDLTRPDGSYAGWTVFTGDNGSGKSTLLRAVAIGLTGAETARALQPSFSGWIKDGSEKDWASIQLTITGNPDDDGMTGEGRRRGGAFPAELRLEQGSQDVAVRSIKPDGTPKTYSTPARTIWSEKATGWFSCGYGPFRRVFGASPEATRAMVSPASERFVTMFQEAASLAEVDVWLRTLSHKKLEGNRDAEEQLDLLLSILSDDLLPNQIVIDGVDSDGLWLRDRNGTRLSWEEMSDGYRAALALLTDIVRHLIKIYGLQGLTETRDGKTVIARSGVVLIDEIDAHLHPEWQREIGFWLKRHFPRMQFLVSTHSPLVCQAADPNGLFVLPEPGAPERPQALGEEDYRKVVAGRPDTILLTPAFGLRNTRSPRAVEARATRARLRAKQRTGAEWTDAEAATFRQLDMFEIEEDL

SEQ ID NO: 82975 - protein, 189 aa, Thiorhodococcus sp. AK35
MAGDTERCMYCEDSHGSDIEHFWPKSHYPEQMFVWRNLLLCCTECGRLKGTRFPLDETDDPLLLDPTSEDPWQHLDFDPETGNIVPRFDIEQNAFSRKGDSTVAILELDRREALARVYLRTYRRLVQITADAIDDANPNLDYLVERLRAADDHGLIAWCLHGAGKTMDPFCVLREKHPDVWSICCECLP

SEQ ID NO: 82976 - protein, 734 aa, Pseudomonas syringae pv. syringae str. B301D-R
MIKLKKLANSKPVDISTKTPLFTREIARLKAYFNLSPTEQARTRPPFNKDVLNVQSVAQELKRIQHNKCAYCETVLELDPSGYVSHYRPLSNAVDPHYDTEHLECYAWFAYEWQNLMLICTDCDSHKLNFFPISGRTAVARSSWREAQLREMPLLLNPFEDSPSDHLMFDSDGVACAASAAGKETIAFLNLNRPALCLKRKEQIHLALELILNSNNEKELISALRDHTRDEVLHVGAVRNCLGHVCRILQTQIRHGRYSPRSDLNKKIIRLRGEFSIRDWEDAVSRCKTNDLAFIVQNTDLGELKPRRFAYITSIEIGRFKGIEHFILDIGAIPSGQGRKGTSCTILLGENATGKSSILQAVALALMPPEDRQRIRIDQKSLIPHGIDEAVSPPLQPAVTVRFSNGESVVLSMNLQTGRLKSAGSPQNLVFGYGSRRYFLSGRSTKAQTCPNRTLFNQAASLQDPTNWLMNLKEKEKFNAVARALASLLSLRLGEFVASDDRSIFIQRQTSRLPIEHLSDGYKSLFAMSVDMMREMLKHWDNLEFAQGIVLIDEIENHLHPRWKMRVMKALRESFPRVQFIVSTHDPLCLRGMFEGEVQVLYRDRDGHLQRVEQLPNVANLRIEQILTSDYFGLATTEDPMRQRALEQLAQYAAHEDRDLSQADRSHRDELLEHYGNLPVIGDTLDKQIIAQALTRHIRDTDLATPIEHADAREASVRAIIEVLERNRKKYDPR

SEQ ID NO: 82977 - protein, 293 aa, Pseudomonas syringae pv. syringae str. B301D-R
MPTSLTAPDGEGYREHLRAAMYYQEPYIKSFGFAYYKESDVVTALNALFHNKCAYCEGKISSTGPIDIEHFRPKGRIEGESEHPGYWWLANEWTNLLASCIDCNRGRYQTVLNSEDGLLLTQGERLCGKHDHFPVAGQRAICGTDDHMLEDPLLIDPTCVDPGAHIRWKVVAEQPLAIASSQYGQTSIDLFGINRSKLAEARRELQLRLDEEFLCLKAMITNIAKEPTDEGVQRWMPALQMCINKFFRHAEPSNEYSAFAWHIIKLRYDTVSEMVAALMARIAMEKSLGAAAL

SEQ ID NO: 82978 - protein, 188 aa, Pseudomonas syringae pv. syringae str. B301D-R
MTIDKHGETLNVLQLSQGEKSMMALVGDIARRLAMMNPALENPLQGNGIVLIDEVDLHLHPKWQRSLIAQLTTTFPNCQFLLTTHSPLVISDSKDVLVYVMDDGELREQDSLYGLDANQVLSSVMDTGIRNEAVQTCLDEMQHFLIRGELDEARTLYGVLADQLPADHIELARASLLIRKLEIRREKD

SEQ ID NO: 82979 - protein, 216 aa, Pseudomonas syringae pv. syringae str. B301D-R; identical to SEQ ID NO: 81085

SEQ ID NO: 82980 - protein, 498 aa, Psychrobacter sp. JCM 18903
MKVKRLHLQNYGRFEDLTIDFAPTSEKMGNVTVIVGNNGAGKSQVLQALATNLSWFVAKLASDEDGFNIDKTYINNGKNEVKASIRVDFNENNPMPYGLEEDADWSITSVKDGRLKSLSNYMKLLSKTVRSFRSNLTKEDKYSLPLITFYSVNRTISVEIQKDIFSYQYDQLDAYKNCLNSNSIVFSNFLDWFRNSEDIENERKVSTESILEGLNSENEKVLNEVKKILSQLKSSKEDKVNIGLEMLEESKYKIEKEIHEVQKLQKHSEDISRDLPLFFVKSALKYFTGFTDFYIRRKGTATMIVEKDGEKLDVNQLSQGEKSLLALVGDIARRLAILNPSLANPLEGEGVVMIDEVDLHLHPKWQHDLIDKLVATFPNVQFILTTHSPHVISDRNDILLYSLDDGELTEMPNVYGEDANTVLTKIFDVDIRDSKVEEQFTVIRRAVSKHDYVTADTRITELAEKLPSDHLELLKCRLLLAQAKLAKSNKDESNHAKD

SEQ ID NO: 82981 - protein, 192 aa, Psychrobacter sp. JCM 18903
MPFETAKSFKKYQTKNWGEIPETIKAPLRQQLYDEQRGVCCYCCKSLGNGNTTIEHLKSRNEYPHKCFDYDNLLLSCRTAKQCDNAKGSQELLLTPLMDECEEEIKLNLAGELESDSKRGSEAIQMLNLNSRKACRHRKDLFTMMSEVFGYDLPYKPPIEIANEYALEILLTCLPDEGQRSELQYIVKKLTK

SEQ ID NO: 82982 - protein, 541 aa, Ruminococcus albus SY3
EYHHYDDYSYCTKYYAYKKINNENTFLGCVKIGCLNLSEKVESGVSNNGFASYSIDQIMPTDEFNNLENDYFSLGQSIDYYKNINDIFGNDADEYYKSLNDLAYSIDKFKSLYNDKEPCLVYSLLRELHYTNVIQFNRISHGECENTRYDFDIYYKDEKLPIIVDPDENPPSNIHVLIGRNGVGKTFLLYNIVCHLLENMELIIDKNSSHKYKYSEAFKVDAERNSFAGVIGVSFSAFDDGLSSIQVKSESESLLENQHMKDDFKKKYKYIGLLKRNTNRHDIDDTRESNNEESDFEKEKNKEIQFITKSANEMCAEFVNSLKRIKTDRVKRETFIETCDQLKTDSMFSDNEFIKLLNNYLTQGNKVEEYIDRIERFFYMLSSGHMVIILSLTCLCEAIYEKTIVIIDEPEIHLHPPLLSTYIRSLSFMLRKKNAVAILATHSPIVLQEVPSCCVTKVIRKDDNMSFIRIENETFASGTDLITREIFGYDILKTGFYKLIEDNLKEDFEATMKYFNDRVGSLGQMLMLDLLSEQENENDQT

SEQ ID NO: 82983 - protein, 295 aa, Ruminococcus albus SY3
MIKHEPIKLIITDNESVEHEMTQDDIYDLLPDVESFKTTDYYNYSKQETKDYTLNLSNAMDFFLREKKRMEDDKGYKKAMKAKYDQFSRSGNKIYNQVYSRIKTSEDVCVYCNLRNRDIAELDHFFPKATFPSLAISINNLIPSCSYCNHPKNDNFPLDYVLLHPYYDNCLDNVYDYLKYKINEFKGYNIVGEFYIDKTENMDDYTYIRIIKHFEFFDLNKYYKKDFISDYDEFVETLNNIDCLKEKLEKKRDYNRKKRSAPWLYAGFDALTHSEDFFRIIENKLCRKEEFMSSQ

SEQ ID NO: 82984 - protein, 447 aa, Acinetobacter baumannii 1295549
MQIQSFSLKNIGQFQDLSVSLAPTQHYPSNITVFIGNNGSGKTSLLKSVTTALTWFVARLKHDKSNGTPIPESVILNTANSAAVEIIVNDQNLQQQKQAYTWRITKNRTARKVEFTTYLTELNQLTDYYKQWLGQDDQSSLPLIAFYPVERSVIDIPLKIREKHQFLQIDGYDNALNNAVDFRRFFEWFREREDIENEFIKDLILQIKQNLVDQDLLNKIDEYNSGKFKDVQLEAVRQAIYAFMPDFKNLQVSRKPRLAMIIDKNEKTLNVNQLSQGEKSLMALVGDIARRLAMMNPSLDNPLLGKGIILIDEIDMHLHPQWQRSIIQRLQTTFPNCQFILTTHSPLVISDTQDILVYDLDGQDITALPSLYGQDANTVLLQYMDTNYRNPRVAEQISQAMDAIQNNQFEQANQLIDTLKFELGSDQLEVMRLVAMLKKRTLAKQGK

SEQ ID NO: 82985 - protein, 213 aa, Acinetobacter baumannii 1295549
MQQINKVSEPTELTEYKRKNPTHRYDDLGDDPEQIRLVIRKACLDEQAYLCAYCCRQVGIKDRDCMNEHILPRHHHPQYSFDFNNIVASCTTKGCCDDAKENQEIAINPLSPRCETEFKFNISGTITGLTDDAKQTIDVLKLGDSVQQNQKLVDIRKQVIANFLFIQGTDKENLIEDDELLTLLIDDLKQLTDGKLQPFAPVISKALQNWVNG

SEQ ID NO: 82986 - protein, 447 aa, Acinetobacter baumannii 277047; identical to SEQ ID NO: 82984

SEQ ID NO: 82987 - protein, 213 aa, Acinetobacter baumannii 277047; identical to SEQ ID NO: 82985

SEQ ID NO: 82988 - protein, 479 aa, Acinetobacter baumannii 225588; identical to SEQ ID NO: 81176

SEQ ID NO: 82989 - protein, 223 aa, Acinetobacter baumannii 225588; identical to SEQ ID NO: 81177

SEQ ID NO: 82990 - protein, 447 aa, Acinetobacter baumannii 426863; identical to SEQ ID NO: 82984

SEQ ID NO: 82991 - protein, 213 aa, Acinetobacter baumannii 426863; identical to SEQ ID NO: 82985

SEQ ID NO: 82992 - protein, 535 aa, Acinetobacter baumannii 1391434
MSNRSIDYLKKNSNKGSLFSLFQLLENEGLIDSEKVNLSSELLKNCLSYVTSIKEEEAPFNKIHLEKIQLHDFRKFRSIEVNFDNDLTVFIGSNGAGKSTIIEAITKTISWIGNGLIKEGDNGRPITYDDINNNSSSYAEINSYFKYGKTEFSGNISKAVRGRTAKKDSHVYDLKQFSNILRALNNIQQINLPLFCYYPVERLKDSPKNALLKDSLIIDRYYAYKDAWDGKLKLDDFFTLICIIYNKSKLNNDLEEINSLKNKLDQLKSINFSDLEIINLLQKQLHELESKNNFDSSHSESELDFKKFVETIKESLINDLLGIKDISFNNFSGRTQIYFHLSDGNIVSSKQLSHGQKVTYSLIGDICLRLLLLNPNLKNPLKGQGIILIDELELHLHPKWQQRILVSLRNTFPNIQFIVSTHSPQILSTIDKKHIRILEENDSIIEPNYQTEGTRSSDILEQLMSTHSSPDIKINYLYNKYLALIEQNIHETQEAQELGAELASHYGEKHPKIQEIKSLIRLKELKNKIASKKMD

SEQ ID NO: 82993 - protein, 219 aa, Acinetobacter baumannii 1391434
MKKLDRNSVPEPSCLKKYKYGQDDWSVLSRNKTENQEIWDSLLPLQSENCAYCESGLSHHRHIEHFFQRNTNGYEHLTFVWDNIFGSCCNPNSCGKYKDDKFKGDLTKIIKPDLDDPNDYFIFLRNGNIQIKEGLNESEKIKAELTLSAFNLNGDTKLVNSRSAAIKPYIKEADEIYSLIGSDESALEIIKVLIDEKIQEISSQPFSTALIHLFQYNQY

SEQ ID NO: 82994 - protein, 409 aa, Vibrio parahaemolyticus VP-48; identical to SEQ ID NO: 81298

SEQ ID NO: 82995 - protein, 221 aa, Vibrio parahaemolyticus VP-48; identical to SEQ ID NO: 81113

SEQ ID NO: 82996 - protein, 470 aa, Vibrio parahaemolyticus VP-48; identical to SEQ ID NO: 81302

SEQ ID NO: 82997 - protein, 214 aa, Vibrio parahaemolyticus VP-48; identical to SEQ ID NO: 81297

SEQ ID NO: 82998 - protein, 416 aa, Vibrio parahaemolyticus VPCR-2009; identical to SEQ ID NO: 82362

SEQ ID NO: 82999 - protein, 229 aa, Vibrio parahaemolyticus VPCR-2009; identical to SEQ ID NO: 82363

SEQ ID NO: 83000 - protein, 544 aa, Vibrio parahaemolyticus VPTS-2009
MYLHKANIIQFRNFVEAELDLTPTSSQCFALASPNGGGKSTLLQFIFILLHCFKNKDKHEYIKNLFSSEKYLKETKIAEFNLEIKGEKHFLHFQALPIDYAGLDLSIFEDYENVDMHLNSLESNSEYDISELMNIKESIDLKRRIDPILQRRITSLRRYTRTGEERSLHMRSIEERDPSAALSLIERLLERAHDYREQLQDVKNIKDNLHFKLNETIKQLSDLNKSFILDLGNGFVLTAETDIPEDKQKYIEEHIYLSAPASQVFLFLGEEEKSSILNLNNDNTENTYTSSVAQAKERINGFFTYDFTTTELISRSFDKAFASDKQQKIETGSYGNNYDQLVDELNNFLEGKSISQNQSNSDIIFKVANSDITLKPEELSHGELKKLSLYSWLKHIVKPNSLILIDELDIALHPKWQEEILSDLMKWEPSNIYFAATHSPQVINSIDYRNIRLLKCTQGESKIEMLERAPLDRDVNTIISQIMGANYFPQKLLELHVKYRKMVDDDTYKSELGLNVRNEILQYESVNSEFFQDIQYDIDEKEEQ

SEQ ID NO: 83001 - protein, 227 aa, Vibrio parahaemolyticus VPTS-2009
MRYVHKLETPQFFLDDTKNFTKWDDYDENYETREKRRRLRSYLLENEQFSLCIYCESKIELDNSHVEHIKPKDENLYPELTFSYPNLAASCQGNAHAELAKEGELQPESTCGHKKSNEFSEGLFLCPHTKSNIGSYFKYCRDTGVIQPNDVDTLSERYLKANYMITTLKLNDGHLPQARLKAITVLRKRLQKKFKKDKAARLTELQKVLQRDTNAFISFLRYSFTNS

SEQ ID NO: 83002 - protein, 414 aa, Vibrio parahaemolyticus VPTS-2009
MSGYLTKIKTKIPYSDKEVNIDVNGKTLILTGGNGCGKTQLLKLIYEKLKVSVIDRQNYNLADVERSLKSNQAHLSRIGPAHQHYKHYTQQVEMYSRQLEDTKYPSLETSNLEEFIVNYQELKALLIEFEAMRKSEIVKPSSVSSISSLRDQDKQAVQQVNRKVSTSSLFEQFLVTNKANQAFSESEKINNDPAEAARIDKWFTKLETDLRNLFEDRDLELVFKSDSFSFEIHQPHKEPYTFQTLSSGFSSIMAVYADLITKVSLRSIDPEELTGVVLIDEIDAHLHVSLQKKILSFLTQAFPRVQFIVSTHSPFVVSSIDDAVIYDLSKREQVEDLSMYSYESVLEGLFGVLPISSLLQQNIEALAKLLDKPTIDVEEVQSLLDKLPPDEDSLDSESLYFVNSAKLAINKAKR

SEQ ID NO: 83003 - protein, 221 aa, Vibrio parahaemolyticus VPTS-2009
MFNAVRNEPAPTSLAGKRKYDSEDVWDALKKVFHKKCYICETSAPLEINVEHFVPHEGDEGLKYDWNNLYLSCGRCNNIKLAKYDDLLDCCDPDTDVVRAIKHKPPLTPFARKLQIEAQSDDDKTKLTAELLNRVFNSEHTPNKAVTASSLRRKVFDQYNLLLTQLNNYYDPLALPDEKDRAVERIKLLLKPSSPYSAFISWCIMEDEELGPMLHECIGIV

SEQ ID NO: 83004 - protein, 543 aa, Vibrio parahaemolyticus VPTS-2009
MSKQRKVQRRSIRAQIDNAEKGVLLSQFQVYENYLKGKHVEKDEELAHKYHQLLESTLIDKKLRLDSLSLFNFRRFKELTIKFDEKLTVIIGDNGAGKTSFADAMANVFSWFNNNLEKENVSGNFIKQTDVNVKATDFSEVTCRFKLDQNNRFETSLALPVPGYTGDKSNDVNVIKQFGAIYRSSAKNESITFPLLAYYSVERSDFELKTSVTEKASGDDKDNRYSALKDALKGTGKLDDFSQLYIELVNLAEGEESKEIKELKGDINALQRTIDDVYQGKTPQENDPFTAMLNSKKELLADLVKSVASAKYQKHLSFVNEAIEKLVPDVKNLEVDRSSGKPRIFVENFGNKVNIAQLSQGQKMLVALTGDLARRLVKLNPNSDKPLHAHGIVVIDEIELHLHPKWQQEIIIGLQTTFPNLQFIVTTHSPQVLSTVDHKCIRQISLDKNGQPIIDTPTFQTKGVTSASILARIMGTNSVPEKLEEAIWLTDFSRYLKENNEELRELVFEKIKMHFGDNHPVVVECESQVRIHNMKARLAKKEQ

SEQ ID NO: 83005 - protein, 222 aa, Vibrio parahaemolyticus VPTS-2009
MRKLNRSNIKPVGLSNYDHNTQRWTGRRPNKVCRTNIWSKLAEMQNGFCVYCEAIATQGNGHIEHFFHKGKKPDGSTPYKHLTFEWTNLFGSCGSNTSDTCGHYKDREGMHGPGQYDPNDIIKPDIDDPMDFFNFLDTGVIEVKPGISEADHKRATETLRVLNLSFLNAARKTQIDIFKKELEELEELSVDLDEETLEREMDSIKAKVYLQEFQTAVLGALF

SEQ ID NO: 83006 - protein, 468 aa, Yersinia enterocolitica LC20
MRIDKLSLLNFRCFRQLNITFDEHITILVAPNGAGKTTVLDAVRLALFPFIRGFDASLYVKDKSLAIRTEDLRLTYRPEALNMELSHPTIITATGEWKRGESSTWILSKEGEQPPHEDTMAARFTRWGEQLQKLVRNEEHKQPIDLPLMLYLGTARLWYQERYESQMAEQRLDNSAFSRLSGYDDCLSATSNYKQFEQWYSWLWRSHLEFQYKLIEAGRQNKSVDLAEGLRDDNMREAIQAIQQAINCLTQEVTGWHDLEYSSSHNQQLVMSHPQHGKIPLSQLSDGLRNAVAMVADIAFRCVKLNPHLRDEAALKTQGIVLIDEVDMFLHPAWQQQIIQSLRSAFPLLQFIVTTHSPQVISTVKRESVRVLEQDEKGNGLALIPPGATYGEPSNDVLHSVMDVDPQPPVKEKEDLKKLTELVDQGKYDELDTQQLMATLQAALGEHHPQLKRLQRSIARQKLLEGKA

SEQ ID NO: 83007 - protein, 194 aa, Yersinia enterocolitica LC20
MNEQYQLCCYAEVRADLRGLGYHIEHVENKSQHPERTFDYQNLAASALDSANGLRQYGKNAFGGHSQGKNKSVDMAKFIHCHIPDCSRYFAYLSDGRIVPADGLNAQEMENAQYTIDLLNLNSGFLQTERRNYWEELEQIFDENIGNRQNLQLLLQINLVPSPDHKLHEFFSITRQFFQQEAEQVLQSHAQALI

SEQ ID NO: 83008 - protein, 709 aa, Bacteroides fragilis str. 3725 D9(v); identical to SEQ ID NO: 80886

SEQ ID NO: 83009 - protein, 224 aa, Bacteroides fragilis str. 3725 D9(v)
MITINRIDCPDILKQGKNPKSKGELETIDALKFFSDQNNHTSTYRKTGTTTVGYKIYSDDSVRKVLLNMFNGKCAYCESKITSIYNGDIEHFRPKGEIKEATPTKPGYYWLAAEWENLLFACPFCNQTNTHTIVANGILKETVLGKLHQFPLVSEQYRLKYTHGQIYFSDRNAYQQAFELEETERLLLNPCKDLNIENYFKYKDSGVIITNNHKDIYKMKTSSK

SEQ ID NO: 83010 - protein, 246 aa, Bacteroides fragilis str. DS-71
LFNALESIYISDLLFDVKIKVLKENVTGELSMSELSEGEKQLLTVLGLLKFTKDEESLILLDEPDTHLNPMWKWKYLQYVDQVVKRPESTQIIFCTHDPLVIGGMDKSQVRIFKRDRGGNTYVTEPTVSPKGLGVAGILTSEFFDLSTTLDEKTQLKLNRKRYLQGKLNRESLSEIEEKEYGELKTELESLGFYDKTNDELYNKFLLEISKNELFQKVEFTDEERILLEEESKNVIEQILKDTNKI

SEQ ID NO: 83011 - protein, 287 aa, Bacteroides fragilis str. DS-71
MRFIDINELPRLMGEDEFNAWLNKANAHLDELRKLDKKGRSEYLQKHADWTELYKYLSELSFHKCWYTESPENSTEWEIDHFRPKNRSKDEFGQITLPEGYWWLAYDWKNYRLSGGFVNKRRKDKFGNDELVNGKGDFFPLDPSCSPCELDGDLDDEIPLLLDPTCFRDTTLLSFDKDGVPISNYPEGSFEEKKVSISIKFLNLKNTILNRKRKEVWENTEKEILAISVKLKSSTNQILRNKIYNDSYYKLKELTAKNQSYSAVALSCLSANQTNHPWISSMLPHLN

SEQ ID NO: 83012 - protein, 465 aa, Escherichia coli; identical to SEQ ID NO: 81096

SEQ ID NO: 83013 - protein, 243 aa, Escherichia coli; identical to SEQ ID NO: 81097

SEQ ID NO: 83014 - protein, 465 aa, Escherichia coli; identical to SEQ ID NO: 81096

SEQ ID NO: 83015 - protein, 243 aa, Escherichia coli; identical to SEQ ID NO: 81097

SEQ ID NO: 83016 - protein, 542 aa, Snodgrassella alvi wkB2
MQSMGNTSSLRNLKQNSENGNIFSTFQLYELSLLSKSSDLIEKKNYYFQKCVEFLETTTQKHDNTNDYISPKNQFILDSLVLKDIRKFHSFKTKFERDLTVIIGENGSGKTTILECIAKSLSWIVAGLIKENANGDRIGYSDIKNEAEDYGEIQTNFKFGEQRCSGSIARAIKGMSEKKDSSVSDLKFLAGIWRVINNQQLINLPLFIFYSAKRFIGEFDRTSEQIKDRENRFDVYNQCLKNEIKFIDFKQWFIYLYKKGKNIHSNDANGLLEKKIKLILHKQGQNATSLLSLLEEHFQVDDVNLNAEKNNALDKIKTLQKAITECIPEIKEIYVDISSGVDEIYVHINEKKININQLSDGQRTFLGIVADLTYRLLVLNPNLENPLNGQGIVLIDEIELHLHPKWQQQILINLTKIFPNIQFIVTTHSPQVLSTVYKRQIRQLIELANDDYDVQQPELQTRGVMSSDILERIMGTYSIPDVKESNDLNKLQQYIQEDKYNTPEAELLYDSLKKHFGDKHPEMLNCDRLIQFRKLIAKNKFR

SEQ ID NO: 83017 - protein, 214 aa, Snodgrassella alvi wkB2
MKYIQRTREPQALESARKKYSSWNELKRNDHDTYNIIAEELYSMQEELCAYCECKLRKEEKNYHVEHFKCRHQFPKNELEWNNLFLSCNDKNTCGKHKDNSKTENYDVNHLIKPDIETYNPKQYFTYILNGKIRVRSDLNCRDAHKAEETIRVFNLNEINLVNRRKKIGNFFTQMLNSQDYNDNPEFLGNLFRQMDQFEFPSFIDSLYCADPNK

SEQ ID NO: 83018 - protein, 391 aa, Escherichia coli 1-176-05_S3_C2
MKFESTSLVNIITGNNGSGKSSILAEISKQEYVTGKNVICLSNTSTNKFPKIKSHRFHILNQSSNTLTKALKKVVVSNSHNKIGSSHAHIFPRVLAYLDFNEQLTFKFTIFPYESFIRKFQSEMYNNELIGSDIDEITNHLRNLIEINDDTASSTDHGVKGSHILYLEYAFTYESEKRINTIHNRLIELMLKHERILKKNHLIHDIEITLSRGHSIIPSSHLSSGEACYMATLAFILTYISDNSVIIIDEPENSLHPRWQKKYTSNLLDLLYYFDIRIILATHSPMIVIGAVEDHSGLSVFKSENSTLSPLEGNETNIDEVMVDVFGVLTSRSRYFSYKINEILNEYNNKKIDINSAREKLNKTKSLGPDESQVKIIEAANEILNQMVKNA

SEQ ID NO: 83019 - protein, 198 aa, Escherichia coli 1-176-05_S3_C2
MPNFTFTAENISHIRTAISENKLDDKVKVWEHKLLKSMRRELKQYILSNRNDGFKCAYCLKDFHNEHNMNIDVEHILPKSQYPEYTFTLKNLAVACKRCNLLIKRNDVSFLNANFIRKKPFNSKYYKIFHPVIDRKNHLSLLDVHFNGCHIIKYQTNSEKANNTYIYFKLNEVEIETLNNAQGIEQIIDLLHTYNPRN

SEQ ID NO: 83020 - protein, 421 aa, Chondromyces apiculatus DSM 436
MKLTSLSIRDYRGFKSLDLDLSSDVIALVGVNGAGKTSLLDALALLLSCLVEGIRSGKPEEPEEPREIALRDRDVRIGASTAHLSLTAELGGQEVQWSVARTLQGHPPGAPTTLDALQAHVAAAQASIASGSPVLPVVVYFPTNRSALDIPARIRTPHEFDALSAYEGALEGGASNFRGFFEWFREEEDILNEQEVSGEEVATPSPLPAVREAIEALLPHARKIRIERRPQRMSVEVNGVRLDVAQLSDGEKCLLALAGDLARRMALAAPKEARPFERPAVVLIDEVELHLHPGLQREIMPRLRRVFPQVQFIVSTHSPQVLSSLHAADVRILERFELRTLDRGTWRRDTNRILEAAFADPGRPPEIAAKLNLLRDAVDADRHEEARRLIHELSTMIEGEDPDVFFYQQLVPPEDAPEVSP

SEQ ID NO: 83021 - protein, 223 aa, Chondromyces apiculatus DSM 436
MRHLVKAAEPATVTETRAAPTTDLSTTARARAAFDQIDKGRVRAALAREQGRLCAFCMRRIDPDTRDAIGEPTMKIAHRTPIKAKPSEALLWKNLLGSCDGGQRSGWWTTSCDAAQGSTALTVDPTVNASCARLRYERRGSRKGLFITSDDPKLQEDVEKTLGLNSGDLPELRELAWKAFCDRQRKAAPNQYGRSARAEFFQAWMKQWSVQLPEMLGVIEAKL

SEQ ID NO: 83022 - protein, 486 aa, Chondromyces apiculatus DSM 436
MATKKADESGERRRVGRALPATKSTRRVARNDRTRERSKPSEDVTAIYVLKLTVENVRCFGPAQTLDLSDGHGKPKQWTVILGNNGVGKTTLLQALAASLPKEDKAFSPKEGDAVFSPALCVDLHQRAPQFMRASEEMTSLRIALALGGPLAAAASTFEEDSTEISIEADGLVGFTSRDVALRGLHCIGYGANRSMGSGSLLGRDTDDHVATLFNEGAVLRNAEEWLLQADYAASKPSKEQARARDRRDAVKSMLIALLPDVEDLQLLADIGSNPARPQPGIRLKTPYGWVPLQALSMGYKTLLAWMVDLASRLYERYPDRDNPLSGPAVVLVDEIDLHLHPAWQRTLLDYLSQRFPNVQFIVTAHSPLVVQAATDANIVVLRREGDHVVIDNGASAVRNWRVDQILTSDLFGLPSARSPALDPLLAERRRLLTKPRLSAADERALARIERDIGQLPTGETPEQMEAMDIIQRAASALRRTGGGAR

SEQ ID NO: 83023 - protein, 270 aa, Chondromyces apiculatus DSM 436
MIRIRKPTTMPAVLQRRGAAARETLCAAYRRAAAVSSGGQIKLDFDAALYRHRTVKEALHAAHHGKCCYCESKVDHVAPGDVEHYRPKAAVQQLRRAPLEQPGYHWLAYTWSNLLFACVVCNGTHKRNLFPLLDPGKRARSRSARLRAEQPLLLNPAWEDPEGLIGFREEYAYARGGDVRARTTIEEVLLLNDRPPLLERRRDHLTVVQRMQDVASNPGVPEGIRDKARTWLDEQTADSAQYAAMTRNALRAIPVPAPRRASPSRSKRTR

SEQ ID NO: 83024 - protein, 436 aa, Chondromyces apiculatus DSM 436
MRIQEISLINFRAFKEFKLKLDPQLTVLIGRNGAGKSTVLEGLAVALGAWLSGFSAIAEDQPIPRTAARLTSARASSDIPAEEASYPVVVAAEGEVLSTPVAWSRELRSVDGRTTTAGSSRLRQLAAQAEESLSSAPQTLLPVLAYYGTGRLWLHKREKSATKGKLKSRLEGYRASLEAASDHKGFEAWMAWRENDRLQRLARADEEGRPLTEVSSPELEAVSAAACGCLEGAKRIYYSANHRELRVEFEQGASIPFEALSDGQRNLIAVAADIAWRALQLNPHLGARAPSQAPGVVLIDEVDLHLHPAWQWRVLDDLRRTFPKIQFVVTTHSPQVMSSAPGASVCLIGPDHRVHRVREMAGKDVNTILEDIFGVTARPQAIRDKLDKLARLIEDGEVASARALLDELSRALGEEDTEVVSARWEISLAEVGDAAD

SEQ ID NO: 83025 - protein, 203 aa, Chondromyces apiculatus DSM 436
MRKQANDEQGGLCAYCMSLIPQSNKPLEPPDNTSMKIEHFEARNASRAKMFDWSNLLGVCIGDVGIEGGGESDQQARYHCDTYRGHLKVTEQGLDLNPAAFPPDIGERFSYTVSGEARTSQRFEPAERDKVERMIARLNLNLPRLRRNRAAVIGLLRRELQKKPTLARVKELLQDASAPGAKGLLRPYCQVAIHYLQKKLRQL

SEQ ID NO: 83026 - protein, 448 aa, Chondromyces apiculatus DSM 436
MYLTQLRIQNLKLLKDFELSFTDAEGRPRMWTVIIGENGTAKTSILQAIAMAAAGALNVNGLAQNVSSLRDKRDSKATVCIRADFLLDAKRQRSRVYPGYSGRKPKGGVVVHSEVELPPKRKDLVARSSYAGVDGTQDPITDARSMDAKLWFVAAYGVQRFLPGDPNARPVLDHASVERMRSVFQRVDLIGTGFANILKPEKARIYSRVLRDALFGKEGLLPGFNDLELRGQKGAGTTKTLQEGHRFVQNLPSGELKLAASWLSHGYQSTIAWLADLVGHILWEAQSKEALAPEDMEGLVLLDEIDLYLHPRWQRTIIRALKATFPRLQFVATTHSPLALVGLRPDQDEIVRLVIDDKTGDVRQLDMKQERAHEPDPRLMTGTEIYRTYFGIDQLYPDELGELLREHRYLAADPTRSAKADKRLDALEEKLREEGVEPDFPREPRRQR

SEQ ID NO: 83027 - protein, 373 aa, Chondromyces apiculatus DSM 436
MIGIARGPEPEALRLERRQRLARAILARREGSPVTFDGYQVAREALVPALNYKCAYCEMPLQIQGPPVEHFRPKECVENEGEPRDASRYWWLAWTWENLLFACSRCNTWSKKNKFPLAPGSSPLAEFSVALDKERPLLIDPARVNPREHIRFKWSEARGRWLPLPVNGSALGRRTIDELRLAVIDDGADHAKAHVEDRLSLCIEQLREAMSGGSGKDDREKVKRLWARWCRSLFAPRQPFHALTWDVLDAEFSAEERSTWGLTLPRLGRHEPPASSPLFDPADDPPGFGDLSEELQLRVRALGRHSSEQEVLGVLEEILRPRRGGRDWSDQELAGLLGRSIGSVRLYRRRLEERRSLKQPRGARKTTSRSREA

SEQ ID NO: 83028 - protein, 439 aa, Chondromyces apiculatus DSM 436
MHVARVEIRNIKGFGDGEDGVDLDLTDGGRINNLAGWTVFAGANGSGKTTLLRAMAVAIDGQTASGIAFERVPDWIHAGCAEGSVRIELERFHVVTDATTPEPFARRAPPLAANARWLREEKIWRNSLDDLPPFITEGPLNLVSFMAAYGPTRRVVGRLDDVTALMQSHAHRSAGLFREDAYLAESVQWLQRLDYQRLSGDADAERLLELTLRLLNDALLPGDFHMLGVSPTGLRVRHRGTELSLQSLSDGYRTTAALVLDLVSQVANQVSRGAPLEQRPDGRVIVPHPGVVFIDEMELHLHPSWQKRIGFWLKEHFPWTQFLVTTHSPFICQAADTLVRLSPPGQGQPVAEIVDEETHRRVVTGGADDAVVSSLFGLEYPHSDQAERARERLAILEVREFDGTLNEEEPQELERLRRAFPETATAAVERALRKVAAVS

SEQ ID NO: 83029 - protein, 206 aa, Chondromyces apiculatus DSM 436
MAGGVERCMYCEDSAGHAIEHFWPRSRFPERAFCWENLLLTCDRCNNHHKRTQFPLSLQGEPLLVDPTAEEPGMHLELRPREGLMLAREGSAKGETTIGVLGLNRYELRKGRKIAWTGLQALVERYGRFKEQDRAEEAALCAGTLTGHPFPAVLEVLLRTAERADAEQYVDPECLAVLRSHGSDLRALLARGLSSQAAPVSPARPL

SEQ ID NO: 83030 - protein, 124 aa, Chondromyces apiculatus DSM 436
MLRIFPNLQIIATTHSPFIVGAVPGAKVFVCRYDRERKTCVVADETAEYANKPVEEILLSPAFDGTQPFGEEISQLIEQRKAAIDAGDTSARARIEAELLEKNPEYFSYLNIEARLRALRGEVS

SEQ ID NO: 83031 - protein, 195 aa, Chondromyces apiculatus DSM 436
MIPVRRLEEPEVLQKLGQRWLKAFLKKRESNPKEKPPPNTYNHEEIVSTPKAMSHHYLSCSECNGVKKPNRSIPVSDCVDPCDTSVNSSEHLTFEADLIRARGGSPKGRSTIMKYILDRPELDGRRSRQLRLMVETIMTIQQKMIDEGRKSMTEQELEMLHAFAQPEWPFSLMLSVYLERHRHLLEGPRPASATT

SEQ ID NO: 83032 - protein, 393 aa, Escherichia coli K02; identical to SEQ ID NO: 81986

SEQ ID NO: 83033 - protein, 248 aa, Escherichia coli K02; identical to SEQ ID NO: 81987

SEQ ID NO: 83034 - protein, 553 aa, Photorhabdus luminescens BA1
MTKQLERKAKGGSLLSAFEIYQRNVSSDLPEDNKNTDEWFELCWKYLQNGYTDESDRFHPDNALYLRSLSLRDFRRFSHLEVNFEEDLTIIIGNNGKGKTSILSAIAKTLSWFSANILKEDGSGQRLSELTDIKNDSENKYADVSSNFYFGRGLKSLSLRLSRSASGTAERRDSIIKTAKELSDVWRVINENKTINLPAFAFYSVERSHPFNKSQKDSGERREERFDAYNHALTGAGRFDHFIEWFVYLHKRTVSEVSSSIEMLEQQVRDLQKSVDNGMVSVKPLLEDMKDKLVATISKHNASIENQMLPESAQRKIVEQAITTVVPSISRIWVETATGVDVIKVTNDSLDVTIEQLSDGQRVFLGLVADLARRMVMLNPLLRNPLEGRGIVLIDKIELHLHPKWQQDVITNLRNVFPNIQFIITTHSPIVLSTTEKRCIREFAENNDDSSVQFLQPPLMQTKGSENAEILEQVMKVFSTPPNIRESHWVSDFERSLVGKGEELSEQSHDLYEKIKGHFGPSSPELKKADSLIRIHKMKNRINKIKSEKGKQG

SEQ ID NO: 83035 - protein, 216 aa, Photorhabdus luminescens BA1
MKELTRPERPEILQHYIAGQDAWMDVDQGAIWPRLEEMQGGFCAYCECRLIRKHIEHFRPRDKFPAQAFDWHNLFGSCGDSSKSGGWKRCGIYKDNGAGSYNANDLIKPDEDNPDHFLRFLTSGRVVPADGLTGSELKKAEETIRVFNLNGDSRLVGSRKTALKNVILEVEALYEAYDELSEDDWTKMLDMELENIEGEEFSTALKHAWQYNKKYV

SEQ ID NO: 83036 - protein, 582 aa, Klebsiella quasipneumoniae
MQLLRIRIPAFRNLRELDIAFDTHLQPSASATDAPPKPIRSHALIGQNGTGKSNLIEALLTIFRDVDLDHDASFDYTLEYSIRGHVIHIGADTSRQKRPYVWVDGKAESQGYLLKNRELLPAHIFAYYSGRNERIEALFQEHQRRFNQRQEITTDEVLSEQLLKNFTGSESDIRAVEEAKRRHESRLKQAGDDRLRRLFYCRGGHSQLVLLACLLSEDPVFQKMLKNLHIESLESALFVLKEPYRLREKRRSGKFDQQELNEGDPRFWYARGNVVSEFLDKLWQVAWAPIEQEAIKQIDFRGRTEKQKQLYLFVPNQEKLKQLGELIGSADSFFRYAEGAYIGDLIEEVRITVKKRDEHGGKVSFTHLSEGELQMLTVLGLMRITREDQCLFLLDEPDTHLNPIWKLRYFDDIEGVMSSNTAAPVRSESQIIITTHDPMMVGSLKREQVYIMRRDGNRTLVDTPDEHPQGMGVTGLLKSDLFGLSSTLDIETERRLFRRNELFVLSPRSLEEDEELRRLSAELADLGFSTADFRDPDYAMFVRKMAQHRRFRKPVLTPEEQAEQDVIADSIIDEILREEGDL

SEQ ID NO: 83037 - protein, 285 aa, Klebsiella quasipneumoniae
MIWIDLEHKRPTDTNIPNWVPWTQARWDAWLAKSAQLVAALAALDAEDERNERNALIDANSAHWGVLKEWLLALSAGKCWFSEVRELYTHYDVEHFRPKKEAKALDASLRDGYWWLAFDYMNFRVCGNVGNRKKGGWFPLKDGSLCSTYSEPCEESETRYLLDPIDDDDVALIAFDEEGKVIPMPGSSAWEQERVNETVKRLKLNEHAPLAEARRKVWQQVDRLIDDYTKAKARCRTGNNPVAKAKLTEVRARVREMTSTTAELSAVARWCLLVRNDPQLSRLVG

SEQ ID NO: 83038 - protein, 451 aa, Photobacterium phosphoreum ANT-2200
MNIQNLKIHNFRSISKLDLSLDTENRVVCFVGENGSAKTSVLSLIAEAVVSQTKLTFPNFKPNDGKRYRSLNTSEINIASSFYSVELHYSSIDNRSYQFKKLLGRQKNLPITEYQEIIQGINLTREHYSEYSNLSSLEASQDYLVSNVFLIRPSIRYEMDGLEVSKIGTKTPEYSVRERYLNEMPYPFTVAHIGESIQSIVLDMIIDATIGYEDAGKAFNAITLILNRITGKEFGQLQVSQSPYREVVSSSMGPIRTFSQGELDLLVTVSSILSRQIFHFKSYTEDQKRNLGLNSLFDVPGIVLVDEIDLHLHPRAQENYIKRLTEIFPNIQFIITTHSPFVVRGLPKHSKVVNLPSGRVFEENFEAMDIDSITNIIFGYDGGFSEVVKDKLSQFKKALVSEEPNIHFLQQLYRELASSDSAKEELVLYLASYADEELISIVKGGEDAESR

SEQ ID NO: 83039 - protein, 274 aa, Photobacterium phosphoreum ANT-2200
MRKVDRASVPIPNRLQNLTDDNLSHLENYKQISGSIYGHQDVKDSLQMLYFEKCYICEGDISSGDYDVEHYLPKKHFPQLGYTWQNLHKACAGCNLAKENKSFFVTDEEGNVTDIKLLDPSSENYDVADYVCFDIDSKAELVSRGTNPTVIMKAQNTVHYLNGNYKSDYGKELCYLRSNKTSGFLRFCSNNLVEHRNRLRQIKLTIENYQIPEDSELLEMDQNICQSLINADNHYLSDKAPFSTSTRVQLFPTLKITYAELVRIKNHMKQILGM

SEQ ID NO: 83040 - protein, 457 aa, Escherichia coli O86:H34 str. 99-3124; identical to SEQ ID NO: 81030

SEQ ID NO: 83041 - protein, 211 aa, Escherichia coli O86:H34 str. 99-3124; identical to SEQ ID NO: 81031

SEQ ID NO: 83042 - protein, 763 aa, Escherichia coli O104:H21 str. 94-3025; identical to SEQ ID NO: 81340

SEQ ID NO: 83043 - protein, 308 aa, Escherichia coli O104:H21 str. 94-3025; identical to SEQ ID NO: 81951

SEQ ID NO: 83044 - protein, 457 aa, Escherichia coli O145:H28 str. 2009C-3292
MKRLYYTHHDSRTLKLAVEGDVSDNANIFTVIVGKNGVGKSRLLSQIAKDCIQDVHFLKTFNPLFDREITPKLIAVSTSPFDKFPPGRRSLNHQRKENNYRYVGMRGEGPFGVSNAVSLLSSAARGWLEKLAYSENPANLLDVFHSIDFEPHIEFVFKPTYNGPDTPDYNFIGVYSDEILTEVKELYLKYNIKIDRKNIESLLKLNSESRHDIYEALVEINRFEPERRAVTLSVDFTNGETLVGSTYANNYFSRSILKLMNAGFMRLMDMRLIKKSYGPMSLKRASSGEQCLLVMLLGIAGHITDGSIILIDEPEISLHPRWQEEFIIMLTKAFLTYSGCQFIIATHSPQIISNLPNKGCYITSLSKSYLYKAKYFSNRSADYQLAELFDAPGIMNEYIARLAFNLLSKVKTAKLVTDDNWRELKQLQLLLENVNSNDPINELVNSVSQVCEIYAKN

SEQ ID NO: 83045 - protein, 211 aa, Escherichia coli O145:H28 str. 2009C-3292; identical to SEQ ID NO: 81031

SEQ ID NO: 83046 - protein, 384 aa, Acinetobacter baumannii LAC-4
MKFKSVELSGVGGIDYLKIDKINPKFNIICGENGVGKTNILEALAVPFSNEISRKFIRNVNFLKGKITIEHDIENEDTLISEIEDQNLIGQVVYPDNKAYLLFVDCNRGLSYQTMTSISSDEPTAGSFNHSNRMCINGDDIKGWFVKRFLYSKHEDTLTNIQQKNLNLAVSSFSILDKNFKFKKISLNHEIIINTPTGDLFFERLSSGYKSIIYIILGLIKEIDYRLAAKGKCAAEFNGIILIDEIETHLHPVWQGKICIVLKEIFPKAQFFVTTHSPHVVQTANRNEVISLTRSDNNEVQVRDLPEAEYGYQGWTIEEILKDVMGMPDLRTKKYDEVKRRFDNALDNQNINEAREAYNELDMMLHPRYPLRPVFRMQLDSLGE

SEQ ID NO: 83047 - protein, 246 aa, Acinetobacter baumannii LAC-4
MIKLERGKKPEYLTDAQVEALTKKFKANSKDAVWKHKGIKRALLLSSNSKCAFCECELMVSGSYMEIEHFKLKNDYPDEVVSWENLLPSCKRCNTTKGSHDVVAEPIINPFDINPKDHLSQSKHRIYAKTPLGESTTVALNLNDESLTRPRFFVSDYVTNKIEEIYQDISSKSKLTRHDRNKLSTLLTSCQADHAFSAFASTALHESYEYVDVVTKLKTDKLWDEQMEELHQCSLKLILDRREKIK

SEQ ID NO: 83048 - protein, 422 aa, Pseudomonas aeruginosa PA96
MYLRKLDLTDFRGFSSLRWELKEGEEAGWHVLIGPNGAGKSGFLRSAAIAFTGDIEFTASRRTARDFIRKAEGVEKAIIQVEVAPTIGWDKSGRQGPMSSKPVKGSITLHSDGAVKSSPTKNVNFWGEGQGWFSAAFGPMRRFTGGNPENVRLFAGFPRLARHLSIFDEGVALTEALEWLQKLRFRQLEKVSSDSAETGLLGKVRQFVNQSGFLPHGAKLTEVTSDGVKFEDGNGVEIPIVEMSDGYRAVLSMTFELLRLMALRYDEDSLFSEDASTILAPGVVLIDEIDAHLHPSWQREIGPWLTKLFPAIQFIVTTHSPYVCQTALKGSVWTLPAPGSGEQVHRIAGEQLTRILYGDVLHVLNSDAFGGLPGRSEDAVHMLDRLAQLNRKLDRGTLSAPEVSERADLKQTLGPVVEGDEQ

SEQ ID NO: 83049 - protein, 267 aa, Pseudomonas aeruginosa PA96
MISITAAILDKRAVDRLQDLQDAVNNLPDYAAQVAYAKSSWSRKPSSLFDGLKLKLAEMCSGNRRCAYCEDSFADEIEHMRPKDLYPEQAYDWNNYVLACGPCNGPKNNQFAILSDPLALVDVTRKRSAPVIQPVAGRPALVDPRIENPVDFLWLDFRTWRYVPNSDDETSEIWLRAEYTIDVLRLNKREALVRGRKSAFSGFSSRLTTWLEKREHWSPEEQQEFLDDFRAERYRSVWERMKLYRNQVPALHDVAQLIEAAPEALQW

SEQ ID NO: 83050 - protein, 576 aa, Pseudomonas aeruginosa 3581; identical to SEQ ID NO: 82792

SEQ ID NO: 83051 - protein, 270 aa, Pseudomonas aeruginosa 3581; identical to SEQ ID NO: 82793

SEQ ID NO: 83052 - protein, 576 aa, Pseudomonas aeruginosa 3580; identical to SEQ ID NO: 82792

SEQ ID NO: 83053 - protein, 270 aa, Pseudomonas aeruginosa 3580; identical to SEQ ID NO: 82793

SEQ ID NO: 83054 - protein, 422 aa, Pseudomonas aeruginosa 3574; identical to SEQ ID NO: 83048

SEQ ID NO: 83055 - protein, 267 aa, Pseudomonas aeruginosa 3574; identical to SEQ ID NO: 83049

SEQ ID NO: 83056 - protein, 576 aa, Pseudomonas aeruginosa BWH059; identical to SEQ ID NO: 82792

SEQ ID NO: 83057 - protein, 270 aa, Pseudomonas aeruginosa BWH059; identical to SEQ ID NO: 82793

SEQ ID NO: 83058 - protein, 465 aa, Janthinobacterium lividum
MLKKIAINGHSLFSNLSFPLSSACDAGTNYKTVIIGPNGTGKSTILSCIADALTIECSERKIKSLIGIDYSYDLEAEMAGKALLISSSDISSGGNFGKGKILAISSTPNDRFPFLAKNSVRKSEHYVYLGLKTASNNIFFSNMKEKMFQDMLLICRSTRRVNGALEVLNKLGFNSKFSITLERGSNFAAFNDSGRRKLHSNAMAGSASFQNAAFRGFVTSDFYIENEVAIKDFLTSIENDASAQANLSTISRNKKLFDKLTMISRLTEAKILTIKTLSIFSNNGIDLHQSSSGEFNILRIFLSIIAHVENDSVIMIDEPEISLHPNWQIDFLSILDAALVGFLGCHSLIATHSHFLLSNLEGRNSTILALQFNHERGEIFVDALDVNSYGWSPEHTLYQVFGVTGFRNKYLELDLRIIIDYMSNDSGSFRKFKESLGRIRKFNITEIDPLFKLINKAEKIIKEKS

SEQ ID NO: 83059 - protein, 223 aa, Janthinobacterium lividum
MKNALRFTEQIVAAYTYTVAEQSLVDALHNSTLGHDEMWSGSIATIPHKRKDRDTLKTNIKKFLELAQDGYCYYCGFSFVSRNGERGYKGIQRDHIAPKSLYKQFTFQSRNLILACSKCNSSDYKGDTETVEKASAEYDKCDFNIIHPYLDKFSRHLQLQDDGLLKLVRKSRKGKATKKMFGLDETFEVTLRSVCLQFDKYQVNTLEELLLARISKVNISVHK

SEQ ID NO: 83060 - protein, 436 aa, Pseudomonas sp. RIT357
MHIQKLQIENLRSFKAVGLDFNVPATSNLQIQYPNVNVLLGDNGLGKTSVLRAVALSVLGPLLSGGSGFVPEGLVRRTDAAEKKTPPATITATLLSTDEEKNPKQTDHPLPDQFSLKTQISSFGSTERMRSKVSPRDIENTVEFLQFNEDNPAFFIVGYGASRSVEASARVDESARKKSRLRRYERVASLFEEHVTLMPLSYWLPEYAKSNKGRYTQVINLINDLLPLNCQIQKTVQENENLFEMNGIVLPFRALSDGFRAYIGWIGDMLFHVCQGVATGLKLREMRGVVMVDEIDLHLHPEWQKVVVPTLAKALPNVQFIFTTHSPLVVGSLMSQNLFLLSQEEGSTLIKRLPEHVRGKSSEQILLSPYFGLDSTRAESTSTKLNELARSAVSGNRDASANYLKLMATGLGFDQPPSPPTTSAPKRRKNGEGVKK

SEQ ID NO: 83061 - protein, 283 aa, Pseudomonas sp. RIT357
MIRYPILEKDLIAQIKERNKTWLGRAKARTGTYVAAGKYTGGTEFWGQIKTVYIALQYEKCAYCETKLQGSVLASKVHEVEHYRPKSSIQAWPIHLNWATGAASPTGYYKLAYHHFNYAIACTRCNSTLKSNFFPIRGHRDVQGSDPAQMGNELALLLYPISTVDVDDPQTIITFDGVLAVPAQQNGHAYERAVTNIEFFQLNHEDLTSRRALALIELWVALEALAADKTDVATRKVAQQLVTFKCSAQSEFTACNLAFRQLYQSDYNAAKQMALLLAQALPE

SEQ ID NO: 83062 - protein, 412 aa, Pseudomonas sp. RIT357
MTNRYIESLHVDHVRKFSRLDMSFGPGFNFIAGPNGCGKTSVLVCIAHCFDTSGLSYSTVSKESAFWVDMTDGKEKLRIGLGRNNVHGGYRQGSLNLTGGVPLQGEGRVVIRPYEDKVKFLCPLFIGASRNITYSLIGGVSRELPPDEAAKRYKQGSVKSLYGEWDGNIKQWLINRYFIIDKPWAEVERKNFERLEAALKYIGPSDSEFAFVEIGRDLEPIFSIYGQRCYLEELSSGFQAVFTIIAMIFEWIEIGGNSERLVESAYGTVLIDELDLHLHPEWQFTLRDGLAKLFPKLQFIVTTHSPHLLASAKKSEVLIMPVGSVERDIHASDQIYSGWTTDQILSEVMDVKSLENKDHHRLVTAALAQAELKSLKGLEQAIINLEAVSHPSDTIVTVLKTKLASLVALKDD

SEQ ID NO: 83063 - protein, 246 aa, Pseudomonas sp. RIT357
MIKLARSPEPQYLKDNKNEFWVSLEDAINKYGSYKLIPKLEKEKLVGFYRHPEVKVPLVKSSNGKCAFCECIPSEGGNVEVEHYRPKSLYPELTFEWGNLLPACHRCNGDKFDHDTGVEPIVNPFDCDPKDYFYFDGLNIKGLQGVGNEIAERTIEVCGLNSLRLWEPRSKIYVSLHDFEASLFTAINNYNEAVTPVKKRNRLKSIRESVDRIEMLAREGERYSSFCASYLNGSEIYKGAKKLISE

SEQ ID NO: 83064 - protein, 352 aa, Klebsiella oxytoca HKOPL1
MFGLQSHLHLKCVLDTKNITYILAIISGLINGQMILSDESIKHARKSRYLKDEELKNRNIKLDESIAIICRESENKLTLDVLCDILLMLEAGKFPEENLNDIYFSVAKGRVYSERKSLVYDFNGIDIIKYLFILDVINVSDFQVMHLNTQKEVSIISLSSGQRTLFGHAIVLSSFAEKNCMVCIDEPENSLHPEWQLNFMHFISLLCPDTLGAHVFIATHSPQIISGMRFDNGCVLSLANRDNIELLKMTDKKYDNGGLYELQPLKIYREQSADKQLTGVFKSPGYKNDFIIRKLLLILSKASKKINLTKNDNEFISEIDILFEKKRIPEGDPVQLLLKQVLSFQKARSSDD

SEQ ID NO: 83065 - protein, 195 aa, Klebsiella oxytoca HKOPL1
MCAVRKNFRKEVRDYYRNEQGFTCPYCGRLREEFHGGQWDIDHIIPKSLYPEYLYCPRNLAVACKDCNTHKSTNNPLLSPLEHLSPYPENSRSYKIIHPHFDSYHEHIRLTRDNNGRTCHEVITDKGRETFHVCHLIRFSEALSGTSEYVPELGTEIGIINDVSESVQMWLDGYDALTPHDAEIALQALMQRIRR

SEQ ID NO: 83066 - protein, 414 aa, Acinetobacter sp. Ver3
MKYLVNISGEIPHANLYDINIPLNGRNLILTGRNSSGKTSFLNKLFETLNNDLDSLNDNQQQYKNNISHWQSEIHRLGPSNPDSQGLKNLVKEYQGKLKLLETGFNIETINFEEFKNKYKEYKAIFRNFDAMREIHIDESTQTTLSNTEIERARNAFRQNIGSRLEQHLVNLKTSEAFAKGIEQNEIKGKKFENWFSDFEISLKKLFENEKTLLVFKNEERKFEIYNGKNYTTFQNLSSGYKAIFDIFADLLLRTEFFDITPSDLEGIVLIDEIDAHLHISLQKLILPFFKDSFPNIQFIVSTHSPFVITSTDNDTVVYDISSGEFFEEDLSRYSYESVIKGLFHVEIKSAQLESEIKAIAEILNKDPNNYEKLRDLLKNISPFAKQLDVESKSFYFKALNHLLDNQELGDLDV

SEQ ID NO: 83067 - protein, 221 aa, Acinetobacter sp. Ver3
MFKVIRSERPEDWTNSDYTDPVVVKQLKKDFLSKCYLCEQADFGYINVEHFVPHLNKSEKLRTDWNNLYYACSHCNSIKGSRHKELLDCCEESHNVDTAISLEAPSVPNGKIILINALNNDSDLFELTNKTIALLEQCYNNANSGNQQVSHQYLKEKILEEHAYLQNLRFQLKNGLNRLLQREKDDLVERISNMLKPNYPFSAFWKTYVRNDPFLSEILNQ

SEQ ID NO: 83068 - protein, 452 aa, Escherichia coli BIDMC 82; identical to SEQ ID NO: 82562

SEQ ID NO: 83069 - protein, 219 aa, Escherichia coli BIDMC 82; identical to SEQ ID NO: 82563

SEQ ID NO: 83070 - protein, 425 aa, Rhodomicrobium udaipurense JA643
MKIRRLSVAHLRAFEQAQFEFDPAFTLLVGVNGVGKTTVLETLRICLSRLLPKFTASKSRPDTFVVDDIQVGTPAMTVDLDLTINGEGRHLLIHKQREQNVSHKSGVVREQTLATPDRETFSPDFGKAAKALKTAKAQSVAVYFATRRSLVSDEQPKSGKASGGQAVAFADALVARPLRLAELATWMHAQEALSRELLRAGLHLAAMRAAARRFLPDCEGLRAEMEGGPRLLIEKHGRTLDVRQLSDGERSMLALVLDLARRLSQANPGLDDPVRDGVGLVLIDELDMHMHPLWQRQVMSLLTGTFPNCQFVATTHSPQIIGETQPERIILLQAEEGRIVPKRCGQAYGLDTNYILEHLMGTPSRPEPTRRMIAAIEASLDEGDLDPARSQLAALRTLIRGDDPTVAGLEATINNLEALGDASDQ

SEQ ID NO: 83071 - protein, 230 aa, Rhodomicrobium udaipurense JA643
MRQINKGAEPGELTQWKAQNRALPNYCYTSLAAAHRLAVRTALVTEQRGLCAYTGRRIDVENCHIEHLRPQAHCGIGEDVDYRNLVAGVPAPNTPQLPYGAHKKADWPAVADEHLFVSPLSGGCAARFSFRLNGEVEAADSADNAAVETIARLGLNDEALVQLRKAAIAATLQIRGRGPASIGIADARRRLRDLERAEQQAGALEPYSFVLVQALERQIRRIEKIREARG

SEQ ID NO: 83072 - protein, 451 aa, Pseudomonas syringae pv. actinidiae ICMP 18884; identical to SEQ ID NO: 82152

SEQ ID NO: 83073 - protein, 189 aa, Pseudomonas syringae pv. actinidiae ICMP 18884; identical to SEQ ID NO: 82153

SEQ ID NO: 83074 - protein, 422 aa, Pseudomonas syringae pv. actinidiae ICMP 18884; identical to SEQ ID NO: 82164

SEQ ID NO: 83075 - protein, 214 aa, Pseudomonas syringae pv. actinidiae ICMP 18884; identical to SEQ ID NO: 82165

SEQ ID NO: 83076 - protein, 451 aa, Pseudomonas syringae pv. actinidiae ICMP 9617; identical to SEQ ID NO: 81072

SEQ ID NO: 83077 - protein, 195 aa, Pseudomonas syringae pv. actinidiae ICMP 9617; identical to SEQ ID NO: 82181

SEQ ID NO: 83078 - protein, 306 aa, Pseudomonas syringae pv. actinidiae ICMP 9617
LSHLSAVLARNNAGEQIDFPVLAFYRANRRWSSARISAEFAAQQRTSRFDGYANWFDAVADLRDFESWLIARTLERLQDRLDSTSTVEREDELEWVNRAIRLAIPDAHDLRYDLRLQSLLVDMGEGNAVPFHELSDGQRSLIALIADIARRMCVLNPHIGKDVLANTSGIVIIDELDIHLHPAWQRNIAPTLKKAFPKVQFIATSHSPQVIGSLQPGEVILLRNGDSSHPRATYGLDSSTILEEVMGVPQREPEIEVLLDELFSTLENNELEKARLQIDALKKKAPDLPEFAGAEALLKRKELIGR

SEQ ID NO: 83079 - protein, 214 aa, Pseudomonas syringae pv. actinidiae ICMP 9617; identical to SEQ ID NO: 81071

SEQ ID NO: 83080 - protein, 479 aa, Acinetobacter baumannii 1451147; identical to SEQ ID NO: 81176

SEQ ID NO: 83081 - protein, 223 aa, Acinetobacter baumannii 1451147; identical to SEQ ID NO: 81177

SEQ ID NO: 83082 - protein, 476 aa, Acinetobacter baumannii 6112
MQIQSFSLKNIGQFQDLSVSVAPTQDYPSNITVFIGNNGSGKTSLLKSVATALTWFVARLKHDKSNGTPIPESVILNTANAAAVEIIVNDQNLQQQIQAYTWRITKNRTARKTEFSTYLSELNQLTDYYKQWLGDDDQSSLPLIAFYPVERSVIDIPLKIREKHQFLQIDGYDNALNNAVDFRRFFEWFRDREDVENELASQVNDYADILKEELELVASLKNLNKNKTDYQDFENLKNKLDKIINALEANNRQDIATKDLQLEAVRQAIYTFIPEFSNLRVRRKPRLHMSVDKNDKTLNVSQLSQGEKSLMALVGDIARRLAMMNPKLDNPLHGKGIILIDEIDMHLHPQWQRSIIQRLQTTFPNCQFILSTHSPLVISDTQNILVYDLDGQEVNALPSLYGQDANTVLLQYMDTSYRNPKVAEQISQAMDAIQNNDFELANQLIQTLKLELGESQLDVMRLVAMLKKRTLAKQGK

SEQ ID NO: 83083 - protein, 215 aa, Acinetobacter baumannii 6112
MQQIIKGIEPIELTEYKRKNPTHRYDDLGEDPEQIRLAIRQACLGEQLYLCSYCCRQIGSKDHDCMNEHILPRQHYPQHSFDFNNIVASCTAKGSCDDAKKNQEISISPLSPRCETEFKFNISGTVTGLTDDAKQTIDVLKLGDSLQQNQKLVDIRKQAIANFLFSQSTTIDDLVEDDELLTLLVEDLQQTTEGKLQPFAPIITKALKNWIDGNK

SEQ ID NO: 83084 - protein, 479 aa, Acinetobacter baumannii 72431; identical to SEQ ID NO: 81176

SEQ ID NO: 83085 - protein, 223 aa, Acinetobacter baumannii 72431; identical to SEQ ID NO: 81177

SEQ ID NO: 83086 - protein, 530 aa, Klebsiella pneumoniae UCI 64; identical to SEQ ID NO: 82680

SEQ ID NO: 83087 - protein, 209 aa, Klebsiella pneumoniae UCI 64; identical to SEQ ID NO: 82681

SEQ ID NO: 83088 - protein, 573 aa, Klebsiella pneumoniae UCI 64; identical to SEQ ID NO: 82678

SEQ ID NO: 83089 - protein, 269 aa, Klebsiella pneumoniae UCI 64; identical to SEQ ID NO: 82679

SEQ ID NO: 83090 - protein, 418 aa, Bacillus thuringiensis serovar kurstaki str. YBT-1520; identical to SEQ ID NO: 82064

SEQ ID NO: 83091 - protein, 215 aa, Bacillus thuringiensis serovar kurstaki str. YBT-1520; identical to SEQ ID NO: 82065

SEQ ID NO: 83092 - protein, 446 aa, Sphaerotilus natans subsp. natans DSM 6575
MRIHQLVLRNFRRYERASVQFHPRFTVLIGNNGAGKTTVLDALAMLLNTYFQGARLPTGGGTIKADDARAVYRNKHGQVFRERMDEVALEATAEVAGAALTWRREIGDRGGQAKNLVQLGAEGRAQIKAGGSPDLPLLLYYGAGRLWTQHDNVETSGPTSQLDAYRYCLDPKSDHKAFERWFKKLAFSALQRGEASPALRAVQGAVQACIPGAQDFFHDTEYDELTLRLDKEGLMPFNSLSDGYRNMVGMVADIAHRASRLNPQHGAEAARRTAGVVLIDEIDLHLHPKWQRRVVADLQRAFPNLQFIATTHSPFILQSLLPGEVIDLDRQPLLATTETVPVAGLAAPGPGGPFSHRSIEDIAETVMGIDLPQRSERRAQMHEAAKAYYLALNQPRPTDPEALEALKARLDALSAPFSDEVAYHAFLEMERLAAGLGPSRAISENP

SEQ ID NO: 83093 - protein, 177 aa, Sphaerotilus natans subsp. natans DSM 6575
MHLDASLAVEHVRPKKPPGATDVLPERALAWDNFLLACTNCNATKGDTDVVLADYLWPDRDDTFHALQYRIGGQVDSAAGQDKVRADRLIDLVGLRKMPDTPEAADRRWLNRREAWDMAERARQRLMTCPQAARELMREQIVETAKAKGFWSVWMTVFHGDPDMTARLIAASPGTRW

SEQ ID NO: 83094 - protein, 519 aa, Pseudoalteromonas citrea
MKIKEVTINGFEHKLICNNFEDNNNYYTVLVGKNSAGKTECLIQVIGCLLRLQLKKNNSPYIDPLDEILEHEFKRYQESYEFETKLTFSESTNSKLEEMVKFKKSNSARIIKKFDGSEVTLNDGYFRHSLKTYPLLNKEIYLNIIAISESPYSKFPILNSEYKNSYSLFSPQLLKNKDTVTVYADDYVLPQTQRLVKSIFHSIACKTKVNLRALFELLKFELKIKVSIDLKDRYAKHSEIGVLKFIDVKVVQKQAEGVLFEKTPAQLRKYWEYLSERFDLSSLQGKSYTESHSSTSILLDIIGDYEGFEALNSLIEYEVLSVNKIAFKNSHSGDYVDSTRLSSGQYCLLTLFFSIASKISNGSLILLDEPEISLHPYWQAQIIPLLNSTFSNYINCHFILATHSPHIISNLSNINSSVVIFDSNDKSSHTVEGGKISSQSVDFQLAEVFEYPGFRNEYVNRELISYLVQVSKGREITDETYKTIRRIVELESKLDSSDPMLELIYAVKKTLKANLNEGC

SEQ ID NO: 83095 - protein, 233 aa, Pseudoalteromonas citrea
MKAVKYNKEQEAFVDNFRKSLSSHDKGIWGYDYEFETLHASAKTDELKSKASIIREIKSSIKEHYLVQQDFKCAYCKQKNLTLNKKTWETEHIVDKHSHGIFTFEPLNLCISCPDCNGADGKGTKQVLVKPSKAKKPRYPKSSASFKIIHPHFDEYDEHIEIQNQNGNVLVFKPLSKKGRETVEICGLLRFCYKYSNYSTENISDTDEVSEIVNKLKSNPELLTEVLRRYSQA

SEQ ID NO: 83096 - protein, 413 aa, Fusobacterium necrophorum BL
MKIKKIEIKKLKGIKNLSLSFENEGKPLDIIVLAGSNGTGKTTILEVIKNIFVGDYSDYGNENFPVRMEIFFESLEEVAISKSKMSSKETNIKQWKILNAFRNYSSLKEELEQEFFDYQLAKNLKILPKIIYLPTRTNFQNVNTKTTALKASNHFVNIVDNEIFKDIPSYIATRVYYVANTQENLTLKEAKEKVAEEINSVFKILDLDIKFIGLSKDEESNPIFSNSAGEEFDINELSSGEKQLFLRTLSIQMLNPKNSIILIDEPEVSLHPEWQQKIIEVYRKIGSNNQIIVATHSPHILGSVRKENIFVLVKDTEGNITVKTGEELYASYGQPTDKILEGIMNLSSARVPEVASKLENLRQLVDNNKYNTEEFKEKSEELHEILGEKDIDLMLIDMDVELKQKENLNAQSE

SEQ ID NO: 83097 - protein, 189 aa, Fusobacterium necrophorum BL
MLKVNKRKEPLEFKEYKKKKKPINWEGYDNKIKENLKKSLLKEQEGNCCPYCEVKIHLERSHIEHIKPKDKFPKFLHEYDNMIACCVSNKNCGATKANQWDNLFINPVLDNPEEYFKYDIKTGRILPIDEVGYKFDRAETTIRFLNLNEKNLCDKRKVYILKFRDTQKEYRKFFQEFPSLKRYLQNVLT

SEQ ID NO: 83098 - protein, 413 aa, Fusobacterium necrophorum DJ-1; identical to SEQ ID NO: 83096

SEQ ID NO: 83099 - protein, 189 aa, Fusobacterium necrophorum DJ-1; identical to SEQ ID NO: 83097

SEQ ID NO: 83100 - protein, 435 aa, Fusobacterium necrophorum BFTR-1
MQIKQLQLENFRCYEKINISLHPKYTVLIGINGAGKTTILDSLSIALGGYISNFDGMGSYGINKEDSHYKMYKIGSTIEKEHIFPVSISATADINNREYFWKRSLNGEKGRTTTTDTKEIMSYAQSLIEEVKSGKSQKILPMIAYYGTGRLWMQKREKHSPIDKQIFSRLKGYTDCLDSASNEKLMLKWFERMTYLELQEDTKIPELSAVKQALSESYKRMDDSIQDVHFHFKVKSNELEVTIERKNKTVESLPLRYFSDGIKSTFSMIADIAYRMAVLNPQLLDNILLETYGVVLIDEVDMHLHPKWQTKIIDVLCSTFPNIQFIFTTHSPSVLANIPNEHILVLDNLQITKLSEKTYGRNIDNIFREIMQVEIRPEKIRTLLKNFDTALDNGQIEQAKQLLYELENILGKDDSDVVEARMSINLEETFHQVEK

SEQ ID NO: 83101 - protein, 206 aa, Fusobacterium necrophorum BFTR-1
MILIKKKIPPRSFTEYKNQPTSSFDELPTDIKQELRLSLLKEQGYICAYCMKRISEETDVKIEHYKPKSLYPMEELNYKNLLAVCDGGIGTPLKRQTCDTQKGSQELSFNPQNESDVSTIFFSRNGKIYSSNPIFQTEFDTILNLNDQYGYLIKNRHKALITFQKKISKMNNSQIGNYYKWLKENSTEKKLEYLGIILWYLSKKFE

SEQ ID NO: 83102 - protein, 413 aa, Fusobacterium necrophorum BFTR-1; identical to SEQ ID NO: 83096

SEQ ID NO: 83103 - protein, 189 aa, Fusobacterium necrophorum BFTR-1; identical to SEQ ID NO: 83097

SEQ ID NO: 83104 - protein, 435 aa, Fusobacterium necrophorum DAB
MQIKQLQLENFRCYEKINISLHPKYTVLIGINGAGKTTILDSLSIALGGYISNFDGMGSYGINKEDSHYKMYKIGSTIEKEHIFPVSISATADINNREYFWKRSLNGEKGRTTTTDTKEIMSYAQSLIEEVKSGKSQKILPMIAYYGTGRLWMQKREKHSPIDKQIFSRLKGYTDCLDSASNEKLMLKWFERMTYLELQEDTKIPELSAVKQALSESYKRMDDSIQDVHFHFKVKSNELEVTIERKNKTVESLPLRYFSDGIKSTFSMIADIAYRMAVLNPQLLDNILLETYGVVLIDEVDMHLHPKWQTKIIDVLCSTFPNIQFIFTTHSPSVLANIPNEHILVLDNLQITKLSEKTYGRNIDNIFREIMQVEIRPEKIRTLLKNFDTALDNGQIEQAKQLLYELENTLGKDDSDVVEARMSINLEETFHQVEK

SEQ ID NO: 83105 - protein, 206 aa, Fusobacterium necrophorum DAB; identical to SEQ ID NO: 83101

SEQ ID NO: 83106 - protein, 413 aa, Fusobacterium necrophorum DAB
MKIKKIEIKKLKGIKNLSLSFENEGKPLDIIVLAGSNGTGKTTILEVIKNIFVGDYSDYGNENFPVRMEIFFESLEEVAISKSKMSSKETNIKQWKILNAFRNYSSLKEELEQEFFDYQLAKNLKILPKIIYLPTRTNFQNVNTKTTALKASNHFVNIVDNEIFKDIPSYIATRVYYVANTQENLTLKEAKEKVAEEINSVFKILDLDIKFIGLSKDEESNPIFSNSAGEEFDINELSSGEKQLFLRTLSIQMLNPKNSIILIDEPEVSLHPEWQQKIIEVYRKIGSNNQIIVATHSPHILGSVRKENIFVLVKDTEGNITVKTGEELYTSYGQPTDKILEGIMNLSSARVPEVASKLENLRQLVDNNKYNTEEFKEKSEELHEILGEKDIDLMLIDMDVELKQKENLNAQSE

SEQ ID NO: 83107 - protein, 189 aa, Fusobacterium necrophorum DAB
MLKVNKRKEPLEFKEYKKKKKPINWEGYDNKIKENLKKSLLKEQEGNCCPYCEVKIHLERSHIEHIKPKDKFPKFLHEYDNMIACCVSNKNCGATKANQWDNLFINPVLDNPEEYFKYDIKTGRILPIDEVGYKFDRAETTIRFLKLNEKNLCDKRKVYILKFRDTQKEYRKFFQEFPSLKRYLQNVLT

SEQ ID NO: 83108 - protein, 413 aa, Fusobacterium necrophorum BFTR-2; identical to SEQ ID NO: 83096

SEQ ID NO: 83109 - protein, 189 aa, Fusobacterium necrophorum BFTR-2
MLKVNKRKEPLEFKEYKKKKKPINWEGYDNKIKENLKKSLLKEQEGNCCPYCEVKIHLERSHIEHIKPKDKFPKFLHEYDNMIACCVSNKNCGATKENQWDNLFINPVLDNPEEYFKYDIKTGRILPIDEVGYKFDRAETTIRFLNLNEKNLCDKRKVYILKFRDTQKEYRKFFQEFPSLKRYLQNVLT

SEQ ID NO: 83110 - protein, 435 aa, Fusobacterium necrophorum BFTR-2; identical to SEQ ID NO: 83104

SEQ ID NO: 83111 - protein, 206 aa, Fusobacterium necrophorum BFTR-2; identical to SEQ ID NO: 83101

SEQ ID NO: 83112 - protein, 413 aa, Fusobacterium necrophorum DJ-2; identical to SEQ ID NO: 83096

SEQ ID NO: 83113 - protein, 189 aa, Fusobacterium necrophorum DJ-2; identical to SEQ ID NO: 83097

SEQ ID NO: 83114 - protein, 412 aa, Citrobacter freundii MGH 56
MPIERLHVKSIKRFPEVNVKFNDRFNFITGPNGCGKTSILAAIAHCLSWNGEYSRHQDDSEYWIDVNDYDERYRFGLGPGFLRAKKYRGDQINIYITPPSEGGRQSLNVIDVKTRYKLPPLVIGAQRKISYKTINGVTREKDSQGSINEYCSNALNSLYNNSSRDIKQWLINRYFVIDKSWAEEEKANWDHLIKSLPMVGPFNSSFQYIETGRDLEPIFSIYGKECFLEELSSGFQAILYIIIAIFEWIEACLPVGERDVTTACGTVLIDELDNHLHPEWQLTVRQGIAAIFPNIQFIVTTHSPHLLASAKENEIIMLPPSYPDEIYEFQPSDKAYSGWSTDLILTELMGVRSLDNKDYEILVKYCYENIKENNLDALKENYARLESISHPGDAVLIILKTRIAGMEAKAND

SEQ ID NO: 83115 - protein, 252 aa, Citrobacter freundii MGH 56
MIKLMRPPEPQVLCDNRAAWTQSIMELVDKYDEYKKIPAPEKEAALKHYRHDDIRNALKESSFHKCAFCEGIPAETGFAEVEHFHPKSIYTNKAFEWTNLLYSCKACNNKKLNHDTQQQPIINPYDLDPCDCFTYTDIMIEPKAGGNHDIAKTTIEVCGLSDKRLFSARGDILVSFRIFESDLREAMEEFGLARTSPNKQKRAGKINDALRTIEELSQPRARLSNFCAYLLANSEIYQEAKRCLQEYTSENL

SEQ ID NO: 83116 - protein, 452 aa, Escherichia coli BIDMC 71; identical to SEQ ID NO: 82562

SEQ ID NO: 83117 - protein, 219 aa, Escherichia coli BIDMC 71; identical to SEQ ID NO: 82563

SEQ ID NO: 83118 - protein, 404 aa, Escherichia coli UCI 57; identical to SEQ ID NO: 81436

SEQ ID NO: 83119 - protein, 207 aa, Escherichia coli UCI 57; identical to SEQ ID NO: 81029

SEQ ID NO: 83120 - protein, 404 aa, Escherichia coli UCI 58; identical to SEQ ID NO: 81436

SEQ ID NO: 83121 - protein, 207 aa, Escherichia coli UCI 58; identical to SEQ ID NO: 81029

SEQ ID NO: 83122 - protein, 442 aa, Escherichia coli UCI 65; identical to SEQ ID NO: 81942

SEQ ID NO: 83123 - protein, 203 aa, Escherichia coli UCI 65; identical to SEQ ID NO: 81943

SEQ ID NO: 83124 - protein, 437 aa, Klebsiella pneumoniae BIDMC 69
MTFRILNILQDGTWLPMVHDINDFDNVFTVITGRNSSGKSRLLSKAINASIFKEENLHVKFSGWYSDRPEKAIAISTGKFDRFPTITRADKNNNFIGNYSYHGVKNSGNPFNEIIKSFLLTILDKNNEETNRVKSLDYLLKYLGFGSDIKVSLSLNINTGLMKEHRYEEFVKDMLKRTLRKNVAVSEKYQTLFHKNMWVSFAHEVRGKLNEIDLGHDAKKITIQLHYNELKFENFAKLDSIHFLLDWDLLQVSDISFNGLTEKKRLGLSTFSSGQQCMLLIILGVLSSIENNSLICIDEPEISLHPEWQLEFIKLLQDVFSSFSGCHFLIATHSPQIVSGLRDKNGYILSLEDKNLVQHDSFMKSADFQLAEVFQSPGFKNEYLIRTLLVIISKVSKDDVLNSSDLKNLRLANRLKEHLDERDPVMYLIKQANALVG

SEQ ID NO: 83125 - protein, 204 aa, Klebsiella pneumoniae BIDMC 69
MIESYDLKDHNIWNTTKGDIVEVRKTIREFYLKEQGYKCAYCRMEKKESHGYTWDIEHVLPKASYPEYLLEPENLAIACRECNNPKDDHEILSDPKFRTKIYPNDKECFKIIHPHFDKYSDNMEVVILNGKRIYLPLNSGKGKYTLISCDLFRFSYKFAEWESFDDAAIISFSEFLDNCPADATPDEIKRMLGHIKFNLKNLDF

SEQ ID NO: 83126 - protein, 413 aa, Klebsiella pneumoniae BWH 46
MMFEKEINARYFLGRVKKAHYNTSVVILGQNGEGKSRLLVDIIGYAKDNNYTNVIAVSTSPFDKFPIRKKFSGIDYSYVGVKGGTTGNSILSLIGSASLGLLNQNKFNGIYVERILSFLGASSEVEYVFKVNQKIFQKQNYSDDKNGPDIHHYHHNGFFGKDLHFSDNELYNINKAIDLLTYLVDSNKNFKVRLKIGSEGYIKTKDVFIDNLNSKLLTLLDHDLIKLIDFRIEKKEFGWMSLRLASSGEQCILLSMLGIATNITDNSLILIDEPEISLHPEWQERYISLLMRIFERYNSCLFIIATHSPQIVSKLDAYRSYIYTIKNDELVSASEYVKRSSDFQLANLFLAPGYKNEYLTRELITFLTSPQEYYADKGCAEIIKIISLRDNIDKDDPVFKLIQLARKVIAEIS

SEQ ID NO: 83127 - protein, 232 aa, Klebsiella pneumoniae BWH 46
MPLNCIVYEGEDLETYRDYNALPNDNKDGRIWDSEERNICRIKKSIKDHYIIAQDYTCPYCKQRIEVDHNGAWDAEHIIPKSSHPSFVFEPLNLCVSCKDCNNEKRDKTVLENNNRRRLPIRSEDYIIVHPHFDDYDEHIKVIEVAGYYIPRTDKGRKTIEKCGLLRFAYKYANYGGTSQENKETILTLANCLLDANTPADEHAFLGVISDAVETGKKLSKTAFLQQFGVRE

SEQ ID NO: 83128 - protein, 573 aa, Klebsiella pneumoniae BWH 48; identical to SEQ ID NO: 82678

SEQ ID NO: 83129 - protein, 269 aa, Klebsiella pneumoniae BWH 48; identical to SEQ ID NO: 82679

SEQ ID NO: 83130 - protein, 530 aa, Klebsiella pneumoniae BWH 48; identical to SEQ ID NO: 82680

SEQ ID NO: 83131 - protein, 209 aa, Klebsiella pneumoniae BWH 48; identical to SEQ ID NO: 82681

SEQ ID NO: 83132 - protein, 530 aa, Klebsiella pneumoniae MGH 60
MKPIENNKFIKLASKSRKGDIDSSYELYTLYQTGKFLEQDIHKAQEYLDLALKQFSQQKIRFTQLSLLNFRIIDRLNLDMTKSQIQVLVGNNGAGKTTVLDAISYSLSWLIQRIVHKGGRARDIEKSDISIGNNDGYSSIIAKIGLTHNYNSTLELCEVEEGSIVNKKSYYSSFTRLGNLYKLACDKDERFELPLLAYYGVMRSTDINSKDVSDFDETSAIEISNRFDGYNNALTGKADFKAFFRWYKRLDDVVKHEATSAFQTDPKILASLETLALTDSKSRKLLDDLILSLKERQEYEGSSSAKRKQTIINNAVSLFMEDFSNLNVELKPTLHLSIEKNNKKINVLQLSQGEKSLLALVLDICRRMMVLNPLSENPLLTAGIILIDEVDLHLHPEWQRNILKNFSRVFPNCQFIVSTHSPQVISEVKHHQICILGKDSNGNFNASKPEQSYGLTSNEVLNEIMNTGFQKLDRSPEVQKEIDDVFMLIEEGKIEEAKNKINKIELDLNGEIPELVSAKFDIELQGWDKE

SEQ ID NO: 83133 - protein, 209 aa, Klebsiella pneumoniae MGH 60; identical to SEQ ID NO: 82681

SEQ ID NO: 83134 - protein, 510 aa, Klebsiella pneumoniae MGH 70
MSERIIVRKLILDYVAIDIAIEPFSEQGENYYSIITGRNGSGKSRVLEAISLCILFVELLSVEQRENIIGKNIHFPLGFISPRIPFEYILLEYHVGSTLNKIEIKDNTITSFSIIYNENANPKLICLSNSFFNRFLEGYGSSLTFPSHNQDKYKNLSINKYLEKSKYFSDSDFVSAVLSREIIKSFFMGKDVYARTMAFLQNFGVVGDIFLSLKVEWRICGANLWGVTDIEKLRQSVKRILGCGPQIETDEHLVSSLSEKLGNLLEYLNAGNEPPCSELEDDHFFVQGPSIADFIFNDDTTIQTELCKDVLYLAEHGILLLKDFRFNRNGLEMDLHKMSSGEINVFLMLIKINSEIENNSIIMIDEPEISLHPAWQNKILPSIESCFSQYNGCHFIIATHSPQVVASIPRKNSCVIMLDNTPNTTPGELVHGKSSDFQLFHTLNYTGDSNEYLIKSLLTIIAKIDASTKLTNEDLIFIEKAKKMSDDIDDTDIAKYLLLQALALLNVVRG

SEQ ID NO: 83135 - protein, 230 aa, Klebsiella pneumoniae MGH 70
MIFLTPVVFSEESEKFIGKYDGVSNDIWKGKGKEITKIREELRKHYIPQQAGCCSYCRIDNPQSHGLTWDVEHIIPQGDFPQFLFEPRNLSLSCKDCNGPKNSKPVLDTSKIDVSVNYPSDGVFFYIIHPHFDNYEEHIKIEKLGKRIIYHPSEGKGMYTYEICNLSRFATYEAHNITDANVASSVMKLLLELNETGKINIPKKYVQIVGDHITSHSIAIDVNTAFKKQE

SEQ ID NO: 83136 - protein, 410 aa, Klebsiella pneumoniae MGH 80
MINIMSRISQLTDQDKRNIELNGKNLIIVGNNGSGKTLFLRALNECLSEIFRNQYVTTIGQLKKTLNEQVSVAKQLQVDTDAYNNVMNSVSILNEFLEKKKKFDVVFASTTDIANHLRKKQFILRFFKANREFVSSDKNHLTSVESLYKVFNSSAANEQTTSSYFESYLVSMSNYALLEKGAGEIDEYNRVYFILNSIQTDLCDLFEDNDLILHFNRKKLRMEIIQKNKTPFGLDELPSGFASILSVYAELIMLSELSKQGKNDVTGIVLIDEIDAHLHVTLQKKVFNFFVNSFPNIQFVISTHSPFVVQSVSDAIIYNLSNNEQMEDLSIYSYSSIVKGLLGEATNSDDLESLLAEVGILSKNNDFGNRFDEVMEILESKVNVLDPRAKAIYLGARSRMVDWREGEENV

SEQ ID NO: 83137 - protein, 224 aa, Klebsiella pneumoniae MGH 80
MFNVVRPLQAPESLASQRTYKSEDVIVALRAMFYNKCYLCEQDSLADPEVEHFIPHENDPSLKFGWGNLYYACRRCNGIKSNTHVNLLDCTLSNNNVSDDIIHFAGNAAVGEILIKASNDNPSPEVMNTVNLLNDCFNLDNTSLRRVSKESLMEKLLIELGRYIPLRDVLVTRLSSQDDIQLAKYSLAIMCADNYPFSIFWKWHILKDVQLKQRFPNLRVELGF

SEQ ID NO: 83138 - protein, 413 aa, Klebsiella pneumoniae UCI 62; identical to SEQ ID NO: 83126

SEQ ID NO: 83139 - protein, 232 aa, Klebsiella pneumoniae UCI 62; identical to SEQ ID NO: 83127

SEQ ID NO: 83140 - protein, 472 aa, Photobacterium galatheae
MFLGIVMAYIDNVKFDNHHIFGTSEINLCSITDDDKNNYYSVVIGENGTGKSELLKSLSEHINYRIRDNIYNSKSKYNDNTDVNFKLNKVPEYLVVSASNLNDKFPNISQRNKSYHPNYRYLGIRSTTNNAFIGKYKREFLEHFIDILSNDKKIESLSNALLSIGLPKRFRFTFKKGRGMSKVFELIDNSSSIDKFKNEFEKLLNLSKSSNKDYKLDKESYFYKFSKSTHIQIESYEFIKSSNQDITSIVYEIDLDKPEINERFLTNFNVLQLMVETGLISIKDFYFVHEDEYSFASSSSGQFNIITSFIGIISNMSDNSILLIDEPEVSLHASWQIKYFDILKLLLKPFNNCHTIICTHSHFLVSSMKKEESTLIHIKKDKEGKIKFDNIKSDVWGWSPENILYNVFGISSTRNAYFEQDLRKIISVISQESGNPDEIIEPLERIKRFNITDEDPLSLVITRAENFIKEVL

SEQ ID NO: 83141 - protein, 213 aa, Photobacterium galatheae
MYSYKNIPSCVKYTLEEWYLAKALNQKNYDTWDDKLPGMPRGARADRDRLKDKIKKDLKKIQRGYCAYCGILFMVRGGESHIQREHILAKNTDRYRKFTFEPLNLVLACSRCNGFDLKGSKDYVTYYNEIYSLIETSIVHPHLDNIEDHLTANDSVLVEPVNSSPKGIKTISEFKLNEEAMLYLRGTYIKATKNPVSDEDESLIDEIMSKNYA

SEQ ID NO: 83142 - protein, 598 aa, Vibrio fortis
MQLKKLKIQAFRNLRNLEVNFASELEPVSSRPAVPASNTPAKRIRSHALIGQNGTGKSNLIEALITLFRDVDLDREASFDYTLEYEIRGHIVRIQADTAKQKRPYVWVDGDRVSQEYLIKNDPPDKVPQDKRRGPRLLPTHIFAYYSGRNERIEQLFQEHQRRFNKRQEITTDEVLSEDLLDNFTASDADIRAIEDAKRRRESRLKQVGDDRLRRLFYCRGGHSQLVLLACLLSDDPVFKKVLNNLHIESLESALFVLKEPHRLREKRRSGKFDEMEINEGDPRFWYARGNVVSEFLDKLWQVAWAPIEQEVSKQIDFRGRTEKQKQLYLYVPNKEKLRELGELVGGPDSFFRYAEGAYIGDLIDEVRITVKKRDEHGGKVSFTQLSEGELQMLTVLGLMRITSEDHCLFLLDEPDTHLNPIWKLRYFDDIENVLKPRSENAIQGESQILITTHDPMMVGSLKKEQVHIIRKNGLKTLVEQPNEHPQGMGVTGLLKSELFGLSSTLDSETERRLFKRNALFAIDNKTVEQEAELKRLSDELADLGFATSDFKDPFYAMFVRKMAKHTKFHKPDLSAEELAEQDAIADDIINKILSEAD

SEQ ID NO: 83143 - protein, 289 aa, Vibrio fortis
MRFINFTGKTPHNTPADPEFPDWTPWTEVKWQEWLNQSNDHLEAIEALHESGDIAARNKYIDDHSSHWGKLKLWLKVLSKGKCWFSEVKELYSHYDVEHFRPKKEAKSIDKTVRDGYWWLAFDYTNYRLCGNVGNRKKGGWFPLKDGSLYSTYENQREESEDAFLLDPTIQYDTDLIAFDETGNAIPVPTASDWEKLRVEQTIVRLKLNEHADLAEARRKVWQKVCFEIEQYQKFKSRCRQGGNPGALQKVETHCENIRKLTSHDSELSSVAKWCVLFREDAQLARLVA

SEQ ID NO: 83144 - protein, 783 aa, Flavobacterium seoulense
MPTILNKQGLTSLPKIPLAEVHLHAEYNQLSEIPDSIGSLVNLNRLYLRNNKIKILSKEIGNLKKLQLLLLGNNQIDNLPLEIGNLTSLTQLRIENNKLSDLPSEIGLLTNLTHLFLENNQLNYLPEEIKKLTKLVHLSINGNNLKLPEDYAPNNPKKTIEYILQHQDNLSAKNSLITDKAYYFINASKENITENYKKLVKDFSILNSIEFIPIISEEEINKDTNIVFIICPIDAHTDTSLLNKIAKQCKKMGKRFFIFIQDQFIETDFNSANLDNWNTFQKTKALVNKDFSNEFNPFSSYEELNNLTFEALKQHKPNIKLEKLTLENIGHFDNLEITFDDEITCLIGENGSGKSTILKSIALAIIGGNHKNIQESAKRSFLKILGFDNDKFTYQNGLIKLDYTIDGKENSNEIILVPNDNGNDINFSATNESKIIYNNYNLKSLVIGFPQERGIDNNSNSNFIQSKNTQPHINDLIPLINGSDEFRLRSFSDWIANLYFDSIKKNEGGDSSYSERVLIETVFSVISNITKKEIKFKTVTKVAPPDVWVFTNDAPNGIPLSLISQGFRMMIGWIGHLMQRFVDTFPLSNPISAFQENAIVIIDEVDISMHPLWQVSFIEILREIFPKTQFICSTHDPLIIGGLLKSQVRIFNETDGNINVFEPDIDPKGLGVAGILTSEFFGLPSILDKKTLEDLQEKRRLQILFKDDKLDDDQKKKLIVLEDKLEKYGFTKYQRDPLYQKFIFAFMQREELKKNPINSVEKGIQDKIMVDILDEILNEERKS

SEQ ID NO: 83145 - protein, 272 aa, Flavobacterium seoulense
MRYIDLTKLELPADWENKAKALNNKLLAAKDDTERAEILKKNPIWQELFIPLQKLSIGKCWYSEAKDIMSDRDIDHFRPKNEAKNLDNMTRDGYWWLAYDWENYRFSSTYSNQKRYDKFDTNKEVGGKSSYFPLFPNSYVALTKRRLTDEDIMLLDPIDEDDPCLLTFDSFGEAIPNTVSSKDIERVKVSIRLYHLDHTPLKEERQKVWDKCQRFINEIQEINLLPDMSISDKSRVKFLKQQIKNMTKIDEELSSVAIACIEQNKLSRMLRI

SEQ ID NO: 83146 - protein, 245 aa, Kitasatospora cheerisanensis KCTC 2395
MGRRLGGGVARAALAGRGGRGEPRARFVEHAEGPHVPLHAELVAEVLPSGWRVGDARRQYVTNGTLELPLDELGDGTAALARLVSALAQDPHPGPVLIDDVDRHLHPVWQQRIGLWLTEHFPHTQFLVATHSPYVCQAADPGALIRLPGPDEAGRPHRLDEELRQRVLYGSGEDTVLSELFGLPSAYSPTAEAERRLLVRLERKMYAGRATDAELAEYRELGAKLNSSLTARVDEVTARLLGRGE

SEQ ID NO: 83147 - protein, 241 aa, Kitasatospora cheerisanensis KCTC 2395
MIPLQRPALQARLAAELDRATAGIRAAGPSTASGRAAWRKAVRPKAQLRLLLRQMAPGLERCMYCGDNLGTDIDHFEPIAQAPLRTFDWQNHLLACAHCNSNRKRDRFPRDPATGDGLLVDPCREDPADHLRLYLDSGAYDPLTVRGEATIEVFGLNDRPELVRGRRLMFAVVKALLLTWRAAGPAEAEEYAAALREIHHADVLRTVLGLRRSRPLALAVLGPEVLDALDQLLATDRRFTA

SEQ ID NO: 83148 - protein, 466 aa, Hydrogenovibrio marinus
MHIDSISLENFRCFKSLSIDFHETLTVLVASNGGGKTTLLDAARISIWPYVKAFDLGSQAGKSATIQIDDVRQELKADKNMETVVPSKIIAKGTLLSESLEWVQYREKTKLGTNTKSDRSAKLITEIGKELEHLVRNEEGPTTVDLPVVVYLGTGRLWYQGRYTAKVVDKKLNKAVFSRFWGYRDCLTATSSYKQFEDWYAWVFRSYREVQIERMESGEEYSNFINEADYISLRNTIFVIQEAVNKITQKTTGWKDLQYSSRHQQKLVMVHDKYGSLPLDMLSDGIRNIVVLVSDIAFRCIKLNPHLGLDAATKSSGVVLIDEVDMFLHPQWQQRILGGLQEAFPNLQFIVTTHSPQVLSTIPKECIRVLGESENGSVAAEPNAYSYGEPSNDVLQAIMGVDPIPPVAEKEALERLTNLVDQGRYESDEARQLLNTLTMKLHPTHPQLQKIERSINRQNFLAKDKG

SEQ ID NO: 83149 - protein, 224 aa, Hydrogenovibrio marinus
MRFIHKTGSGGYRLSQANMTPPVTAALAKSRWKSFGDKLRLNVRLTDEQEGLCAYSEIRPDLNSLDSHIEHVKPKSQFPTQTFDYNNLVMSALSSDDLHNSSFGQQDRFGGHAKSSKYSAALFISPLDVNCFKFFSYLSDGRVVASLSLDDGETSRANYTINLLNLNCPYLVNLRKNWIDELDQLIDEHIQKNWDLSSLENIYLLPVSNKLLQFFSASSQRFGK

SEQ ID NO: 83150 - protein, 453 aa, Hydrogenovibrio marinus
MRIDSLTIKNFKLFKDEEFSFNSKFNLVIGENGAGKTSLLRAVAVALGGWANAYIKSDKNLRPIKDDEVREVVVDNRFDKSKEAIITAIGQARIIDRYRNNKTCHAEWTRKWTEESERTSTYGDIRYSGFSTWYNLRLDTLGRDILDYIENGKEFDLPVIAFYECDRLWLPKNELNIEASAKAKYSRFDPYVDCFHTAADHQAIGEWLLKHELASLKQKEETPVLKSIRKAATYALEGCSDLRFDFEASRVMVDFEDGNVVPFDQLSDGQRTILGLFCDIARRAAILNPHLEENASERAEGVVLIDELDLHLHPKWQRQIIEDLRGLFPKIQFICTTHSPFLIQSLRDEAELIVLDGQPISDFANKGIEEIAKRMGVDRPDTSARYEDMKEVAKSFLENLNTLQLAPEEKQAEYKKKLAAQIAPYADNPAYQAILELQYAKTIGEEIEASQTK

SEQ ID NO: 83151 - protein, 253 aa, Hydrogenovibrio marinus
MRPVRRNNSPQATNFNDYADAKPHLIGRISKGKNVRGLHLASYCSYCERPIPTSLAVEHIEPKKGPFGKPQLETVWTNFLLACVNCNSTKGDKQVIFSDLFFPDRDNTFFAFEYKADGTVIPNPSLSARHQITAKKTLDLCGLRKKKSQGKKTDIALERVGQRMQIWGQAEDSLVDYRKDPANNAVVNGIVNLMVATGFFSVWMAVFDDIPEMKVRFIQAISGTEESGCFDMADGSVISPHPNADNLQDGGKI

SEQ ID NO: 83152 - protein, 389 aa, Pseudomonas simiae
MKIKQIKITCVGGIDDLVLTFDDHMNIISGPNGIGKTTILESVAQAFAGYESNLLKRMVGSEFGSVTTFVDPGNGEIEERTYQISQFSPRKNENTPPVEHYIKQLISLKVARTFTYVALDSVSRDADRDPYNTSNSNKYGVNLTEVKSWFVNRYLYSAHPGALSDVRMHNFEKAKTFFSLLNKDYRFSKVDAGTNEIMVSTPAGEIYYEYLSSGFKSCLSILFGIVKEIEYRFAESGIRLDEFEGVILIDELELHLHPEWQTKISTILAQAFPNAQFITTTHSPHIIQAAMPNQVVALHYTNGKIERKSLPSSEYGYQGWTVEEVLTDVMGLGDTRTAVYQNAIQSFQRAVDEDNYRAGTLAFEELEKLLHPENNLRKLLSFQLGAIKG

SEQ ID NO: 83153 - protein, 247 aa, Pseudomonas simiae
MIKLERQPKPEYLSASTVTELTEKFKSDGSSVWNHPQIKAPLLASSHEKCAFCECSISDESKYMEVEHFKYKNLYKDHVADWNNLLPSCKRCNISKGIHDVGSDPIVNPYDVDPRHHISFKLYQFKGKDKVGNTTIEALDLNNSDRLVFKRFEVGEQVFRSVRVAVERLDAYNQSKTAIRKSKLLNIVETILNECQPKAIYAATTATVALNDEDFMGVISQLQALNLWEDYLETKLSAAQNIAFQQP

SEQ ID NO: 83154 - protein, 761 aa, Rhizobium etli bv. mimosae str. IE4771
MIHTDRAQVINPLDPATALGRRALDEMEKFAADMRAGRFHQKRPMFKTYKAKPVTDALAQLFHGKCAYCESKISAVAPIDVELFRPKASVVEAPSHPGYWWLANSWDNLLAACIDCNRLRRFETGAEKILSGKGDRFPLIDETARCLMPEDDLSREMPLLLDPTRDFPEEHLVYSKDGIVISESERGNTTIAILGLNRRGLVQQRHQTLLHFHERENYLIEAVSGASDSDAALSLIENRWETLARMARPDAPYSGMIRQALERTRARLSREISPDGGVDFAGSAPRVTKERERRAQHASRSYAQAMSDYSLEDDAGIAKFKSQRRFVERVTIENIKAIKNLDLNFEALSHGPSPWLMLLGENGTGKSTVLQSIALALCDSDQLLSLLKNDRIDPASMVRYRCKSGRVTVKLSGFPKAHELIVYRDRFELRSPQGDVAAIKINTETVENPVKAQVLILGYGATRLLPRRRSSSDAGAAFSRIDNLFDPFVALIDAEAWLLKRDPKDFGTTAMVLKDLLALDDEAEFVTDGRTIFVRSGDAKTPLRNLSDGYQTVVAAAVDILSVLSRIWEKLTEAEGIVLIDEIDAHLHPRWQMRIVGSLRNAMPGVQFITTTHQPLCLRGLGAGEVVVMQRDEEGVVEPLLDLPSPADFRVDQLLTSGFFGLRSTVDPETERLFDTYYALLALDDRTAEQESELESLQAELAGRRQLGDTQRESIYYAAIDKLLAKQATPARLPPETLREEAVEQIGALWTQMLSKAEAGE

SEQ ID NO: 83155 - protein, 325 aa, Rhizobium etli bv. mimosae str. IE4771
MIRVARPAANPQIPVYVDKTCTGADGTSKLTRYEHEREKAIVFFTDPSNYLGDKKLCKTKFAFLTYKNSKLLEHLVSDFNGKCAYCESDFRAVTPSDVEHYRPKAAITTPTAKLAPGYFWLAGDYSNLLNSCPDCNRPRKHKVPGQTKGTLLGKGSQFPLSDETLRVRSHQVAIASENGVRLLLDPCHDNPEDHLEFEANGNVRARKHEGVESAMGLHSIDVYALRRMHLVQKRCGVLLDLAAVFGELNHHVENDNLLREQASSQELIDRNMIRIQCCMSKLISMFSKTSEYIAAKRDWVRKADANGQFVALRAFKIEPLDLIST

SEQ ID NO: 83156 - protein, 173 aa, Rhizobium etli bv. mimosae str. IE4771
MQIMSSLRRVFPQSTIIATTHDPLCIRGMHDGEVVVLSRLRSQDGSFAMPNYVQVRADLPNVETMTIEQLLTSDLFSMFSTDSPAAERKLAELGTLLSRREGGDTLTDEESEVLQGLENEVTQALPLGTTQAQRLVLGAVAEFLDKRRGASVEQLAKLEGDTRKHILDALEGI

SEQ ID NO: 83157 - protein, 328 aa, Rhizobium etli bv. mimosae str. IE4771
MRAVKRGSKAAPTVLAQRGKDKLTELERARDYMAMVLPPDTERIPFKFRAYKKEEVKRRLEELFHGKCAYCESFYAGQAPVDVEHYRPKGSVEGEASHGGYWWLGMEWTNLLPSCIDCNRRRKQKTPTRVGDVAVLHKTMSTGKKDCFPIAGTRAANEAANLTLEDPLLLDPTRDDPEQHLHYWIKDGHGSGLILPKALGAQGQDLAAVDADVAALGAKATALGLSVKGAVSVQVYGLNRLRMVQERTALLNRLRFFEYLVVEIGTVLQRLSKDHLEGIEEVKDATKRLAHLQSRLLDEMVALASPKAPFSAFAVAYIRDFKQRLQLN

SEQ ID NO: 83158 - protein, 548 aa, Serratia liquefaciens FK01
MTKQVERRAKGGNLLSAFELYQLYSKSDTPDGKEKSKEWLEYCWSYLQGGTVDEKNIYHHENNFHLRSLSLTDFRRFALLTVNFEDDLTVIIGNNGQGKTSILTAIAKTLSWFSANILKEDGSGQRLSETTDIRNRSEGRYTDVNSNFYFGKGLKNISVRLSRSAAGTLTRRDSIVKPAKDISDIWRAVNAYKTVNLPIFAFYSVERSYPFTKLARDGGELREERFDAYTNALTGAGRFDHFIEWFITLHKRTANDTSTSIDLLRQQVHELQVSVDNGLLSVKPLLEQTKIQLGEAIYKEQNNKKNKALSELQQKNMIVHAISTVVPSVSDIWVETSSGVDVIKVINDGQQVTVEQLSDGQRVFLGLVADLARRMVMLNPLMGNPLEGRGIILIDEIELHLHPKWQQDVIENLRRIFPNVQQIITTHSPIVLSTVDKRCVRQFRGDETEIVLDSPMFQTKGVINSDILEQVMSVFAAPPHVAESHWVGDFEAILGKEIYANNPEAKEQYKKISEHFGPDSFELKRCDSLIRIQTMKLKVLTRKRGEDR

SEQ ID NO: 83159 - protein, 214 aa, Serratia liquefaciens FK01
MKKLTRPETPECLNQLIAGRDNWRLANKNELWHALNEMQHGFCAYCECRLNRKHIEHFRTRNGYVNLTFNWTNLFGSCGDTSQKGGWARCGIYKDNGAGGYNPENLIKPDEEDPSAFLHFFTTGAVRPRVGLTADEHFKATETLRVFNLNGDPVLFGSRRQAINAELQEIEDFYKLEGQLSAEDWDAFLQDALSRVNILEFSTALTHAWNYNKK

SEQ ID NO: 83160 - protein, 408 aa, Parabacteroides distasonis str. 3776 Po2 i
MLVGDNATGKTSVLRACKFVLSAFFSGFSDDNTKWVNPGNEDFMQMETGGILLQERPIHISFDVADVMGKEADSTGGDSFYTLIKKSKKNSRSLTSGLKEYKDWAALLMHNYISKEGQRIALPLFANFSTEDIHAIRKIDFGKFKEYNHKPSFGYYECLEGDGFFPYWIKRLLVLQEGRENHLEIDIVRKAIQKALGAGGCAIIQDMEVRPIRKKVYYILMDGREVEADFLSDGYRRLVYIVTDLAFRCALLNRGIYGEETCAKTRGTVLIDEVDLHLHPTLQSVVLKGLCEAFPGLQFIVSSHAPMVMSGGESNEENIVYKLSYSEEQGYRIMPTVTYGMDMSTLTYVVLGQTPRAVEVDRQLNELFELIDVDRLKEAGDLLRKLRGKYGDSLPELARAEAMLNCLI

SEQ ID NO: 83161 - protein, 209 aa, Parabacteroides distasonis str. 3776 Po2 i; identical to SEQ ID NO: 81167

SEQ ID NO: 83162 - protein, 408 aa, Parabacteroides distasonis str. 3776 D15 i
MLVGDNATGKTSVLRACKFVLSAFFSGFSDDNTKWVNPGNEDFMQMETGGILLQERPIHISFDVADVMGKEADSTGGDSFYTLIKKSKKNSRSLTSGLKEYKDWAALLMHNYISKEGQRIALPLFANFSTEDIHAIRKIDFGKFKEYNHKPSFGYYECLEGDGFFPYWIKRLLVLQEGRENHLEIDIVRKAIQKALGAGGCAIIQDMEVRPIRKKVYYILMDGREVEADFLSDGYRRLVYIVTDLAFRCALLNRGIYGEETCAKTRGTVLIDEVDLHLHPTLQSVVLKGLCEAFPGLQFIVSSHAPMVMSGVESNEENIVYKLSYSEEQGYRIMPTVTYGMDMSTLTYVVLGQTPRAVEVDRQLNELFELIDVDRLKEAGDLLRKLRGKYGDSLPELARAEAMLNCLI

SEQ ID NO: 83163 - protein, 209 aa, Parabacteroides distasonis str. 3776 D15 i; identical to SEQ ID NO: 81167

SEQ ID NO: 83164 - protein, 408 aa, Parabacteroides distasonis str. 3776 D15 iv; identical to SEQ ID NO: 83162

SEQ ID NO: 83165 - protein, 209 aa, Parabacteroides distasonis str. 3776 D15 iv; identical to SEQ ID NO: 81167

SEQ ID NO: 83166 - protein, 391 aa, Escherichia coli 2-156-04_S3_C3
MKFESTSLVNIITGNNGSGKSSILAEISKQEYVTGKNVICLSNTSTNKFPKIKSHRFHILNQSSNTLTKALKKVVVSNSHNKIGSSHAHIFPRVLAYLDFNEQLTFKFTIFPYESFIRKFQSEMYNNELIGSDIDEITNHLRNLIEINDDTASSTDHGVKGSHILYLEYAFTYESEKRINTIHNRLIELMLKHERILKKNHLIHDIEITLSRGHSIIPSSHLSSGEACYMATLAFILTYISDNSVIIIDEPENSLHPRWQKKYTSNLLDLLYYFDIRIILATHSPMIVIGAVEDHSGLSVFKSENSTLSPLEGNETNIDEVMVDVFGVLTSRSRYFSYKINEILNEYNNKKIDINSARDKLNKTKSLGPDESQVKIIEAANEILNQMVKNA

SEQ ID NO: 83167 - protein, 198 aa, Escherichia coli 2-156-04_S3_C3; identical to SEQ ID NO: 83019

SEQ ID NO: 83168 - protein, 540 aa, Vibrio cholerae O1 biovar El Tor; identical to SEQ ID NO: 80874

SEQ ID NO: 83169 - protein, 205 aa, Vibrio cholerae O1 biovar El Tor; identical to SEQ ID NO: 80875

SEQ ID NO: 83170 - protein, 452 aa, Mangrovibacter sp. MFB070
MKLKQLFLKNFRGFRQFECEFGPGINVLVGLNGQGKTSILDAISIAYGQFFTALGTGIDRGVHDNEIHLAKHILEDADDTFTMEYQFPVTISCTTWQGGPGEFPESWSRVRNTLKGRTTQVKSLKDFAKKLQKDVQDNKPAELPLFGYYGTGRLWKQKKLSSVKVASLSKSSRFEGYRDCMDPESSYSAFAVWLRDETIAELERKMKILEESGLSDALVSGNTLRSRLLRAITTAVNTVLQPSGWSNIRYSATAKEIIASHPEQGNVPVSMLSDGVRNMVGMVADIAYRCVRLNSHLQENAVVKTQGMVLVDEVDMHLHPQWQQLVLQNLGAAFPGLQFIVTTHSPQVLTTVRKEQILILGQHTAHKPIGNTFGEQSHYVLTQVLGVDTRPPLNHSDMLKEYFVMIESGMGKSAQALALRAQLQEMMGEHHSDLAAADRAIQRKEFLGKCAE

SEQ ID NO: 83171 - protein, 257 aa, Mangrovibacter sp. MFB070
MRRIKKQVRGNANLAAAQANNGIPATHDAARRAWKNFRDNRNTLFHQLLVEQFGLCCYTELNLADIQNTHGIGSHFEHEQPKSLFPARTFDELNLLRSALSDQDLKTYTGSARFAGHHKGSLYNPNLFISPQSANCRDYFVYLPLDGSIQPKSGLSAADAAKADYTITLLNLNAPFLIAERRRWLKEIEDEITRLINDNAVEAVRHLAECELTLTPRKHPQLIQPAFAQLRAFHSATRALFGSLGEQVIQQHCAHID

SEQ ID NO: 83172 - protein, 409 aa, Vibrio parahaemolyticus; identical to SEQ ID NO: 81298

SEQ ID NO: 83173 - protein, 221 aa, Vibrio parahaemolyticus; identical to SEQ ID NO: 81113

SEQ ID NO: 83174 - protein, 409 aa, Vibrio parahaemolyticus; identical to SEQ ID NO: 81298

SEQ ID NO: 83175 - protein, 221 aa, Vibrio parahaemolyticus; identical to SEQ ID NO: 81113

SEQ ID NO: 83176 - protein, 470 aa, Vibrio parahaemolyticus; identical to SEQ ID NO: 81302

SEQ ID NO: 83177 - protein, 214 aa, Vibrio parahaemolyticus; identical to SEQ ID NO: 81297

SEQ ID NO: 83178 - protein, 409 aa, Vibrio parahaemolyticus; identical to SEQ ID NO: 81298

SEQ ID NO: 83179 - protein, 221 aa, Vibrio parahaemolyticus; identical to SEQ ID NO: 81113

SEQ ID NO: 83180 - protein, 470 aa, Vibrio parahaemolyticus; identical to SEQ ID NO: 81302

SEQ ID NO: 83181 - protein, 214 aa, Vibrio parahaemolyticus; identical to SEQ ID NO: 81297

SEQ ID NO: 83182 - protein, 420 aa, Bacillus azotoformans MEV2011
MILKSLEINKWNQFDKITLEFNPKLTIITGANGSGKSTIIRLISRVMGWEYNETATPLLSTKESYRFLSGITLNILNEFLNEEQNQQHLGVNIGNLLTNQGQINIYVPKQAESAIYSVNFHPYLQLKGVNIPSHRIQHTYKPIKSIPVKPRTKKEAFNLFNESFKKRTMSMSYYNPTEDDPTAHIKATLMSLAVFGKGNEFVTNDDRAYELFVGFVRVLKLLLPETLGFKELKVKDGEIILVTETGHFLIDSVSGGIGAIIDLAWQIYMYDDNETESFVVLLDEAENHLHPSMQRSLLPNLLEAFPNVQFVVTTHSPFMVNSVQDSTVYVLNYNDDKKVVTEKLDFINKAGNASEILRDVLGVPVTLPVWVEKKLNSIAENYSYSNLTPETYQRLKTELSEIGLNDYLPDALGIIGGGQN

SEQ ID NO: 83183 - protein, 215 aa, Bacillus azotoformans MEV2011
MITLKKIDQPQILKDKSEEWKNDLLDYINKGEKPPESIVGRYRHKEIKEALKKETHHKCAYCESKITHIDFGHIEHIVPKSIIHEKTYDWQNLTLACGTCNTNKGTYYDKTMPLLNPYKDKPENEIIFLGPVPMPRPGSNIGIITIKKLKLNRPELLERRKELIDKIMPLLHLYEQTTNDSLRIQLYEDIIEYTKPDKEYSSMVKGVLDQLKITS

SEQ ID NO: 83184 - protein, 418 aa, Bacillus thuringiensis serovar kurstaki str. HD-1; identical to SEQ ID NO: 82064

SEQ ID NO: 83185 - protein, 215 aa, Bacillus thuringiensis serovar kurstaki str. HD-1; identical to SEQ ID NO: 82065

SEQ ID NO: 83186 - protein, 540 aa, Vibrio cholerae O1 biovar El Tor; identical to SEQ ID NO: 80874

SEQ ID NO: 83187 - protein, 205 aa, Vibrio cholerae O1 biovar El Tor; identical to SEQ ID NO: 80875

SEQ ID NO: 83188 - protein, 540 aa, Vibrio cholerae O1 biovar El Tor; identical to SEQ ID NO: 80874

SEQ ID NO: 83189 - protein, 205 aa, Vibrio cholerae O1 biovar El Tor; identical to SEQ ID NO: 80875

SEQ ID NO: 83190 - protein, 467 aa, Endozoicomonas elysicola
MIIGDNGTGKSRFISNLVNAFLENIEGKRRKPIEYEIEYELDKEVVKIERFFKINDENRRASENLKVKFPNKLIAISTSLSDKFPLDRQSRNKNFENRLNSKEEFYTYLGTKNRVNASSSRALMDRAIGTMLENMHENNNNERYREIFNYLNYEPVIKLSYRIRIPDFIKNHSLFVFSGNDLKSLLKDWSEKRGGFRTSFYNRAIEIYSDTYWDDLARFYAETLDKTIFSGKRSEYSFIVNFSEKNSIRYENNLDFHESNKYFFLEELKRYDLVRGPEISLYKIGGGEFDFYDASSGEASILSTLIGLIPNLTDNCLVVIDEPEISLHPTWQYRYVNLIDRIISKFKGCHVIIATHSHFIISDLPLYRSHVIHFKNDKRSNIQVNYIDHETHGLSAEDVLLNIFDLPSTRNYFLSKEVSEALELLADGKKTSARYIELSSRFARYLPNLKSIDPMHEILSILVSSRK

SEQ ID NO: 83191 - protein, 209 aa, Endozoicomonas elysicola
MSSRILEAYQLTASEKKIIDTHFSTHKDWEKSVFEGIKENLVNDLRIKQNNKCCYCRNELGYDIKAVDIEHILPKSKYEKFTFHTKNLALSCPGCNTSKGSKEVLKSPIKKYPRTGTNIIIVHAHFDNYESSIEIHSGSIYEGLDEKGCETIKQCKLYRLKRVHKKARKNLSNSSPIQQLVESLRTASDADKQLFINQMREMTNQFQGP

SEQ ID NO: 83192 - protein, 459 aa, Shewanella xiamenensis
MEVKNLTLHNIGRFTHLEIPLAPLGKLNSNVTVFVGNNGSGKTSILKSLATSLSWLVSRIQSETGKGSPIPELVIKNKMSSAAIDIDIFHHVRGNEEDGDLEGLDDNYFLWRIAKARKGRKGEHKSDFGGATGLADYFRKKLSNDDKTSLPLIAFYSVERVVIDIPLKIRGKHEFFQLNGYENSLTQGVDFRRFFEWFREREDTENESGLSDDVLEQLKAVLGDDDKTWSKLEKLRASNRDRQLTAVRSAIYRFMPEFSNLRVRRKPRLHMSIDKNGEPLDVAQLSQGEKSLMALIGDIARRLAVMNPELKNPLEGDGIVLIDEVDMHLHPKWQRSLIKQLTTTFPKCQFVLSTHSPLVISDCKNILAYLIGEDELVRLPSLYGQDANTVLLEIMDTDIRNAEINNALSQVLDAIHDAELSKAKKLIHQLEQELPSGNLELSKAKLLLRKKELKDAKNN

SEQ ID NO: 83193 - protein, 212 aa, Shewanella xiamenensis
MRKITKGIYPEPISLSDFKRANPKATYTDLRETERTDIRSVCLQEQYYLCAYCCKEISGANHDCMNEHVEARRIAPARSLDFTNIVSSCTTPGQCDAAHGSLALPLTPFMSECETEFEFTLSGKVRGLTDRAKETIRVLNLGDELQNNRSLIEQRRQLIQSIMFTNGIDPEEGLDDDDDLLKMVINDISTPKSGKLDAFSPIVVNVLKQWVV

SEQ ID NO: 83194 - protein, 545 aa, Shewanella xiamenensis
MQLRYLAIPQFRNLRNLEVSFATELEPVSGTLADVTATAPAKRIRSHALIGQNGTGKSNLIEALVTLFRDVDLDREADFDYTLEYEIRGHIVRIQADTAKKKRPYVWVDGKSESQRFLVKHAREYLPSHVFAYYSGKNERIESLFRPHQERYKQLLRQDDDDLMRRLFYCRGGHSQLVLLACLLSDDPVFKKLLSNLNIEAIESALFVLKKPYAARELDEKDIELGDSRFWFRRGTVVNGFLDKLWQIAWAPVQETRLAAIDFRRRPEKQELLYLFVPDNKRLKKLGEEVGTPERFFRYAEAAYIGDLLEEVRITVKKSKGHGGDVEFKQLSEGELQMLTVLGLMRITREDHCLFLLDEPDTHLNPIWKLRYFDDIEGVLSSEKDSLVQGESQILITTHDPMMVGSLKREQVHILRKHGDRSVIESPDEHPQGMGVTGLLKSELFGLSSTLDIETERRLFRRNELFVKAERTPEEDAELSRLSTELADLGFSTADFRDPDYALFVRKMAQHRKFRKPTLTPEEQAEQDRIADDIISEILREEAGE

SEQ ID NO: 83195 - protein, 283 aa, Shewanella xiamenensis
MIFIDLENKLPTDTDLPANVRWTQADWDAWLAESARLVNELAKLDAAGSVKERNSLIDKHDNHWGKLKPWLLTLSGGKCWFTEARDLASHLTVEHFRPKKAARNVKGQERDGYWWLAFDYMNFRIAGTVPNCKKGVWFPLRYGSPVSTFMRRCEGDENQHFLDPTNAYDVTLLAFDEEGKAVPAPGIPRWEYVRVKRTVERLKLTEHQVLSEERRKVWQKTSKLINKYHNALAEARNSPAARERVRSTAREIACLTKPESELSAVAKWCIWLRNDPQLSRLVG

SEQ ID NO: 83196 - protein, 763 aa, Escherichia coli 6-537-08_S3_C1; identical to SEQ ID NO: 81340

SEQ ID NO: 83197 - protein, 308 aa, Escherichia coli 6-537-08_S3_C1; identical to SEQ ID NO: 81951

SEQ ID NO: 83198 - protein, 763 aa, Escherichia coli 6-537-08_S3_C3; identical to SEQ ID NO: 81340

SEQ ID NO: 83199 - protein, 308 aa, Escherichia coli 6-537-08_S3_C3; identical to SEQ ID NO: 81951

SEQ ID NO: 83200 - protein, 763 aa, Escherichia coli 6-537-08_S3_C2; identical to SEQ ID NO: 81340

SEQ ID NO: 83201 - protein, 308 aa, Escherichia coli 6-537-08_S3_C2; identical to SEQ ID NO: 81951

SEQ ID NO: 83202 - protein, 544 aa, Escherichia coli 8-415-05_S1_C2
MINKMNLETCYVDFLELESHVINEDYLKESVELQKLISTLNESKFHLNKIGIHDFKRIRELQISLEDDLTVFVGDNGFGKSTILDAIAIVLSWLRSNIEKESKPGTYIKSHEVNNSVDVEYASIDANIKLKDFNTSILITKAKEGAYYSRNNELLEVKKLASIYRLVNKYVDNASLPLMAYYSIARSYIGGGVDRKRKNAKTKTVWSKFDVYDEIEFDRNDFTDFFQWLVFLHNRASQEKLSESQTTINALFSDIQSLKATLTQLSAIDNIDSTVIKGLELSLKEKLNYMKSLQSGEHKFNNAVSLYDSVINTILKFLPEFQWIKLVYGDDDYKIILKKGEVELDVQQLSQGEKTIFTLVGDLARRLILLNPNLSNPLLGYGIVLIDEIDLHLHPQWQQTIIERLTSTFPNVQFVVTTHSPQVLSTVSSRSVRILQEVEVDGVNDLIVSHPDYQIKGVSNQDALLYGMRTDPIPSTKENGWLEEYKKLVELNRYSSDEALLLREKVIKHFGLDHPLVQECDDLISVLEFKNKINQHFSGSKDVK

SEQ ID NO: 83203 - protein, 186 aa, Escherichia coli 8-415-05_S1_C2
MQGKLCAYCEKKIEHHKSGDKNKVERHIEHFYRKSYYKNLTFEWSNLFGSCGEPQRCGFYKDKQKYNDDDLIKADRQNPDVFFHFLENGDVHIREGLNEKEHKMAEVTLRVFNLNPSSGGVKAERRRAIELSMTLIKELVGCASQLIESGCEIEDVRSMVFDEFKKNVKDRCFTTAIKHVFENRMP

SEQ ID NO: 83204 - protein, 583 aa, Escherichia coli 3-475-03_S3_C1
MQLLRICIPNFRNLRGLDIAFATHLSAALGAPADAQPKPIRSHALIGQNGTGKSNLIEALITIFRDVDLDREAAFDYTLEYSIRDHVVRIEADTVTQKRPYVWVDGKAETQGYLLKNRELLPTHIFAYYSGRNERIEALFQEHQRRFNLRQEITTDEVLSEQLLENFTGSEADIRAVEEAKRRRESRLKQAGDDRLRRLFYCRGGHSQLVLLACLLSDDQVFQKVLKNLHIESLESALFVLKEPHRLREKRRSGKFDEQELIEGDPRFWYSRGNVVSEFLDKLWQVSWAPIEQEATKQIDFRGRSEKQKQLYLFVPNQDKLKQLGELVGSTDSFFRYAEGAYIGDLIDEVRITVKKRDEYGGKVSFTQLSEGELQMLTVLGLMRITREDHCLFLLDEPDTHLNPIWKLRYFDDIEGVLASDEGALVQGESQILITTHDPMMIGSLKREQVHILRRDKGRSIVDTPDEHPQGMGVTGLLKSELFGLSSTLDIETERRLFRRNELFVKSPRSPEEDTELSRLSTELADLGFSTADFRDPDYALFVRKMAQHRRFRKPTLTPEEQAEQDAIADSIIDEILREEEDQ

SEQ ID NO: 83205 - protein, 285 aa, Escherichia coli 3-475-03_S3_C1; identical to SEQ ID NO: 81961

SEQ ID NO: 83206 - protein, 465 aa, Escherichia coli Nissle 1917; identical to SEQ ID NO: 81190

SEQ ID NO: 83207 - protein, 243 aa, Escherichia coli Nissle 1917; identical to SEQ ID NO: 81097

SEQ ID NO: 83208 - protein, 496 aa, Anditalea andensis
MRIHHLHIKEFKSLKDFIIKFNEPVSLFIGKNGSGKSTLLEAIAWIFRSAHLTYVEEKQENTPFDFEITYELRIEKVLSESSTFSETATDYIGVTLKGDRKNKKFWSIDTDNNAYSIDDLIKRHTIEKLLPSNLVIYYAGWFESMEFICSEHEKIYKERLLEAKSDSDITTSSEDLYSRIGALPLMYIEKHHFEILLASLYAFEFNDRVDRFFAEDLKITKPDKNPLALFVKKRQWKSGVGGDEFWGAKGLLRGFLDVVRRFAYNETANYMDEDQILFNFHIHDWYALREFYGEEKKLFYLLHMLNASEMLGGIQIFMDLPEIAISHHDLSEGQQQLITIKAINELLVDENSLLLLDEPDTYLHPQWQSSFLKGIYEVIDLYKALSVPPPQFIIASHSTIMLSNLSSGDLFKMSEGHAVPIDKGYYGREYGFNLSAIMGGNERVPEVQEEIDALFELIDSEQFEKAIKVLEELKQKHTDDPELTRAETMLAFLKGE

SEQ ID NO: 83209 - protein, 201 aa, Anditalea andensis
MKFIVKGNEPPEWKAYKETQGVDFDAIPALKEALLNEQGYLCCYCMNGIKEDNMKVEHYKPRSIYPALKMEYTNLFAACKGDFCTDKHCDTKKENTELSIHPADPKNNCERIIGYSSKGLLTYPDRYKTDIEETLNLNNSVLVSNRSAALHGALIALKKKGFKKADIQKLIIQYREKGSDGKFYPYCNTVLWLLNKKLSAN

SEQ ID NO: 83210 - protein, 465 aa, Escherichia coli; identical to SEQ ID NO: 81096

SEQ ID NO: 83211 - protein, 243 aa, Escherichia coli; identical to SEQ ID NO: 81097

SEQ ID NO: 83212 - protein, 593 aa, Tumebacillus flagellatus
MAETRIPEAIRNAFASVDLQNQQIALDFLEHLLSMGFSCEYVKNYGVFVFTYNQFEVCQILWDYLNGFSKIPGYLMFLAPTPIKEKVCSETLFPIKEQPLIRKLVEAKEFHHSYNATLGDLDLLIPFFEQIRDAFFRTEITVDFRIESLELTNFRCYKSETFTFNPQSTVLIGKNASGKTSLLEGITVAIGGFLRAIDEKVDKRAFEASDVRFTSKWVQNAPATEHHPPTEMKVTSRLINNRLVWSRSRTLYESDKNSRTTYKESNEITSIVKQLVSDVRDEKNSRQIILPVFAYHGTGRVANFNRDMGEVGKTEKISRFFAYKDCLKPNSNYKTFIAWYRKMKYLAFEINQQIPVLDAVTDLLVRGLRLLTEDEEHFVEGLFYFEGELHLKYEDGTFYPISTLSDGYQDIIGILSDIAFRMAVLNPQLGTEVSAKTPGIVLIDEVDLHLHPKWQQKVLYVLKTLFPKVQFISTTHSPVIISATEKDEAFELYQEEDTILTKPIGNPAEWYLSDILAQAFHVSSKPPARTANSISESLEELLHRFSELVKTAVPTPSDEQKREIEVLYERLLPSLPIDSPRRKAVDALKGLVK

SEQ ID NO: 83213 - protein, 232 aa, Tumebacillus flagellatus
MKQVTRTDAPHPLNCSETKRSFYEDLYDETGTQVKKRWNVVRDALSEMSGHHCAYCGKKAKVEVDHFFPKNKRAAPYLAYCWENLIPACHDCNQRKLAFFPRSLSGKRIIESCAEGVVPHDLLYEKSTIMEIASNDRLLDPTFDRVEEHLTLDCEFFCYNSHTKIGEITKERFFGEAFERNLEKLSHLAKKLVSEKVTVDILNPIFDLYGDEFYLRAYYEYWYLENAEGRMR

SEQ ID NO: 83214 - protein, 443 aa, Tumebacillus flagellatus
MKIEWMKLENFHGFREKEISFHPQFTVLVGDNASGKTAVLEGVSVAIGAFANALVKNADLREIEPEEVRLKKFQHGEIPTLEPQYPSYVHFCSSIDNQMVDAMVLKEERNTHLGVDLIYEVYSNAEALGRKILSGESVKLPIFSFFRTSRLWSQNEDLVNSPYSPGSRLEGYRNYLNPNANESFFTKWFIQMSIAEIKRREPLKVLESVRRAIVSCMNKLGVEKIDYDPLRDEIQVFLENGDQIPLRLLSDGYRNTMGLVADIAHRMAVLNPFMEDHLRTSGIVLIDEIDLHLHPKWQRHIVEDLKNTFPNVQFIVTTHSPFIVQSLEEGELRVLDEDVEAKVVSPADYVNKSIEDITEYVMGVDKVQRSEKLHRLYEKTKTYYLLIDQLSATEDETQRAELERQIQTTKDEIDELDSLFSDDISFHAILELERLRLLRRDKQ

SEQ ID NO: 83215 - protein, 230 aa, Tumebacillus flagellatus
MRPIERGTHPVNPNGIAVSFSHYSDARIHLIDHLGEYCSYCEMKLESGLAVEHVKPKSRHPQLERTWENFLLACPNCNPTKGDEDEDVHLPDYVWPDSDDTHLAFTYNPDGRVLAALTPMHTQAQNMLQLVGLDKIPLPHESSDRRLRNRHTKYQMALRYHRELSQRPDDKQYRQIITDLAKESGYWSVWVTVFRDDPDMIRRFNEAYPGTSPHCFETETYQAKSRHNRP

SEQ ID NO: 83216 - protein, 468 aa, Tumebacillus flagellatus
MAFFWQGNIRFSAEDWKETIWYTLNVEGNRRFEGIDRLEVPMKLEKIRLQNFRSFTDQEFSFLDENDQVKPFTVLVGDNGVGKTAVLEGIVRGAAPIIKALQADAGDKVDISQLDIQIGRRWASIAIESIIQNRRFQWRNSKRESSMVQDWPGSPAATQREVKDFLSETFFSDQPIQQVPLVLYYSIARVGIDVPMRSRNPREMSPLKALTHCLDLKSDFRRFFEWFKGEEEDELRMQRDLGRPYRSRALTAVRTAIARMMNHNYRDVRIRSNPIRMVLLDDQNRELQVEQLSGGYKVVFSMIADIAGRLAQANPQLADPLAGEALVLIDELDLHLHPKWQKRIVRDLRETFPNCQFIVSTHSASIVQSLNADQLINLEELGRERTGAFKGWSLSEIQEFEMGVEYSKTEEYERIKEEFEEAVSDENGERAKELYRQIQKMVHPNSELLELFQFRLIGIGVAIDDLFE

SEQ ID NO: 83217 - protein, 264 aa, Tumebacillus flagellatus
MIYLNRPVSPYRLTKKRKRELIKIFIKSRQEGKEKSVWKYADFKDLKKSLNQMSHEKCAYCEDKLDSGGNMMEPDHFYPKERYPTAVVSWKNLLPSCKKCNSRSGKGNHDVKENPILDPSKLRPNQHFQYANQTYEIKGINELGIQTVKVLKLNDAERMLRKRKRNVDEMRQTVQDIQEELRARVSELVTNPGFREKIQRQTNGLLLKTTSVSAFSAVYATVLLHDQPFQEIRETLQQHGAWTTSMESKFEEAHQACFSIIIGI

SEQ ID NO: 83218 - protein, 411 aa, Tumebacillus flagellatus
MKITRLHIKNYRRFRDLELQLNGESVVLFGENGAGKSSVLEATSAVLSRMVRHLTHATLRGIEVKDVRLGADVASVDVEVEHSNTEYSWDTICKIHVLKTRQNSISIKLGHEILRHLKQGEYNLPIVVSYSVNRAVEDTPLDLNEKRQFSQLSTYDNSLTSGTDFRVFFEWYRYREDLENETKVQTKQLEYQDIQLHAVRTAIESFLPGFHNLRVIRNPLQLAIDKAGQTLEVNQLSDGEKCLFAMIGDLARRLALANPSLPNPLLGEGVCLIDEIELHLHPEWQREVIPRLRTTFPNVQFIISTHSPQVLGEVKDMNILKLEVVEEGVTVTPLPSFFGKDSNRILEDAFDSSLRNRAIKQQISELFQAIVEEQWEQVKTLHQGLVDQVGHDEPELVKADVLIRRKRSLGR

SEQ ID NO: 83219 - protein, 218 aa, Tumebacillus flagellatus
MKYIQKRTEPQEFVDWKTDFPSWNDGRAANYDDLQNPLKNQVKQSLIEEQGKICCYCGMRIDARNTHIEHLKPQQHCTPEESVDYHNIVASCEGENKKVHCGHNKHNWHDEALFVSPLHENCAAHFVYTYDGKILPCEDSELVPKARETIFQLGLDSEKLNALRRVAWEPILYLEDLTIADIDAYLQACDTPNDQGEFPEYAAAVQSILQVEKRKMLS

SEQ ID NO: 83220 - protein, 465 aa, Escherichia coli; identical to SEQ ID NO: 81096

SEQ ID NO: 83221 - protein, 243 aa, Escherichia coli; identical to SEQ ID NO: 81097

SEQ ID NO: 83222 - protein, 418 aa, Bacillus thuringiensis serovar kurstaki str. HD-1; identical to SEQ ID NO: 82064

SEQ ID NO: 83223 - protein, 215 aa, Bacillus thuringiensis serovar kurstaki str. HD-1; identical to SEQ ID NO: 82065

SEQ ID NO: 83224 - protein, 440 aa, Endozoicomonas numazuensis
MKINTLSLENFRCFEQAKFDLDERITLIVGDNAKGKTTILEGLSVAMGGFLLGVPHSYVGVTKQAFVRNLHARDVQRYILTSNQVATTELKENCKVAACGPVGQHRSLSWHRLLKKAGGRTTNEGCKKISAEAARLYETQKTEGAVAENLPVLVYYGTGRLWAGQKTQNVNKFTAANTALGYYYALKSDAQNKTLMPWLEWIDRIAYKKRIPDMPALVAVLDAITAMIPNATHSYYSPEHSELVVEFKDKAFPYSDLSDGQRNMITLAGDLAMRCAQLNQHLGKDAARKTPGIVLVDEVDANIHPGWQKLLLPRLLEYFENIQFVVTSHSPFILQSLDHGKIINLDHMNNPEQDADQWNRGVEDIVTDVMGVDTPRSALYQEMMETAQKYYQLLEAGKPATDAEVKKLSNELDQYELEFSEHPAYVALLKAQRKKQGLDG

SEQ ID NO: 83225 - protein, 209 aa, Endozoicomonas numazuensis
MRPVDRLDIENSYSTYKSYLKSLIESFGQFCSYCERPDKMDVEHVVPKSKEAGLEVEWTNLLLGCSRCNRDFKKDKNDRREGYLWPDTDNTFHAFTYEETGRVFANPELDNAARQAAENLKVLVKLDDGLEVQKTLNLGRRAEFRRANLIKDQFANGYIDIEGIMIMLDRVSYWSVWMTVFADVPEVKACLLDSDCFPNTATHYFKEEG

SEQ ID NO: 83226 - protein, 381 aa, Janthinobacterium agaricidamnosum NBRC 102515 = DSM 9628
MEPQMPSAVTATGRWPGVTNDFAWMQSRERVKAGTNTLGDSWTKQLTKYGTELQKKIREEQDGVQTALPLIAYLGTGRLWYQGRYTSVAADVTLDKSEYSRLSGYLNCLTLSSSFKQFADWYGWVYRSYRESQIIALETGVGPGDLTQYFENLIQAVKSAVNALLQEQTGWHDIAYSAQYQQQLVLSHPEHGVLPLEMLSDGLRNAVAMVADLAFRACKLNPHLGAEVLLETEGIALIDEIDMFLHPSWQQTVLGSLKQAFPKIQFIVTTHSPQVLSSVRRENIRVIGKDAEGHMIAEPPLARTYGEPSGDVMLSVMMVDPQPPVAEKEDLQRLTELVDQGNYATEEARRLMDGLVAALGAEHPQLQRLERSIRRQQALQR

SEQ ID NO: 83227 - protein, 240 aa, Janthinobacterium agaricidamnosum NBRC 102515 = DSM 9628
MRFIKKPDGGGFYLAQAHAQPPHGAKDATSRWQSYAHRPALCEELVEEQFFLCCYSEIRADLLGLGYHIEHVQPKSSFPQRTFDYQNLAASALASKNDLAAFKAQEDEVFAGHAKGDQYDAHLFISCHQADCARFFAYLSDGRVVPAESLQQQADRDRATYTIAILNLNSPYLINERQRWWNELDRIFSQHQQNDWSIEHLAMCDLLPSGKKLSQFFSMTRQFFGDVAERVLQQDAPHLV

SEQ ID NO: 83228 - protein, 445 aa, Mucinivorans hirudinis
MPDKMKINRIHIRNFKGFEDRSFDFDPTFNVVVGKNATGKSTVVNALEVALGGYLQCLGIPATPQYRRQFRAEERLIKWNPKEKDYFYNKENTSISATATFDLGNIPNMFNPIEWTRELLKNNTTSHNRRLVGDLIDISEKIKEHKDSIPMPIVLGFGTKRTNSQIRKGKEKQEKRRRLDKAFLAALNDKVDYDGVIEWIHNYEKNLKYGKEFERTKEAVFSAIHTAIPYLKNIEYNNYYLQLEADIEIDGYNYGTTLQSNMSDGLRVMLKMVAEIAYRCAVLNGFLGERAVLETPGVVLIDEIDMHLHPNWQRRVISDLKAAFPKIQFITTTHSPFIIQSLQRNELLILDDSRERVIDFENPYGSGIEDISQVMGVEEVPRSKQFIEYSKTAEAYFNLIEQGVKIIDPGELQALKEKLREYEDRFSDNPVYVALMRAERSRVKL

SEQ ID NO: 83229 - protein, 227 aa, Mucinivorans hirudinis
MRPVKKWQPNDDSTPVKILEDYIPYQKAKEDLVKNIGDYCSYCERKLLLDTIHIEHIKCRELYLELETKWTNLLLSCPTCNGTKRTKEVKPEQTHLPDRDNTLLSFSYLEGGVIVVNSSLPETEQSKAKNLIELVGLDRRPGHPKHTSKDKRWEKRMEIWEYANRYIENDTQTIIDLATLSGCWSIWYNVFKDNAQVRKLLIEKFPGTNRDCFNESGEPTALDRDCL

SEQ ID NO: 83230 - protein, 542 aa, Vibrio nigripulchritudo SO65
MSSDIPKQLRRLTRQSESGDFISTYQLAKMYSEGITGIDVNLAKAQKYKTKCAEQLADYQFSLNSLKLINFKGFEHLDISFSQKGNTTVLVGNNGSGKSTVLDAIQKTLTHLSSRLTTRSYNGEQIDEIEIANGDDFSTIIPTFTINNVRFSLELSQSRPLIEVKKKSKFSEINELGSILRQANSSTPNFSFPLLASYTVERANDVTTKDIEESEEILNNHTWDKSKAYSKSLTGKADFKLFFRWFKEQIEQENEDSSEILALRAQIKSKQKELESPLLKALMSDENASESAQALVNSYAKDLEILKTKLNAQADINSKSLDIVRSAIYKFLPDFSDLKLRRNPLDMTIKKDQEVLSVLQLSQGEKSLLALVADIARRLTLLNPGVENPLDGTGLVLIDEIDLHLHPQWQQNIVSRLEATFKNLQFIVTTHSPQVCHTVDSDNIWLLKNGTKFKAPKGMRGAVSSWVLESLFEVDKRPPEDSITILLQNYKKIVYDNKYDSEQALKFRKELIDHFGSDYDELIELDLYIENREWEKGFEEDL

SEQ ID NO: 83231 - protein, 262 aa, Vibrio nigripulchritudo SO65
MRKIFKSTEENELTRYATEHPNGTWNNFRNHNQGRDYKAIKSKLFSEQSELCAYCEVGLHEAGDNNRRVEHFHSKSDVTDEQHNVHLDWFNLLGVCVGGTDHVSKQAFELPANLSCDAYKAYIEAVENITDKNWQGKVLSPLTIPQPHKLFTFNKATGQLHPNEAYCAEYSMEDNKFESTIELVCETIRVFNLNCERLNKARLKVFHSFEKRFKVARQNNDMNILKRLTLHWSQGSPLPFQTTRNIIMEDNAITSKMLQQIQ

SEQ ID NO: 83232 - protein, 444 aa, Bacteroides fragilis
MQDITIKNFRCYEEKNMEFRRGVNLLIGDNSVGKTSLLHACNLVVNAFFSGYSDENTVWKSADDNDFRETGVAELPIEIIFHPNEQDYPIIQTQSGNNYSLDPNVELKIEKKSKKNSRNLTTGLKPLRDYATVCNHSSHILQEDKSVLQVNVLPVYACFTTEDIHSVRKFDKNKFNKYNHKPSFGYFECYDCRGLFECWIKRLLVLKGAQKGEEEINSVRNAIIDALGSTGCNIINDMDIRHNEGKVYFKFVDGRESESALLSDGYRRLMNIVMDIAFRCALLNKSMFGAQCYKHTHGTVIIDEIDEHLHPALQVRVLKALQDTFPKIQFIISTHAPLVMSSVEPRTDEDGNDINVVYKLEYIDGKYTHKELNIYGMDASTIIETYMGQPSRDLKVNNDIKSILELIDKGDIQTARKSLEELEQNIASGDPELTRMEALISFME

SEQ ID NO: 83233 - protein, 229 aa, Bacteroides fragilis
MILITKNKEPKEWTEYRNTPGVDYQAIPELVQSLLKEQGYICAYCMRRIPTKDKIYKKDGVNFVYTNEDHRIEHIKSRELHDDLKLDYTNMVACCPGHIGTQDHCDRLKGSKDISFSPIDKQFIETVRYSSNGKVSSTNDVYNGEMNDVLNLNTKLLCKNRLSMLTEVICKINSTCRKGKSWDKKTLELLLKKYSEKHSVKDEEGTKEKYYPYCGIIIWYLQKKLRTLG

SEQ ID NO: 83234 - protein, 584 aa, Bacteroides fragilis
MDSIQIDFTELRTSWTKYDIVQALDVIYSVDTIQKYKNKEAKINERILRSFLGINSLDDPIPDYWIEIQKYPIEKKIFSLLALIFTHGGVVKDFATKYSKDNMKGVFYIDSKDKQLTNIRSALVVAEATEPTNRRKNEVPYDFSVAYYNPKVGKLFKKVLLERFSRFTNKELSNDEFYSICEKNEFHKALSLTFDQFKTWLEGYSFNACYVKELHIRNFLSIKEPVDIDLEKSKEIYFRGENGDGKSLIIMAIYLAFNGNYIKYKTEKRDTGIASDILDNNSDLYGIDEWGHQYNISNAIYLANLYAYGTHRGRYNADPSEKYGFMSLFNNDLTLNSPEQWLKNLKLEEEQAEENKLKIKVATKQLEDILFNLLERNVKTHIEGSKVFFEEKGCFLGIDQLSEGYRSIIIFVCDLLYRLYKNNSDDIFKTKGVVLVDEIDQHLHLKWQRIIVSKLRNIFPNIQFIFTTHSPTIIQGASDDSIIFRTYRVNGITKVSEPYYRKDLDHLMMNTLVTSSLFGLEDSRLDTDDNNSDTNDTYLLYKINKKLISKLQEQKEKGKNFISENEIDSLIDSILEEYQNEEDQ

SEQ ID NO: 83235 - protein, 258 aa, Bacteroides fragilis
MKKINKDLAVIPPSLVIGDDKLTHQRRLELIAKKHYINEAPYNDRYKTDDIRDRLVLIYNNKCAFCEQKVEQYHIEHFRPKQIYYWLAYSWDNLLLACHYCNNYKGINFAIKGKRAKCPSTKNLKSINTISSNKYNLQEQPKLINPEQSDPSPYLIFERDGKITSDNEDYKYTIETCRIDRKYLNDSRKKIIDKFKREIISELVHNSTPEEQKQAINILVRRFVNEANDNDNEFLAFRNFAIGHNWLNDVVKEAITTL

SEQ ID NO: 83236 - protein, 465 aa, Escherichia coli B7A; identical to SEQ ID NO: 81096

SEQ ID NO: 83237 - protein, 243 aa, Escherichia coli B7A; identical to SEQ ID NO: 82703

SEQ ID NO: 83238 - protein, 217 aa, Neorhizobium galegae
  bv. officinalis bv. officinalis str. HAMBI 1141
MTPNLPIMHHYQKFQEVLRNVLPQSLGFKYIEIRMPEVVLVTDSGDFTLDAMSGGINAIFSIAWQIHMFAQDQLDFIVTIDEPETHLHPSMQRTLLPSLAKAFPQAKFIISTHSPFIVSSFPDANVYALVRNDRARVESILLDLRDLSGTPNEVLREILDVGSNLPVWVEEAVGKVIDDTANLPPEEKARAIMTQLERLGIANAIAEYGNRVADAKP

SEQ ID NO: 83239 - protein, 210 aa, Neorhizobium galegae
  bv. officinalis bv. officinalis str. HAMBI 1141
MRNLDKLPIPEVLNDNWIQWTEQYKSDKTSATKKYRYRHSDIKSTLVEETKSKCAYCESKIGHNTPGDVEHKTPSSVNIDLHFDWTNLTIACTECNRRKLTYFDAQKPFLDPYDGDVENRVIHLGPVVGWQPGDEPAEISVRTLELHDNSRAGLIKRKIEAIDHLNNLVARYHQVDGVMKELLLLSIQKLKSKEAEYSGMLKAVCDNYGI

SEQ ID NO: 83240 - protein, 395 aa, Amycolatopsis japonica
MYIERVRLENIRGFSGARAVDLRLPGPGWVVLAGRNGSGKTSLLRAIAVAAAPDVAWGLLSDAGSWISTDQTSGSIELSVMREEGPAPVEVRWLDSGLLPISGLPPGQPFCAAYGPFRRLAGGSGEAESWMRGAGSLARMASLFHEDASLAEGVTWLINQHLRALEGKAGARELKDKALEILGDGLLPGGYRIRDVDSDGLWVEYRGDRFPLREMSDGYRTVTALVVDLLKQLHGAGLDHESPGVVIIDEVDAHLHVSWQKRMGPWFKAHFPRIQFIVTTHSPYVCQAADPGGLIRLSGPDEEVPPRVVSEELYERVVFGSGDDAVLSDLFGLDTPYSPQAVELREHLAELEFQVASGRADANGVREWERLRGMLSSSPPSRVDEVARRFEADDR

SEQ ID NO: 83241 - protein, 246 aa, Amycolatopsis japonica
MIGIRRIALPGQVVADLEELTARIPSGDTKEARRLWRVSRAVRRSLRAGLDVMAAGRGYCMYCGDGLGSTVDHFEPIARNPGRVFDWLNHVLACEYCNSHHKRDLFPVDEDGNSLLVDPTAEDPLEHLFLVLSIGTYRALTEKGEQTIKVCGLNRAQLARGRETAVNQVSALVLAWWTARELGDEAKRRAMVWTLLDQPHADVLHAMLRQARMPGARVVFRADDELIDLLRAPELAEDLQLSGGAV

SEQ ID NO: 83242 - protein, 424 aa, Cystobacter violaceus Cb vi76
MYLTRFHIENIRAIRELTWEVPLKSAPGWHVILGDNGSGKSSVLRSLSLAFVGAPDALALQPDWSSWLRGNQMGEVQLGLAPDPRLDKVSKFSVGKRRGRQLPKELDVVVSLAGGRGTKPIEMVGEVWETGKGWFSAAYGPFRRFTGGNEKYEKLFSSNPRLARHLSVFDESVALTEGLRWLQQLQFKKLEGDPEGALLDPLMEFINQPGFLPHHARLEKISSREVLFVDGNGYRVPVEELSDGYRSILSMTFELIRQLAATYGPKRVFHPKDPTKVDVPGVVLIDEVDAHLHPTWQRKVGLWFREHFPKLQFIVTTHSPLVCQAAEVGTVWRLPKPGTNEEARQVTGVELDRLIFGNVLDAYGTGLFGEDVARSEQSKQRLQRLAKLNLKEMRQGLSAAERREQTSLRASLPTASMAVHDSDQ

SEQ ID NO: 83243 - protein, 270 aa, Cystobacter violaceus Cb vi76
MLRLPDITLSATALHQLDRWQAEVDAHSGYAARVDAAKRAFEQHNSARNRTFAEVRRTLAEMCSGEQRCGYCEDSVADEIDHIWPKHLYPEQVFAWRNYLYACGRCNGPKSEQFAVFTPRARKPVDVGRPRGVSPIRPPLKGPPALIDPRSEDPMEFLVLELRDTFYFEPSAKRGTRNYERADYTLRVLQLNKREYLRKARETAFIGYQDMLTRYVSLRERRAPTTQLELRRKAVQRSPHRTVWKEMQRQHSMHPALRTLFRKAPEAIHW

SEQ ID NO: 83244 - protein, 285 aa, Cystobacter violaceus Cb vi76
MLPRPFASDKAEDPILSRLNSLFDRGRIIGTGFADLLDNPSEFSRALRAALVDSQLLPRATDIDLKGSGETKSPSDLVEKHSFELKVGTETLRLPATWLSQGYQSTIAWVADIIGQMFWENGGPIPLSEMEGLVLIDEIDLHLHPKWQLGLIPTLKRVFPKLQFIVTTHSPMILPGLSREEVVILGTDKEGNVIAHESPESPSLLTGSEIYRTFFGIDRLHPTDLGKDLQRYSFLIADPLRSDEEDKEMRDIRERLAAAGVDPGWEPVPRIQEPPEQTTVSEEPS

SEQ ID NO: 83245 - protein, 270 aa, Cystobacter violaceus Cb vi76
MIRIHRGVEPAELAAARATELQRVQTIAATRRPVQEDLGRKYEIAHQALWNAQRYKCCYCESREQSKRNDVEHFRPKARADRRPGISVDHGYWWLTWTWENLLFSCRNCNQAPAKLDKFPLAEGSAVLLVGQHPPGQERPLLIDPATESGIEHIQFVRMPHGPTTTGKWYPRPRNGSRKGAVTIKVCMLDRPDLLDLYGDYVERNVKPRTDDIRTALQEGRIADARREWSRALLTLLNPRQEYVGLSHDALDHFIPTVVRKRHQLELRLP

SEQ ID NO: 83246 - protein, 436 aa, Cystobacter violaceus Cb vi76
MLEALHLKNVGPMPETEMEFAPRLNLLTGDNGLGKSFLLDVAWWALTRRWPHDLNSNLTSGYPARPSDVKKAASIDFKLTSKTKSVFYQSKYVPRDESWLGKAGRPWNPGLVIYAHADGGFSVWDPARNYWKKKGSIDIQERLPGYVFSAKEVWNGLEVDIDGKPTLVCNGLLSDWSAWIREKGETAKRMEEILGNLSAQGEHLRVGPLKRLSINDARDIPSIHTAYSAGVPILHASSGVRRMVGLAYMLLWSWNEHARAAEQLGEKRTSQVVMLFDEIESHLHPLWQRSILKSVLHISESLHAKATVQLIAATHSPLILASAEPLFDANKDAWFDLDLEKGHGEPVVTLRRRDFVRRGDVSNWLTSEAFDLKSARSLEAEAAIEQARALLRRTQPPPTLKEAKAVDAELRKAALSDIDPFWVRWGNFMEELRGLK

SEQ ID NO: 83247 - protein, 219 aa, Cystobacter violaceus Cb vi76
MIPVAPAPEPPDFDLRVRQKGLNAIAEMVGEKPARTRRGPKRKKLADTREKIPADQFPPYWREVLPEMLESYHHLCAYLALYIHSATGSPSVDHVVPKSKSWDKVYEWSNYRLACALVNARKNDVELALDPFQISPGLFALEFVEFQVVVGPAAQGNQVDQVTASINTLGLNVRDCRKARQAYVEAYEKDEIRLSYLTRHAPFIAQELRRQGRLLRGDT

SEQ ID NO: 83248 - protein, 436 aa, Cystobacter violaceus Cb vi76
MYLTRISIRNFRGIEELDWDLPPDAPRAGWHVLIGDNGAGKSSVLRAAALALIGPEEAPMLRLNWNDWVRFGTGSADIDLLVEADPKEDRSVDRSAVKGPLRVGIDVQRRPKPRVIGSTRWKTRGAPPESNVWGSPRGWFAASYGPFRRFTGGDRDWEKLLEEQSRVTRHLSIFGESVALTSGLKWLRDLALLEYTPVGRMKPLFAPVNVDKVSTFVNQPGFLPHGMRIDEVTPQEVVFRNASKGRVPAENLSDGHRAVLSMTFELLRQLSLAYPDRDLFDKSGLSVARPGVVMIDEVDAHLHPTWQREIGPWFCKHFPNIQFIVTTHSPLVCQAAEFGTVFKLAVPGSDEETRFLTGIDLERLVFGNVLEAYGTGAFGLRTTRSRTSQERVDELAALNAKELTDGLTKKELARQEELRRSSPTVAYVSKPRVPRS

SEQ ID NO: 83249 - protein, 282 aa, Cystobacter violaceus Cb vi76
MIQLPRLRLDTKVAKTLDEYQAEVLAHRSYTARVAEARRLFSRYNTKKSATFTSVKAVLTKMCSGARRCSYCEDSVADEVEHIWPKDLYPERVFAWKNYCYACGPCNGPKNNQFAVFVGASRSPTPLAHPKRKKGQPAPRLKKPAAGKPVLFDPREDDATRWLTLDILNTFHFVVTAKSGTRDAARAKYTLEVLGLNRSPLPTARAQAFDGYRARLREYCEEKRAGAPTARLVLLRDALLRVSHPSVWVEMKRRHEKVPALKPLFAEAPEALSWEPLPGAAG

SEQ ID NO: 83250 - protein, 472 aa, Halomonas sp. KO116
MKLNKVDVRNYRCFASVSLSLHPQMTVIVAENGQGKSTLLDALRVGLWPFISSFDLAKASGYSDPQNGISVADVRRVMESSVGMKRQLPTIIEMEADWGELCSVECGNTMPASHWLRFRESEASRTKTRGDGDTKQLEKWAKALQETVRKPEDASPLPVFGYYGTGRLWMQKRLLSEADRRSEKQSEKDDFYVRTFAYRHCMDPASSFKYFRDWFIWAWKSRTNTNERKSATSADRIRAHERIEAVQHAIDAILKPTTGWHTLEYSLEDGETLILNHDNAGYLSVDQLSDGIRSVLAMVGDLAYRCIRLNPHLGSEAPSKTTGVVLIDEVDMHLHPRWQQRILQALQTSFPSIQFVVTTHSPQVITTVARENLRVIHEEDGQFDVGMPEFSPLGHSSGDALSYVMGVTPTPAIDNIEELVAQTEQLIRAGKEQTPEAQQAMQTLTAMGYEFTEAELHTWRFLADLKKSRNNG

SEQ ID NO: 83251 - protein, 199 aa, Halomonas sp. KO116
MVELQHGNTEPHVLTAFKQQHPGLQVIDFKENQQFQAIKYEIRSALNLLQEGRCVYCEAWLSDEEGHIEHIVPKGGPNAQPTLCFEYTNFAHSCSTYNTCGHSKQAKVLPIPPGPGCNDHWTLSTEGGYIQPLAGLNRSQRHKVTQTRDMLGLNRHAELVRDRKKWIEQFEVVAKAHPEAIDQFIDSAPYRYLLATLLR

SEQ ID NO: 83252 - protein, 449 aa, Hafnia alvei ATCC 13337
MRQQYRLESITLRDVGVFEHTHFDFPQIKSEEKDAEKAEIHIFTGPNGCGKSTLLYALAAVFQPDPNDGGRLVRKRYRGENSSIRFIFYQEQGVFGVQNMASPDSVQQIYNTDSFYYAVTNGVRSVLWRNVSYFNHSQEYSTKKFDFAAFAYSGNRDMQSSFNVSAIQNITNSPFESSLSFGQTVRPQVLTQWIANNRTQAALARADGEVLEAEHYDLALLRISQFIRNICSLDVSFQLKRLPLEVIINMDGLKVTFDALPEGLKSIICWISDLALRLESIPWQENRDIFSQPIILFLDEVDIHLHPKWQRRILPAIQKLLPNAQVFVSTHSPFVVGSVEDAFVYRLPDPQRTVCRDPASAEVITPTPSAAGKSYQLILDEVFGIEEQFDVETEALLEKFYQLKKAYLSNPQDDSQLVALAAELSSKGSEVATIVSMELRQITRLVKKG

SEQ ID NO: 83253 - protein, 199 aa, Hafnia alvei ATCC 13337
MYKFIRSECPEYLALCWESLTAQHRQAKENNPKHKFDWYAGFKYGTTLDILFTMNVGHCAFCDGGGIGEQSRKTIEHFKPKSLFPDLAYKWENLYPCCDQCQSQKRERFDPDLLIADDIAYQFDGYFMLDYRTGAIEPSAAVDSNHQRRAQVTIEHYGLNLPERKRGRLRELQHYQRRDKDVSQLDDFSYRYFLQDYTD

SEQ ID NO: 83254 - protein, 498 aa, Rahnella aquatilis CIP 78.65 = ATCC 33071; identical to SEQ ID NO: 81484

SEQ ID NO: 83255 - protein, 206 aa, Rahnella aquatilis CIP 78.65 = ATCC 33071; identical to SEQ ID NO: 81485

SEQ ID NO: 83256 - protein, 525 aa, Bosea sp. LC85
MRIDWLKIHQFKNLGNVEINFDKSELSTVLVGENGTGKSNVIEALATIFRDLDLGTASAFEYAIAYKCHGHHIVIDNSQEHATPRITVDGKSLSRSAFRAGRSAFLPSHVFGYYSGSSRRLEQLFDKHQLRYYKKVISPRSSAADIHDMDLRRLFYCRPAYGQLALLSYFAFGSESAKAFLKKNMGIVGFDSALIILRRPRWADGKEARHRAQSGKQNFWNSSGLVRTLLDKLWAHALAPIEDLALEQDDYRAKPTNEEQIYLFIEDLDSLNQIAAAFGDERTFFALLETLDISDLIREVRIWVAKDNVEGEIPFHEISDGEKQLLSVLGLMRFTSQDESLFLLDEPDTHLNPNWKWDYLHLVDEVARQGESHIILTTHDPLTIGSLKASQVQVFARADNGEVAVRPPDVDPRGLGFTSILTQIFGLPTTLDPATQGELDERNELLRVKGRTQQQERRLLELSQRLRRLGFVLEDREPEYELFLRALTDLKHEGRAALSPETIAERNNVARMMLARIMEERGARK

SEQ ID NO: 83257 - protein, 281 aa, Bosea sp. LC85
MIYVFQDPAKIPAAWLAKVAELQAELERLETKKERAGYIATKQAIWSEIKDQLLEMSRQKCWYSEAPDAVSDWHVDHFRPKSRALDADRTVHDGYAWLAFDWKNYRIAGSYPNSPHKDGEGVTRGKWDYFPLSPGSVRASWEQRSIANEIFLLLDPTDKNDPKLMTFDEEGVPAPVDPRNPIIRKRVETTVHYLYLDSPRLIAARKKKWREVSDLIEEYRFACPDSYEACTVQDHQRVQRLIEKLAAAAGPQASYAATARACLRANGFDQFIQAVEEAAAA

SEQ ID NO: 83258 - protein, 548 aa, Xenorhabdus bovienii str. kraussei Quebec
MKKNRHIRALEMNAKKGDLLANFNLYQEYFSGEMNVEKNESLSEHYFEQCCVLIEENNFILESLKLIDFRRFKKLNIEKGLDRHLTVFIGTNGEGKTSIIEAISKTLSWLNANILKEDGQGSGITYDDIHNESEGYADIYTEFKYGVDTRINARLSRAIEAASKKRDSEVVGLKSIANMWRIINDKRRINLPLFASYLIERSYPFKINKRNFLIDMPEKRRLRFDAYTDALRGTGKFENFVDWFISLSKIKKYGTSIFNEELNQLKKQIEIKVMNEILSTIYDDSILKEMKNRYLESLEEKQDDGSYESIIVSKVIEAISHVVPSVEDIWVTDKSGVDEILVLIDGKAVKLTQLSDGQRVFIALVADLTRRLVLLNPEKENPLEGNGIVLIDEIELHLHPKWQQSIITTLQETFPNIQFIISTHSPQVLSTVNRKNIRYFSGEDDTGAVWLRVPDFQTKGVANSDVLEQLMNTFSIPDLPESKWVNDLIELVEKDNYENNSNAKELFNKIKEHFGDEHPEVKRCESHIRLQSLKVKARKKFDKKKGEN

SEQ ID NO: 83259 - protein, 226 aa, Xenorhabdus bovienii str. kraussei Quebec
MKKLERQEAPDCLSNFKHGIDSWGAVPKDEIWPKLEQMQGEFCAYCECRLKEKSKHIEHFRKRETYPDKTFNWGNLFGSCGDPQKTGGWGRCGIYKDNRKLNPPCDINKLIKPDEEDPGDYLLFLTSGHVVPQRNLCDRERQKAEETIRVFNLNNDTSLFNSRKNTIECIKNEIRTLYECLDDINDSDCQSWQEWEKLREEYTKEIKGKEFQTALEHAWKYNRDYA

SEQ ID NO: 83260 - protein, 540 aa, Vibrio cholerae; identical to SEQ ID NO: 80874

SEQ ID NO: 83261 - protein, 205 aa, Vibrio cholerae; identical to SEQ ID NO: 80875

SEQ ID NO: 83262 - protein, 540 aa, Vibrio cholerae; identical to SEQ ID NO: 80874

SEQ ID NO: 83263 - protein, 205 aa, Vibrio cholerae; identical to SEQ ID NO: 80875

SEQ ID NO: 83264 - protein, 540 aa, Vibrio cholerae; identical to SEQ ID NO: 80874

SEQ ID NO: 83265 - protein, 205 aa, Vibrio cholerae; identical to SEQ ID NO: 80875

SEQ ID NO: 83266 - protein, 540 aa, Vibrio cholerae; identical to SEQ ID NO: 80874

SEQ ID NO: 83267 - protein, 205 aa, Vibrio cholerae; identical to SEQ ID NO: 80875

SEQ ID NO: 83268 - protein, 327 aa, Thioclava sp. 13D2W-2
MTQSGSVHLPIFAYGAYRQFLKGERNFAVHKHVRSLFHSDELLSNPERWLLKLDDANFDMVVRALREVFSIEGAFEVLERSDGKIFVVAEPSGKEQESPLRTPIELVSSGFRAVLAMLCDIMQGLMDPRVNPGFESLDGATALVLVDEVEAHLHPRWKMSIMTGLRKALPGVTFIATSHDPLCLRGMKKGEVMVLERISGDQARTDLPVFTHSLVDLPDNENWTVEQLLTADFFQMRTTESLAAERRAAEMEDRLAKGTKPSDDPELSAYLTELSADLPIGHTEVQRLVQEAIATFLRERRDASDEKLRQLRDETRQSILEALRSVG

SEQ ID NO: 83269 - protein, 316 aa, Thioclava sp. 13D2W-2
MRKVDRTEAAPEDLSEKGGQELLDAITHFEGNPANPESFDFKRYKLKSVKDALEKMFHGKCAYCETFYASSQPLDVEHFRPKGAVAGESDHRGYWWLAMVWENLLPSCIDCNRKRNQVTPKGDTSQVRLLEETAGYSASATVGSGKKDSFPLAETGVRASKRTDQITAEKALLLNPCEDDPKLHIRYFFDRERPVSFVLANELAGDPDFTGADGLSSKGATSVHVYGLNRLRLVQARTRLLRRLEFLADLAIDLKLLAEKLKGSADPDIKRAGVQVDGFGDRTLVELIEMCAEDQPYSAMAQSWMREFQERLEAVV

SEQ ID NO: 83270 - protein, 452 aa, Pseudomonas syringae
MEIKSFRLINVGRFSDLDVALAPTEKHASKVTVLVGNNGAGKTTLLKSVATSLSWLVARVKSPSGIGRRIDEDAIQNGAATSSILIRVQDVLISDFLVDSLEFQWGIAANRRGRHSASTIGLGELTKLAGGYRSELTEKADFSLPLLAFYPVERSVIEIPLKVQSKHTFDQLDGYDNALGRGVDFRRFFEWFREREDSENETGISTELLNELSQKIAPGTPVWELLAKEHASSRDRQLTAVRTAIEAFMPGFTKLRVKRKPRLHMAIDKDGKTLNVSQLSQGEKSMMALVGDIARRLAMMNPALENPLQGNGIVLIDEVDLHLHPKWQRSLIAQLTTTFPNCQFLLTTHSPLVISDSKDVLVYVMDDGELREQDSLYGLDANQVLSSVMDTGIRNEAVQNCLDEMQHFLMRGELDEARTLYGVLADQLPADHIELARASLLIRKLEIRREKD

SEQ ID NO: 83271 - protein, 216 aa, Pseudomonas syringae
MRKIEKGTLAVLEKWKRANKGKKYADLVGHDNLKDAIRHACVTEQHGLCAYCCCRITVEKGSARNEHVEAQYLAPHRTLDFNNIVASCTKAGRCDDAHGRQPLPLTPLMIECESELQFELSGLVAGLTPRACVSIKTLNLGDTHASNRGLVGERKRMIDALLFSCSMNPGELLAEEDDVLDLLKDELLESDAQRLLQAFSPVLVNVIRSIQAARHS

SEQ ID NO: 83272 - protein, 765 aa, Pseudomonas syringae
MQYFERPSQPPAILKSPLTQASRKSMLEYWLIEPGRRSQTSVPIISVNEDEHLLREALANLNRQRCAFCEASDRLEVHRFRPAGNALPMSRSSDAHLYYLWLADAWQNLFPICPGCVPIEPQFAVRGSRCPLPTREQVEAYVNSGDGLWQFGMPSEKAMLLDPTEVRQFAGHLIPALDGGLLPGSTRGAYTIAHFDLNRGERRHQRYITYQQRLEELRSCTTPSDLSRIDRLVDFATLEFGGTWYLLLRRLLNHLPVNGIVRNPTPKQVGPALRRWAKARDAATLLAQAHHMLQREDARLHASDKQAMAPEPVVESITAIHIRNFKAIEQLDLKFKGAPARSLARSEPLAPALVILGENATGKSSILEAVALTLVPAAVRNALNISLAELVMDPAQLGVDGGDQATRAQIRIELSNQHWVELTIDQQAHGHSSNLDNQQVPVFAYGAFRRFTRTSQRTSPHAHVRNLFDGNVLSNPEPWLRHLRQDRFDMVIRTLREVLAIDGDFDVIQRAQESDILYMVTAISEPDGAFRFNRTPLHAVSSGYRSMLAMICDILKGLMNATIYPGFESFQSARGVVLIDEIEAHLHPRWKVQVMSRLRAALPSMTFIVTTHDPLCLRGMEQGEVVVLQRIASADSQAQRQMPITIESMADLPPVADLRLEQLLTSDFFQMLSTDDAHADRRLARIADLMAAHANGELSAEDERVLQDFNEDITNALPIGSSEVHQIVQLAVGEYLAKRRAASSQRLRNLRQAAKDQILSALERL

SEQ ID NO: 83273 - protein, 313 aa, Pseudomonas syringae
MRPVDRFSVPPPSSLLAGGAGPLELDDARSHRATAPVPGTKKKEFKYKAYKGADVRQALEKLFHGKCAYCETYYAASAPVDIEHYRPKGAVADDVAHGGYWWIAMQWENLLPSCIDCNRKRGQVLANASNSLVVLAGTAATRTRQAGKKDSFPLADTGVRATAETTNFSRELPLLINPCEDDPATYLAHSIDPQLPTGLIVAVGNAQQQARANSSIYVYGLNRLKLFQDRNRVLRKLQFLGDLVTELAESITALEEPATQRILEGTPAAGVTTRLRLLQDRLLTELKAATAPEAPYASMASAWLAQFTEELLL

SEQ ID NO: 83274 - protein, 452 aa, Pseudomonas syringae
MEIKSFRLVNVGRFTDLEVAMAPTERHASKVTVLVGNNGAGKTTLLRSVATSLSWFVARIRTEKGSGNRIDENAMRNDASSASILLEISDAVVFDPDIHSPSSKWGISTARKGRKAASVSTLSDLNLLADSYRSLLTQSNEASLPLVAYYPVERSVLEIPLKIHAKHTFDQLDGYDNSLARGVDFRRFFEWFREREDNENEKGISAELLNDLSHKVAPDSAMWKLLAQEHASSRDRQLTAVRVAVEAFMPGFNNLRVKRRPRLHMAIDKEGATLNVSQLSQGEKSMMALVGDIARRLAMMNPALGNPLHGKGIVMVDEVDLHLHPRWQRRLVEQLTTTFPNCQFLLTTHSPLVISDAKDVLVYVMDDGELHEQDSLYGLDANQVLMSVMDTDIRNPVVQTCLDELQHFLVRGELDEARTLYRSLTNELPADHIELAKASLLIRKLELRRAKA

SEQ ID NO: 83275 - protein, 215 aa, Pseudomonas syringae
MRKLEKGSLAALETWKRKNPGAQYRDLVGHDVVKDAIRQACVGEQYWLCAYCCRRVTPEKISAHNEHLEAQVLAKNRTLDFSNMVASCNSPGSCGKAHASQPLPLTPLMVECETELQFELSGLVNGTTERARSTVKVLRLGADYKCNRRLISERKQMLDTLIYDGGLLPAELSLACDEVLQALLNDLSQPDNQSKLQAFSPVLINVIRQMRSRNN

SEQ ID NO: 83276 - protein, 226 aa, Hyalangium minutum
MIDLLPEVSDVRFAVPTAKVPAARVEVLTPYGWVAMRDLSLGYRTLIAWMVDLASRMFERYPNSPNPLAEPAVVLVDEIDLHLHPKWQRQLIGYLTDRFPQTQFIVTAHSPLVVQSATNANIVVLRRKGDHVVIDNDVESIRGWRVDQILTSDLFGLETARPPQIEEFLKERTALLSKPRLTREDEARLLELEAAIGPLPTGETHTEREALELIQRAAARLRNGPK

SEQ ID NO: 83277 - protein, 248 aa, Hyalangium minutum
MIRVRKPAEPPQILRTQGVQARRAFSTAYSRAARSYERGTRSFESDSDLYGHETVKQALIQAQHGKCAFCESRFTHIDFGDVEHFRPKAGWRQEEGEPLHRPGYYWLAYEWANLFVSCTLCNQQFKRNLFPLGTPAKRARSHKNDVTEEDPLLLDPAADDPEASISFREEVPYAVGGNARGETTLRILGLRREPLAEQRRDRLGYVKALRSLVLMGGPEAAKAQDLLQRMQQDSAQYAAMTRAFLRGS

SEQ ID NO: 83278 - protein, 483 aa, Vibrio parahaemolyticus
MTTFFTYLQDEVKSFSKKGGCLLLEKNFLSKEDKETYGTIEERKEVKNKSNVLTSDDIKLMKLKLKNIGIYEDLTIDFQDVLTVFVGVNGAGKTTILKALSLAIIGVRDSVEDNILSLRKINAPKEQESKITLSASVNNEFFENTISFKVDSDTGEVIAKGSYFKELYANETTLRLLVLCLSEQRNNGKPPVDTYLPKSPRIKDLLPIIRSKDQACIHDFTSWWANLETKKLTHPEYQQTINLCFNIFSEFIGTEISSDGLRKVEPETELWVRYSNNRSLPFNLESQGYQTALGWIGYIIQRMVESYEKIPQPLSQPSIIVIDEIDQLLSVKWQERILNILKKFFPRTQWIITTHSPMVLTDLEKHQIIRLHDLDGKIVADTNEVDLLMWQYGDIIRKFFDIPINNPKFIEQTLKQEIKELQKLPPSDRTANDDIRIEELQEQLKKVQLSRYEVDPVYQQQFDLHKREEELLALIKKMKDGLE

SEQ ID NO: 83279 - protein, 264 aa, Vibrio parahaemolyticus
MKLVIRSSIPVELTENKVRWTLPWVHYYKKIKDIDGNLLKKNKPTTSYWLNPSIRQPLIRDFKSNCGYCGSLISSPWSQGDEVLPGKGDVDHYRAKSEYPQFTYHWKNYIWSCKPCNQHKGEFDDPKYPIFNPCNKDDCNKLEFIEDFGQFCLFKKYENNTLLKKRFENTVKYTLLNSESICNQRRDIITLLRGYFVSINNLMKAINSIEEMQIGEGFKADIQTEIEKNIERIRITTNSESFKLLISDELKLLTNEYQEISELL

SEQ ID NO: 83280 - protein, 738 aa, Flavobacterium hydatis
MNFFIVSAGEPGSDYIEDNFKDILETNEFALYANTAQKGTYYSIEKDDVLILKYERNFVAYGTVVRKYSNEYKNFSLRVQVKEWILHSIDDPKKGVSRYGIQNATIGGGKYGTVKTVKPSFGLDKIREINETHNEYYIIFSNSINDKSKFRKKGDYFDLHEELFTYLLKKSETDPDFTFVTRDSNNNNALEKGYWFYGEDTVAISFWTEMDFIEDIPVISFLINPDGHCRLIIQTDIQEDLKKYFEDSRWWKDELKDLNQRDTWFVKEYSNFDPADYINCLSYFLRNDYHIINKIIYEDNLVPGLKRETIKESPDDFDGFVLQLPIKEFNLRIKNIFKYRQNQSVELSYDSVDDENRADSLREIIIHNYGLIKNQKLKIGDSKWVFITGENGSGKTMFLRAIGTILGNRTLTEKEIQKGSLHVNANFNSGKRIIPFERFENNNLNLKISNLSRGLAMYGPYRLQHSSGLAKIKDYRQSVGKKSSFESLFGDGARLLSLVNQFEFWQDNSKNKKMTQARMEQIFSLLPKIIPDLRKVECIKIQNKFSIEYLIRSEGSEELMKLKWHELSSGNKSISNLVSDILIRLYYQQPKVIDPSELRGIIMIDEIDLHLHPKAQKELVETLSKTFPLLQFIVTTHSAVPLLGAPENSIICVVKRNAEQGIIINRLLKLEKEIGFLTPNTILTSDIFNFNFFDEISETRYENLYLEDRYEDIQKNIEVNERLSKLNEDIFPKDLFKD

SEQ ID NO: 83281 - protein, 294 aa, Flavobacterium hydatis
MVHRNKNLTSPPPELMNSKWNTIKQDLLVNKHNHEAKSECYRDTTLSYLTELYKNKCAICERERGMELQVDHFRPKKQRNNKTEIKYNQPGYYWLAYEWFNLIPLCSYCNINKSNKFPLSTWDNTNRISDHLNIHTIAGFNSYNLNWLQNHENPLLINPEYEIHPERHFSFRIDGRIIGQTDEGVETINICKLNRKDLKRERIEIRFRFVNDIKSALKDFDDHRDNAELKGELKSIFKRIKLNCHQNSAHSLYHIFLYTYFDYFIVSKIPQDLRDLVTNYFNDYKIWLSTNSIA

SEQ ID NO: 83282 - protein, 570 aa, Chryseobacterium luteum
MKLLRLQINHHFRSLPAGFKLIFREGDDNLYENIDEPICLVGVNGSGKSNVLEALAEIFSYLDQTFLRYVNSHSDSPLINSFEIEYLLPIAYDMRSIATDLDISGKEDFIHVKIAKLNDVKPTFYYYLNGVEKIIGTDFQSFMPKRIVGYSSGQNELLSIPFSKIKFRYYNTLLQEFKETYRENVEYSRLKYVDYEENYNILLSNFLMAKDNEADVLKETISIEEIESFELIINRNQSKKGALPIDVDIDKFLTFFESRSNYKYQKKPNVTVLGYTDIENLKIELQNNFGDAAGLYTLFKRLGYLNLNFVDKISIDLLLASDIEIYNNYDISDFSPKDKLFQIAEVNVRKSNLNYPINYKSLSDGEHQFIHVIGTLLMYKDESSLFLFDEPETHFNPQWKYEYTKTFKKITDRFKSQIIMTTHDPVLLSGLSKENVIVFNKPNNGLERTYKPDKDLRGMGVDAILTSEIFGLNSTLDSETLNDFIERRKLLIKKEKGELSDIENEKLTKLSYHLMDIDYNKPFADPLYKDFIMAIEDLDVYKQTEISRSEIREREEIAKQIMKKLNDNGL

SEQ ID NO: 83283 - protein, 291 aa, Chryseobacterium luteum
MRYINVEGYNPKSLKIVSQKKLSEMISKVSIAEKKAYLDVPDNQIWTKYKRGFERLSHNKCWFTEAYSTLSDFHIEHFRPKKKIYLIKNKDPYIEERIATDNNGYWWLSFELGNFRLAGGKPNQYKGNYFPLESGSKVAKELDNSWRNEKPMFLDPCVKEDVELITYDGVEPKESNPDINSLEHIRARISIKIYALKINKLKNARSRIFEVAKNYYNSAELNWKALNENNGVNQVAYNLAKENFDVSCSNLVLMLKPNKEFTRMVLVFLVSTNLDWIEEYIIDVAKANKFI

SEQ ID NO: 83284 - protein, 480 aa, Pectobacterium carotovorum subsp. brasiliense
MMKIKQVKLHNVGRFASLDAPIAPTADYPSNITVLVGNNGAGKTSILKAMATSLGWLVARIRSEKGTSATISENTITNRQPSAAIEITVHGGAQHPEPDGEKEASYSWTLAKARSGQKGQHVSQLNDLSALSDLYRTALTENDESSLPLIAFYPVERSVLDIPLKIKGKHRFQQLDGYDNSLNQGVDFRRFFEWFRLREDIENETIPSLTDTISNILNSNPEQFISQALDPDDNKDIDIKAEVTKLKNVLSKLKLSEKSNKDPQLDAVRHAIYHFMSGFSNLRVRRKPRLHMSVDKNGETFNVLQLSQGEKSLMALVGDIARRLAMMNPALDNPLHGQGVILIDEVDMHLHPSWQRSIIERLTTTFPHCQFILTTHSPLVISDSKDVLVYLLDDGKLTEVQSQYGQDANSVLLDVMDTDIRNAHIALKFNDLLDLIQRKQLAQAKTLLNQLTEELPATNLELTKARLLLRKQELRGERNN

SEQ ID NO: 83285 - protein, 210 aa, Pectobacterium carotovorum subsp. brasiliense
MREITKSVEPACLTVWKRANPTGHYDDLTPAVRQDIRDACTKEQFGLCAYCCKPISGGSHDTMNEHVQARNSAPQLSLDFTNIVASCTTPNQCDAAHGSQYFSLTPLMTACETELQFMISGRVTGTTSRAQETIRVLNLGDNETHNKKLIEIRKQAINTLLLRDGIDPAKGLEDDELLQSIINDLCIPKDGMLEPYAPVLVNILRGWLSV

SEQ ID NO: 83286 - protein, 488 aa, Pectobacterium carotovorum subsp. brasiliense
MMKIKQVKLHNVGRFASLDAPIAPTADYPSNVTVLVGNNGAGKTSILQAMATSLGWLVARIRSEKGTSATISESTITNRQPSAAIEITVHGGAQHPEPDGEKEASYSWTLAKARSGQKGQHVSQLNDLSALSDRYRTALTENDESSLPLIAFYPVERSVLDIPLKIKSKHRFQQLDGYDNSLNQGVDFRRFFEWFREREDIENEDGEALAFLRMMEESPERVSRILNDLENATEKLNRIEENNFKGLRGEAKKISDAFQLMREIKNTSKDQQLTAVRSAIAAFMPNFSNLRVRRTPHLHMSVDKNGETFNVLQLSQGEKSLMALVGDIARRLAIMNPALDNPLHGQGVILIDEVDMHLHPSWQRSIIERLTTTFPHCQFILTTHSPLVISDSKDVLVYSLDDGKLTEVQSQYGQDANSVLLEVMDTHIRNAHIASKFNDLLDLIQRKQLAQAKTLLNELTEELPATNLELIKARLLLRKQELRGERNN

SEQ ID NO: 83287 - protein, 210 aa, Pectobacterium carotovorum subsp. brasiliense
MREITKGVEPASLTAWKRANPTDHYDGLTPVARQDIREACTKEQFGLCAYCCKPISGDNHDTMNEHVQARNSAPQRSLDFTNIVASCTTPNQCDAAHGSQPFSLTPLMAACETELQFMISGRVTGTTSRSQDTIRVLNLGDNETHNKKLIETRKQTINTLLWANGIDPDEGLEDDELLQSIINDLCTPKNGMLEPYAPVLVNILRGWLSV

SEQ ID NO: 83288 - protein, 438 aa, Serratia nematodiphila
MKINQISLANYRCFAQGTFQFHPEFNLIVGVNGTGKTALLEALSVALSTWLLGFRNKPDNSSLSKDDARLSYQEIDGRVKTTQHWPITIGARGTVFEQNIGWERSKESESGKVRHGKAGDLISIAKEADKKLRGSETVTLPLVAYYGTMRLWQEPRRLKQESTIHGPGALSQQEKTSRLTGYRHSVDPRISVRNLVSWFAKESWVTFQNSGEESVSLQVVRDAILSCVDGAQRLFFDAKRGELLFDITAHAIQPFANLSDGQRCMLALVADLAQKAVGLNPHLGSDVLRETSGVVLVDELDLHLHPKWQRRVIEDLRRTFPSIQFICTTHSPFLIQSLRSGEELLMLDGQPTAELNNKTLADIAEGIMGVDDSETSIRYAEMKETAKKYLTMLDEAELAPAAKLEKFKRRLSDSIAPYADNPAYQAFLEMKRAAKLGE

SEQ ID NO: 83289 - protein, 245 aa, Serratia nematodiphila
MRPVRKGVSPNDNIDFDDYKKAFPHLVGRIGSYCSYCERRIATNLAVEHIQPKDGQYGHPGLTGRWSNFLLACVNCNSTKGAKEVILANLLLPDRDNTFFAYVYSADGKVAPATQLSPEQQVMAQKTLSLTGLDKKISQILDENGKAVALDRESQRMQVWGQAQTALADVNSAPDNERLKHWIIEAAKATGFFSIWVTVFAGNPDMCLRFIAAFEGTAESGCFDAAGIPVVPSQNPDGWQSGAKA

SEQ ID NO: 83290 - protein, 458 aa, Streptomyces scabiei
MYLKNLRLRNIRSFHGARSVDLDLTRPDGSYAGWTVLAGRNGSGKTTLLRAVALTISGPAVARSLVPGFDTWVSRDETVAKAEVCLVHDPEQDQFTTGRRPVRPIWAGLRWTAADQTSLSGKPGSSRAGQPSLSAIGYQKERPVAQRGPWADNPVGWFCAGYGPFRRLAGGSSDIQRLMSSSGAVARLTSLFHEDASLAEGVSWLIEQHLRAFEDRDGARDLKAAALAILGDDLLPDDYRIDHVDSEGLWVVNRNHRFPLREMSDGYRTVAALVVDILKQIHDANGELVLDTTDGTPNVPSPGIVIIDEIDAHLHVSWQKRIGGWLKAHFPNIQFIVTTHSPYICQAADPGGLIRLPGPDEESPVEVVPQHLYDRIIFGSGDDAVLSDLFGLDTPYSDQAERKREELLALELNVVRGRASEEEKDQYRYLKRKLASSPATRVDEIAARLHSRHPRRDS

SEQ ID NO: 83291 - protein, 248 aa, Streptomyces scabiei
MIRVTRVPLPQTALATMAEYTGDIGQAAVPGKRAKQLWKHTTVRRHIHPVLKRTLAEMAPGLERCMYCGDSQGTDIDHFEPVRVNPLRTFDWNNHLLACSLCNSHLKRDLFPLADDGTPLLIDPSSEDPATHLHLSLAAGKYLHLTDRGEATIKVFGLNRSILVRGRLNAYRITPLLLNEWRAAFEKGNVADAADCAATIWEQPTADVVHAMFHQAVAPGAQDIFPDESETLALLRDPVIRTALLLTG

SEQ ID NO: 83292 - protein, 602 aa, Comamonas testosteroni TK102
MTMQLRHLAIPQFRNLRGVAIDFSTQLEVVPGSAPAMAARAIRSHALIGQNGMGKSNLIETLITIFRDVDLDRDAALDYTLEYEIRGHTVKLQADTAKQRRPFVWVDGKAESQGHLLKNRELLPSHVFAYYSGRNERIEALFQEHQRRFNQRQEITTDEVLPEQLLNQFSASDADIRAMEEVRRRREARLKQAGDDRLRRLFYCRGGHSQLVLLACLLSDDPVFQKVLKNLHIEALESALFVLKEPHRLREKRRGGRFDENELNEGDPRFWYARGNVVSEFLDKLWQVAWAPIEQEATQQIDFRGRTEKQKQLYLYVPSHAKLKQLGELVGGTDSFFRYAEGAYIGDLIEEVRITVKKRDEHGGAVSFTQLSEGELQMLTVLGLMRITREDHCLFLLDEPDTHLNPVWKLRYFDDIEGVLGAEAGDVAQGQSQILITTHDPMMVGSLRREQVHILRRESDSTVVQTPYEHPQGMGVAGLLKSELFGLPSTLDPQTLDDLQRRNELVAKKANEGLNAEEEATLERLRRYLEELGFSREYRDPMYQLFVEKMYKAKSQPINKLLTQAELAEQEALAEAIIKELVASERKDELAELARQLKHGRA

SEQ ID NO: 83293 - protein, 270 aa, Comamonas testosteroni TK102
MRKIRVPKDQLPPEDWLAEAEAASTALAEAKTDADREAIIEAKQKIWRDDRIRNWLLALFHSKCWYSEAQEAVSAYHVDHYRPKGRVTDVGRTSPEPGYWWLTFNWQNYRICGQLINVKKNDVFPLICGHRATPETPGSLKLEAPALLDPTTDDARLISFEMDEDGCRAVPSGGADEEDCARVMTTIEVIGLNRLDRLNGKRADVWEECREKLASYAAASGEPPALKLLQRALIVVDLKKRVAYESELSSVAEACIRKVGSELVCAQVFG

SEQ ID NO: 83294 - protein, 445 aa, Bifidobacterium thermophilum
MLSSLELQNFRSFEDAHIAFDPSMTVLIGNNGAGKSAILDAAAIALGAFLIRLPDSKGKNHSRKFNKDTDVRRVSFLQGDQVQTERQYPVRVTAYGYRDDLPHGGAPEMMWARQILSTGHAGKGDCKEINAYADECQQRVQSHDESLILPMLGYYGTGRVWTHKKTSAYVYDRDFSGGVSRLNGYIDCLDAYTNDNLMRYWFMRMALQSAARKKESPLYIAVRKAMASCVAHLQDEDAEAIDVEYSVDLGQIIVTYRHNDGVTELPIGMLSDGYRSVMSMVGDIAFRMAMLNPALGEQVVSRTPGVVLIDEVDLHLHPKWQEHILEVLTETFPKVQFIVTSHAPLVLSSVKDSSCLRIIDETGGRPYQGHVAGSSSNDVLTHVMGAHDRPGEVRNMFKRLEQALDDSAYGQAKTLLDELESLIGPDDAELARERAAYDFMTLGGE

SEQ ID NO: 83295 - protein, 237 aa, Bifidobacterium thermophilum
MLYVDKTGGAPNAYVEAVGIMKVTPDTPQDYDHLPPEIKPPLLEDLTEKQHRLCVYCERRIHSRGSGSGSRAHIEHWHPRHSERGKHDPQAAKEDDRLSIDYRNMFACCDGATGDGEQCCDKKRKNIELHVDPAEEECRRRISYRQASGYMCGADGDDDAEADIAVLNLNERRLVANRKSYISEYLQRLLARCHGGSAKTRNELEKEKQRILMSPQWPEYGGIILAILDKKLRQYGR

SEQ ID NO: 83296 - protein, 460 aa, Delftia acidovorans
MIKSYHTKEKSFNILPSGYGLFSGSNAFTIIVGKNGTGKSRLLRSMVLGLLSKFSSPITLDREDKLLELNSTRGTLDHNNLPQKIICVSTSPFDKFPILSEQHASNPYIYLGLKGISSNNPSTSYMAKIIAELVKSIIKPKGNALEIVRVLNYLGYAGKIECTFSTYIASKTRKTIKDIKDSGNFSIKDGIGIKDNTPFNSLILINDYIFPNAANNDDKEISLNYLTKLSENKTKPRIDLTIDEFGVTFKGDASTREALALIATGHAKLRSVKLEKIDTGKLNITDASSGEQSVVMSMLGIASQIENNSLICIDEPEICLHPEWQERYIHLLLETFEKYRGCQFIIATHSPQLIAELSQANCFVMSMEDGKANKALDFSNRSIDFQLANVFKTPGRRNEYLNRIAVNLFIRISKNKNFDIEDENEMRILNEVFGKINSDDPLKELISALQLIWRKYGRNQ

SEQ ID NO: 83297 - protein, 218 aa, Delftia acidovorans
MAEINDPIKYTSDQLKIIKDKLNDPNFNHNCWSSEDLEHLRKSVRDYYRIKQNGKCAYCQNNISLESAANCQVEHIVPKSRVLKFIFEPKNLCVICADCNQIKRSKEILGKEEDTTANKKPLRYPKSSNSFLIVHPHFDTYNEHIEKFGQYFFDITAKGHFTIGVCVLNRRLREFGWEEQIIDENIIESLMRNYMENPDKVQRDRALRSLIGYVTRYN

SEQ ID NO: 83298 - protein, 582 aa, Klebsiella pneumoniae
MQLRRIFIPTFRNLRDLDITFATHLQPMASTTEAPPKLIRSHALIGQNGTGKSNLIEALITIFRDVDLDRDAAFDYMLEYSIRGRGVRIEADTSKQKRPYVWVDGKAESQGYLLKNRELLPAHIFAYYSGRNERIEALFQEHQRRFNQRQEITTDEVLSEQLLENYTGSESDIRAVEEAKRRHDSRLKQAGDDRLRRLFYCRGGHSQLVLLACLLSDDPVFRKVLKNLHIESLESALFVLKEPYRLREKRRRGKFDQQELNEGDPRFWYARGNVVSEFLDKLWQVAWAPIEQEATKQIDFRGRTEKQKQLYLFVPNQEKLKQLGELIGSTDSFFRYAEGAYIGDLIDEVRITVKKRDEHGGKVSFTHLSEGELQMLTVLGLMRITREDQCLFLLDEPDTHLNPIWKLRYFDDIEGVLSSDDATMVQSESQIIITTHDPMMVGSLKREQVYILRRDGNRTLVDIPDEHPQGMGVTGLLKSELFGLSSTLDIETERRLFRRNELFVLSPRSPEENEELSRLSAELADLGFSTADFRDPDYAMFVRKMAQHRRFRKPVLTLEEQAEQDAIADSIIDEILREEDGE

SEQ ID NO: 83299 - protein, 285 aa, Klebsiella pneumoniae
MIFIDLENKLPTDADLPADIRWSRADWDAWLKESDRLVGELAKLVAAGAIKERNDLIDKHSSHWGKLKPWLLALSGGKCWFSEVRELYSHYDVEHFRPKKEAKALDTNLRDGYWWLAFDYMNFRVCGNVGNRKKGGWFPLKEGSLCSTYLEPCEESETPYLLDPIDDDDVALIAFDEEGKVIPMPGSSAWEQERVNETVKRLKLNEHPPLAEARRKVWQQVDRLIDDFTTAKARCRTGNNPVAKAKLAEVRARVREMTSTTAELSAVARWCLLMRNDPQLSRLVG

SEQ ID NO: 83300 - protein, 474 aa, Vibrio sp. OY15
MGFRVNTIANHELWHLGSTEENAFTVIIGNNGCGKTQLLVDTCAYYQEMYSQLLNSDKPNVATAVRDVKEYSAEWSLLGERFGLSLPKKLIAASTSQFEKFQQRWKSKKDIQQNGFYAYVGSKPYSPFQAPSTRIASKAIQQLLGNEKFETRKLVALTNFLHKFDFGGLLRLRFNVAISSDDFTNLQNGQQLQPKTTLILKEALEEYEQEEILGLIQYCEEIYKEPEFLLSLDRNAFTLKHLRKHEETFSDVDIDRHVVSTLLRAGLIELENLETVRHTKSPSNYVDDLDISDVPLTGLAKRSSGEQCLFLLFLGIISSIEDDALICIDEPEISLHPQWQEKFVDILRDSFSGYQGCHFLIATHSPLIVSDISASNSCVYDMVNRKLIDARPHKERSADYQLATLFHNPGNNNEYLITQIIEVLDSVCKTENPPEEALITANWLLSFESQLEEHDKVRVLLGIMRSTLLAGGYL

SEQ ID NO: 83301 - protein, 209 aa, Vibrio sp. OY15
MTPFVLNENDEAIIKSVLEKNVSPNEKWADPAVTELKTRMKRHYIEQQEYCCAYCKVHKPSLHGGDWDLEHIMHKNNFDKWMFHPENLCVSCKECNGYKGTSLITKSPTYNKFPTRSSSYTIVHAHYDRYEDHITALVPGITYRYKGDKHGKGWKTIEVCGLLRYHEEGGRTQVDPIIQAVLRLAADDQRQENLQLAIEMLQSKINALS

SEQ ID NO: 83302 - protein, 465 aa, Escherichia coli ATCC 25922; identical to SEQ ID NO: 81190

SEQ ID NO: 83303 - protein, 201 aa, Escherichia coli ATCC 25922
MVQLINEQYHLCCYSEIRSDLRGLGYHIEHVENKSQHPERTFDYQNLAASALDSGENGGLSSLKGKNAFGGHAQGKQDVVDMAKFIHCHIRDCSRYFAYLSDGRIVPADELNAQETENAQYTIDLLNLNSGFLQTERRNHWEELEQLFDEHIEKDWDLQQLLQLDLVSTPDHKLHEFFSITRQFFQQEAEQVLQSHAPALI

SEQ ID NO: 83304 - protein, 547 aa, Streptomyces sp. JS01
MQLLQLRLPDYRGLRDFTLDLESAVDKGQAIAVLIGPNGGGKSRILHALAELFGALYRCALGHSGRTGFGYEVRYQLRDTTVEIVQPSAEADPVMWVTDAAGSRNETPRHDLLRHLPDHVFGYQVHGRVPRGSEFERHVHFAEAELAKWREQWTESWFAWQDRPENEEGVWSEQLELPITCPLYAPGFLCTPDWLPLVLLSLAGQWADVFGDYLREQARVDGVVSATLHLRAPASVGEDLSALPYWGLGGPPRALFAEAAASGRFGPVPESDPLYSAGTPDDGFALTMSSPEDVLAFRNLFDSDLSMFGLLSTLQMASYLTVDVRVRKADGAVVRADQLSSGEQQILTVLGLLRLQRGQESLFLLDEPDAHFHPEWSRLWYSSVQSMLGDGQRSQFIAATHEPLLVSNMLRQQIRLIDTDADGRTTALVPDTSPRGLGAGGLLTSDLFRLRSQLDEHTQDLIDTQYRLIPVAEGDPRARRKLQEVTDQLDGLGFATGRRDKVLSSFLAELHRRRTELIERARNGTVTGEELEATARVLFDERFSRGV

SEQ ID NO: 83305 - protein, 388 aa, Streptomyces sp. JS01
MRHVDNTGLTAPQQWAERAAKELEKLHDDAKDADKELSFREMWREDAIRDRLIALMDKCWYCETRDNRSPYHVDHYRPKSAVAGEAKHRGYWWLAYDPANYRLACHHCNSGGARYGNQSAGPGKGARFPLLGQRASVGESLEGELPVLLDPVLAEDADLVGFDSQGYARRRLEKPYSDDEVAWDLCRVDETIRILALNADRLIETRSTLIEKVDQLVELYLVRRDDAVVARYARKEIDDLTRTTAEWSAAAAAAERLALLAYGRSGDEVPPQGGAGGDIAERASDGTEPAAAMATAHRVDLRTLVAALPPEAFSTGGIALTGRGKRGPARATLRKDGIIECFQQPLATPTSAARMATGDEKVDGWTFWSLTVDGTTRTLSDLRDFLIT

SEQ ID NO: 83306 - protein, 535 aa, Acinetobacter baumannii
MSNRSIDYLKKNPNKGSLFSLFQLLENEGLIDLEKVNLSSELLKNCLSYVTSIKEDESPFHKIHLEKIQLHDFRKFRSIEVNFDNDLTVLIGSNGVGKSTIIEAITKTISWIGNGLIKEGDNGRPITYDDINNNSSSYAEINSYFKYGKTEFSGNISKAVRGRTAKKDSHVYDLKKFANILRALNNIQKINLPLFCYYPVERLKDSPKISLLKDSLIIDRYYAYKDSWDGKLKLDDFFTLICVIYNKSKLNNDLEEINSLKNKLDQLKSINFSDLEIINLLQKQLNELKSKNNFDSSHSESELDFKKFVETIKESLINDLLGIKDISFNNFSGRTQVYFHLSDGNIVNSKQLSHGQKVTYSLIGDICLRLLLLNPNLKNPLKGQGIILIDELELHLHPKWQQRILVSLRNTFPNIQFIVSTHSPQILSTIDKKHIRILEENDSIIEPIYQTEGTRSSDILEQLMSTHSTPDIRINTLYNKYLALIEQNIYETQEAQELGAELASHYGEKHPKIQEIKSLIRLKELKNKIASKKMD

SEQ ID NO: 83307 - protein, 219 aa, Acinetobacter baumannii; identical to SEQ ID NO: 82933

SEQ ID NO: 83308 - protein, 514 aa, Acinetobacter baumannii; identical to SEQ ID NO: 82756

SEQ ID NO: 83309 - protein, 213 aa, Acinetobacter baumannii; identical to SEQ ID NO: 82749

SEQ ID NO: 83310 - protein, 411 aa, Sinorhizobium meliloti
MFSKLNVKNWRQFADVDLDFHGRLTVLAGANGAGKSTLLRILAQFFGIEHRLIGSPLEGDKRMYSHVLAGEAQDVVQSSDNVEIGSVVLAGGDVVGITMPALSEQVEENVQLRGLHRIHGIFIHPHMGLNKYMPIASLPLSGKNLRVIYEEVISGQSRVFESNPSQRPPLFTVKHSLIALAAFGPGGKYIAPNQEMTLLFEEFRNLLKAFLPETLGFMDFSVRLPELVVVTKRGEFALDSSSGGITSLINLAWNLFIVSKMNQDGFVTLIDEPENHLHPAMQREMMGSLLQAFPKGQFIVATHSPFIVSSVRDSTVYALRYRDGEEGAGKIYSERLDDFNKAGTASEILRTVLGVPVTMPAWAEAEIEMIARDFNIQQLTDESVKALRTRLEAAGLGSYYAETLTKMAERL

SEQ ID NO: 83311 - protein, 221 aa, Sinorhizobium meliloti
MIKLNKKGEPQILADNSAAWTAAIEAKYASGEKPSPTEMGRYRHPDIKKILIEETNGKCAYCESKLLHIHHGDVEHIYPKSLDRKQTFKWDNLTLACERCNQNKSDNDPLLKQIIDPYLVDPSHHLTLLGPLPRGKTPQGVSTIELLKLHRSELVEQREEALKKLYAIIYQIKDDRIAVEARRAMYKDLKDESESGCNAYSAMVRVALQVEAVSFDAAVTS

SEQ ID NO: 83312 - protein, 203 aa, Sphingobacterium sp. ML3W
MATLTSENVRFDLAEGMVLIDEIGTHLHPRWRMEVVSRLRKAFPKIRFIVTSHEPLCLRGLIEGETIVLTKNEHKEIIALTELPDPSELRIDQILTSDFFGLKSTIDPQTEKLFDEYYKILALEEKDRSEEQKNRILELSHVIPRIKHLGDTEREELAYYVIDELLARKTRKDGLKIKNNLETEALIRIKSIWKSLDNKSGLL

SEQ ID NO: 83313 - protein, 503 aa, Sphingobacterium sp. ML3W
MIYINRKTISHPEIFYSKEIEAAKISEKNFYSRPYELRSQERNLTHLDQKLNNMLRKALMEVFNGRCAYCESQISNSSCDHFSPKNGARGFENEFSNDHYWWLSYEWNNLYNCCLECNRYKSSWFPVKGSRAATETKYNDIVIQEEALLIDPCIDRPQEHLTYNEAGEMVSLTTKGKTTIEIIKLNRSELVEARHRTIQKLKTQWNEFLNLIMRKNENLSLLNEIIYSWGEIFNNQELRTSYLGIQRHFLYKWFKELEIQNNPIFTNFNIFLDNENMSGKALKFSFQEIERSVNRQKITDTTRENNKAVTNLDGIRHIYVEKIELKNFKCFSKLELDFSNNRGIAESKTKQENPLLEPWVLFLGENGVGKSSLLKAIAIGLSGNEYIKSLCISGKEILKHDEKNGYIKIHLVGAINPIIVNFNIDTIISTIEQPIVNVVAYNSIRLKPTVGKIMPENVEFYGAKVKNLFDYTFSLLDAEIWLTKLKEDIFNRVALTLKDLMLL

SEQ ID NO: 83314 - protein, 203 aa, Sphingobacterium sp. ML3W; identical to SEQ ID NO: 83312

SEQ ID NO: 83315 - protein, 297 aa, Sphingobacterium sp. ML3W
MIKVDRSQVPKPAALGKRDRAGETETERAIKHYTSPTFDGMTNFKFKIYSDPEVKEALIKLFKGKCAYCESSVLHVYSGDVEHYRPKGEIQEAIPKTTPGYYWLAADWDNLLFSCRNCNQKLTHSMHGVDTKKTMGKMNQFPLSDITKHVRNHDNVNGIADEEPYRILLNPCIDNPEDHLEYGPEGVIRPKRDAAGKESIMAKKSIDVYVLQRMYLVQAREKVLIDIQAQIQRVKEATTKFNELINDSDTALRFYFEKILKRELERLKKFLNPEEQYVGMARQIIGEFLKINYNISI

SEQ ID NO: 83316 - protein, 418 aa, Bacillus thuringiensis serovar kurstaki str. YBT-1520; identical to SEQ ID NO: 82064

SEQ ID NO: 83317 - protein, 215 aa, Bacillus thuringiensis serovar kurstaki str. YBT-1520; identical to SEQ ID NO: 82065

SEQ ID NO: 83318 - protein, 395 aa, Amycolatopsis lurida NRRL 2430
MYIERVRLENIRGFSGARAVDLRLPGPGWVVLAGRNGSGKTSLLRAIAVAAAPDVAWGLLSDAGSWISNDQTSGSIELSVMREEGPAPVEVRWLDSGLLPISGLPPGQPFCAAYGPFRRLAGGSGEAESWMRGAGSLARMASLFHEDASLAEGVTWLINQHLRALEGKAGARELKDAALEILGDGLLPGGYRIRDVDSDGLWVEYRGDRFPLREMSDGYRTVTALVVDLLKQLDGAGLDHESPGVVIIDEVDAHLHVSWQKRMGSWFKAHFPRIQFIVTTHSPYVCQAADPGGLIRLSGPDEDVPPRVVSEELYERVVFGSGDDAVLSDLFGLDTPYSPQAVELREHLAELEFQVASGRADANGVREWERLRGMLSSSPPSRVDEVARRFEADDR

SEQ ID NO: 83319 - protein, 246 aa, Amycolatopsis lurida NRRL 2430
MIAIRRVALPERVVDDLEELTARIPPGDTKEARRLWRVSRAVRRSLRAGLDVMAAGRGYCMYCGDGLGSTVDHFEPIARNPGRAFDWLNHVLACEYCNSHHKRDLFPVDEDGNSLLIDPTAEDPLEHLFLVLSIGTYRALTAKGEQTIKVCGLNRAQLARGRETAVNQVSALVLGWWAARELGDDGKRRAMVWTLLDQPHADVLHAMLRQAEMPGARAVFRVDDELIKLLRAPELAEDLQLSGGAV

SEQ ID NO: 83320 - protein, 457 aa, Pectobacterium betavasculorum
MLNFRCFRQLDITFDEHITILVAPNGAGKTTVLDAVRLSLIPFIRSFDTSLYNSRSLGIRTEDLRLVFRQEALNMERSPLTTITAEGEWESGKKAKWMSGLQGERASSEDRGAADLTQWGEQLKAQVRDENNARPIVLPLALYLGTARLWYQDRYKPQSDEQRLDNSAFSRLSGYDDCLSATSNYKQFEQWYSWLWRSLREFQIKSLETPVTNIVEAFRGDIILDAVQTIKQAINCLTQSATGWYDLEYSSTYNQQLIMRHPQHGILPLNQLSDGLRNAVAMVADIAFRCVKLNPHLRDKAALQTQGIVLIDEVDMFLHPAWQQQIIQSLRSAFPKIQFIVTTHSPQVISTVKRESVRLLEQDDKGNGLASIPQGSTYGEPSNDVLHSVMGVDPQPPVKEKADLQKLTVLIDQGKYDDLETQQLMATLQAALGEHHPQLQRLQRSIARQKLLKGKAQ

SEQ ID NO: 83321 - protein, 201 aa, Pectobacterium betavasculorum
MARLLDEQYHLCCYTEIRADERRLGYHIEHVENKSQRPERTFDYLNLAASALNSGPNGGLFQLKSKNAFGGHAMGKQDAVDTAKFIHCHIHDCYRYFAYLSDGRIVPADGLNAQEMENAQYTIDLLNLNSGFLQTERRNHWEELEQLFDEHIEKDWDLHQLLQLDLVPSADHKLHEFFSITRQFFQQEAEQVLQSHAPALI

SEQ ID NO: 83322 - protein, 576 aa, Pectobacterium carotovorum subsp. carotovorum
MRLDKLTIGSPKDSPTHQFKNLKNVTIDFDQEHWVTVVIGWNGTGKSNVLEALAIIFRDLIAKKRSPVFAFQLSYRMGAGDSLRYIHIDADPDREKESFIIHVATDAEAHGKGTLAPFLDGEGDVSALRGRVIKFSTFLNAGVEYLPRYVFSYYSGESSRMHEIFRPYLESYDSKLRNGEDPGLKRLFYAMPVHSQFVLLAFLIQQSDIVRNFLNEHLGLDPDEGIESVLFVLRQPPWKSKAPDGDSRFWNARGVVRDFLSRLYDIALAPIEVSRRVSTSIWNKETLQFKYLYIKDIDALRRLVGSQAPAEFFRDLESTYVSELIEEVRIRVRLKKNEGYVTFRELSEGEQQLLTVLGLLCFTAEDESLFLLDEPDTHLNPRWSVDYISYLKQFIASGTKQEETSHILLTTHNPLAIAELDREQVQILRMVKENEQRRVVACYPEMAPRGMGYAAIVTSDMFGIASTLDQPTQLLLETQRAFAAKTRLSADEQQELDNINAQLDRLGFRFFHPDDEYSRYLRLRNDLLKSRLAVTKPSDIASKVLAMSRLEREELATKLIEKLIADDDEQIDKVDR

SEQ ID NO: 83323 - protein, 267 aa, Pectobacterium carotovorum subsp. carotovorum
MRYIDIDELVLPDGWLDKAATASNAVAAGADPDEYSKVWRELKDALAELFPDKKCWYCESPVDRADNAVDHFRPKGRVSDASSPHSGYRWLSFEHRNYRYACTFCNSLRKDIATGDTGGKADRFPLIVEADRLYAPGPLAQEKPILLDPCELNDWELIGCKQENGKPCPTSNEQLAKHRAEESISIYHLDYEPTCKQRHAVAVRLMADIDQAKQLFGLPGMDVHFTAVAKKIRRAINRKAPFSGDMIFLLKGQRHADHPWIQKLLEI

SEQ ID NO: 83324 - protein, 541 aa, Pectobacterium wasabiae; identical to SEQ ID NO: 81684

SEQ ID NO: 83325 - protein, 260 aa, Pectobacterium wasabiae; identical to SEQ ID NO: 81685

SEQ ID NO: 83326 - protein, 411 aa, Pectobacterium betavasculorum
MLSIENIGPAKKLVIEPKTRLNIITGDNGLGKSFILESAWWALTNTWTDRVAYPDPRLRGKNINLTYSIQGNGEFKSGNCVNFDWENFNWPIQTDRPTIPGLIVYAKVDGSFAVWDPARKYSTQSTFNEKEKLLFKSKEVWDGQDGIGVLEGLIRDWMTWKNDSKNQHFKHFEKVLEKLSPPDLGVLKPGEPVRIPDDPRVIPTLVHPYGEIPITNASAGVRRIVALAYMIVWAWNEHVIISEMMNIPPQNNMVVLVDELEAHLHPKWQRAFLPSLIALDKVFSNELKIQFMIATHSPLVMASSEEVFNDETDSLFHLQLDEHGVITLEELDFIKYGDISSWLMSPIFELRQARSQEGESAIEDAKKLQESTTPSLDSIEEVTLRLRKYLSASDRFWPRWMMFAEKNGIDI

SEQ ID NO: 83327 - protein, 204 aa, Pectobacterium betavasculorum
MIPLQLAPEPDDFDKNVREKGAIFLKVTPNPSSKDFSGKDFWKKAAHSLHSSYKAICAYSCISLPTAPGAVDHFLPKSKYPKLAYEWSNYRLCLDKINQYKGSADDICDPFTIQPGWFVLDFPSCLVKAGENLAPDIAKKIESTIKILKLNADEGLVDNRLGIIMDLIDGHVDMHFIEKRYPFIALEIKRQGIEADVKNIFKKF

SEQ ID NO: 83328 - protein, 395 aa, Amycolatopsis sp. MJM2582
MYIERVRLENIRGFSGARAVDLRLPGPGWVVLAGRNGSGKTSLLRAIAVAAAPDVAWGLLSDAGSWISTDQTSGSIELSVMREEGPAPVEVRWLDSGLLPISGLPPGQPFCAAYGPFRRLAGGSGEAESWMRGAGSLARMASLFHEDASLAEGVTWLINQHLRALEGKAGARELKDKALEILGDGLLPGGYRIRDVDSDGLWVEYRGDRFPLREMSDGYRTVTALVVDLLKQLDGAGLDHESPGVVIIDEVDAHLHVSWQKRMGPWFKAHFPRIQFIVTTHSPYVCQAADPGGLIRLSGPDEEVPPRVVSEELYERVVFGSGDDAVLSDLFGLDTPYSPQAVELREHLAELEFQVASGRADANGVREWERLRGMLSSSPPSRVDEVARRFEADDR

SEQ ID NO: 83329 - protein, 246 aa, Amycolatopsis sp. MJM2582
MIGIRRIALPGQVVADLEELTARIPPGDTKEARRLWRVSRAVRRSLRAGLDVMAAGRGYCMYCGDGLGSTVDHFEPIARNPGRAFDWLNHVLACEYCNSHHKRDLFPVDDNGNSLLVDPTAEDPLEHLFLVLSIGTYRALTEKGAQTIKVCGLNRAQLARGRETAVSQVTALVLAWWTARELGDEVKRRAMVWTLLDQPHADVLHAMLRQAGMPGARAVFRADDELIDLLRAPELAEDLQLSGGAV

SEQ ID NO: 83330 - protein, 462 aa, Vibrio ponticus
MKLKQLEIPNHKGFVDFVTTFDESSPITTIIGVNGVGKSNLIEIIVSIFRAIELGESTPFDYSLSYECRGHDIEVRYVGAVKESCYVLIDREKKSFAHLKRMANEYLPQNIFTYYSGTNERVEQLFTKHQTRFYNALTNGDNQLIRRFFYCRDVHSFFVLLAFLVDDDPACADVLNRLDIQSLDSVLFCLKKPYWYKNKPSQIMEEEGDPRFWFSRGVVKDFLSTMWKYAIAPIDNKERKTIDFRGRSETQERLYLFLPNEESLRGLASEYPDTTSLFKNIESTYIADLLESVEVTVTLKSGQQVTFDQLSEGERQLLTVLGLMKFTRNDESLFLLDEPDTHLNPRWKLKYFKSIKAILEHRIEGTDKSALDTSQVLLTTHDPLMLTSLNSKQVRVLTKLEDTGRKLSEQPEVDPHTMGVEAIIQSDLYGIRTSLDEEMQDKIDLRNRLLASIKEGGKSLNA

SEQ ID NO: 83331 - protein, 276 aa, Vibrio ponticus
MIKIELPAALPPEIIAWQQEAQVITQELLQAQSLAEKHQIIDRHQRHWRKPELVEWLSDLSFEKCWFTETKFGGDYQEVEHFRPKKGTREIDGRACANHDGYYWLAFDLSNYRLCKRRPNAKKGTFFPICDDRFRATSPQLPWSDETPYFLDPFKDTDVLLLSFNDNGEPVPQEDIGQIDEARVKFTIEKYFLDERVLNKRRAQTWSTTRVLYTEYLNAIKEANDNGSVAKRTEAEQKLIQIKKLCSRNAEFSSVARESLMKLPDRMAWKIASKIV

SEQ ID NO: 83332 - protein, 502 aa, Flavobacterium psychrophilum FPG3
MKIDSVHIKGRFKNLENFQFDFGKSSMETVLLGLNATGKSNFMEAIVIIFRDLDLERSPLVPKHGESFEYYIKYNCRGRDIEVEFLSKNGYKFIIDGENLRSKSLFFKDKNEYLPSHVFVYYSGLSERLKSLYADHKLLQFKKMMTPDLKYEDFNEMPRIFLVEPIHASLALIAFYLFPEREVETIEFLKKELNIIDFGSALFMLKQPNWSKSKKEKDRFWNADGLVRRFIEDLWNFSTAPMFYKETVKGSLNKRETLNRLFLYIKDKSTFSSLVEMKMYKSKIPLFNALCSLHFSEFVEDQDVRIKVVKENIKGELAMGELSEGEKQLITVLGLLKFTKDDEALILLDEPDTHLNPMWKWKYLDFLSDVVHKSDKTQIVFCTHDPLVIGGLEKEQVRVFRKNENNETKVHEPDESPKGLGVAGILTSPLFGMPTTLDRPTNKLLEERNLLMYKESQNTLTNEDKNRLKELFEILSNEGFNYTFKDPEFSKYIAEKLKAQIK

SEQ ID NO: 83333 - protein, 270 aa, Flavobacterium psychrophilum FPG3
MMYINFDKLNVPQKKWLDKATELLELLKKSTTVEERNSIIDKNHRFWKVFKNSFKELSHNKCWYSETNNPYSHLHIDHFRPKKRVEDIFDKANPSRDGYWWLTFDYRNYRLCGSVGNTKKNDHFAVKYNKVNSPAPISDEVYYFLDPTVKEDVKLLNFDNNGDIKPAAPENLEKWNYDRAKYTIEYLDLNYPDLKEIRRLKWQETSSLIKKVNSLNLVFNKEPTNQNKYNKDCEIEKLRKMISPEQELTSTVRSCLRSSGQDWAYKLLEE

SEQ ID NO: 83334 - protein, 541 aa, Pectobacterium wasabiae; identical to SEQ ID NO: 81684

SEQ ID NO: 83335 - protein, 260 aa, Pectobacterium wasabiae; identical to SEQ ID NO: 81685

SEQ ID NO: 83336 - protein, 541 aa, Yersinia frederiksenii ATCC 33641
MNRTIKKIKMGADHDNSIKDQYKMFKYYKEGMFVEVDPAESSRYRQMCLNNLKEAQFCLKKVKLVNYKGFNELSINLDNDIILIAANNGYGKTGILEAIYLSLSWFYRLVYGSNQGWKFGDKYISRLVSNAAMLVNLDISVGNNKKPSGYQIGIARSLGASSVKSDYTEFKELAEMYLEFQDSDIVAPMFAYYSVERGKNYPDGGFTSAIESGSGKLLDRLYPDSSLALSSNIFASFIKWAAEIKIKKIVSNEDEQSEKLKSIKEFIYHISHSDLADEIKNTLISQKEKEVEIIFGSQSKDKSTNLDRMEKIVDMIFALGCDFIDDISSIQLKYDEKLEALDLVCVKRDCEISASYLSHGEKSTLSLLFDIALKLIYTCGTEDPFSGQGIVFIDEIELHLHPSWQQSLLSKLKKTFPNVKIIATTHSPNILNTVEEQAIRKIKVKNNRFYIEIPAFSYGAESSQVQNDIQDVAARPDVEPVQNLARFRKMMKNNQYDTPEAQALLKKILEWGDAHDPDVTKLKIDLELRIKRNAKKISKEQ

SEQ ID NO: 83337 - protein, 243 aa, Yersinia frederiksenii ATCC 33641
MRGFRKERLSNDILDAYLAVPENANSGWKGEFYTTLASADRDSLKNEIIADQAGLCAYCEKALRDEGDNKPLGFKVEHFIPENSKTIKRMIAAGQPVPTINYSLLWTNLLGCCFGGQHARSASYIESLTDEANLSCDVLKAHHNWSALILDPTQEPPDDGTWFEFDEEGVMDVSADCPNQYVDKARKSIEMLNLNCVRLTRLRLATLESLGAVSDEEDIAALLSKDAAGVYGEFISLRKWYLA

SEQ ID NO: 83338 - protein, 407 aa, Yersinia enterocolitica; identical to SEQ ID NO: 81698

SEQ ID NO: 83339 - protein, 217 aa, Yersinia enterocolitica; identical to SEQ ID NO: 81699

SEQ ID NO: 83340 - protein, 302 aa, Photobacterium aphoticum
MDYIEKDNNFDLPVIAFYECDRLWISKGNIDIESSALKQFSRFDPYLDCFHTGADDKAIGEWLLKLELSELQKKTPSPMKTAIEFAAKAAMENCVGFGFDFDESRVMVRYEDGTSTPFEHLSDGQRTILGLFCDIARRAAILNPHLQENICSETKGVILIDELDLHLHPKWQRRVIEDLRKIFPKMQFICTTHSTFLIQSLRSSSELILMDGEPLLEYNNKGIEEIARNMGVSSPEVSQLYEDMKNTAHDFLATLDNENLSPEEFHERFNAQLASVIAPYSNNPAYQAFLERKYAIKTGKEL

SEQ ID NO: 83341 - protein, 250 aa, Photobacterium aphoticum
MRPVSKGNAPTGVVFTNYRESFDYLLDRIGIGEYKNIKLAQYCSYCERVISTNLAVEHIEPKKGPYAQPHLENSWINFLLACVNCNSQKGSKHIQFDKLYFPDRDNTFYAFEYSYNGEVSPNATLSHAQKIIAQETIDLVGLNEPIDTDVDGVAKDRRTQRLNAFALALDSLEDLKSDPQNQAIQNLIVKGMLTSGYFSIWMKVFEGYPHIRNMFIDSIRGTRQSGCFDEHGNIRHPHPNPDNLQLGGKI

SEQ ID NO: 83342 - protein, 463 aa, Enterobacter aerogenes
MIETIDSGDIRYEFIDKSLLSHDGSNIFTVMIGRNGTGKSRLLKDIVEAVSSEKQKKSSYKIQYINYNKSGFSKVIALSTTPFDKFPLPRTIESNNKYYYIGIKDCGFRDVSNGFLRKILGSYLRAYLLGDRESLGKTLDYLGYEKTFNLKFSYIGGSIIERLTNEQIELNKQNVKSNKNYNLAWKLRYYLEERYRKGEYHLENFLFEAKKHPESEGYVSTILESLISIPAIHRIRKVSISINNNEVTVSNEKISFNNELINLIDAGILKLESAYLQKKGSKEIFKINDASSGEQCVILSMLGISSLISDNSLILIDEPEVCLHPEWQEKYIQLLTRVFNSYKYCQFIIATHSPQVIANLSTDQCFVLKMEDGVVHNANEFIHKSSDFQLATLFESPGYKNEYLSRLAVSLFSKITAERNIDSEDLETLHVLKKSLDMLSVDDPLYELINVIIKAGSVYGGDK

SEQ ID NO: 83343 - protein, 209 aa, Enterobacter aerogenes
MAEINKSIVISKESEDIIKSVKSKPGFTFKLWSDEELLKVRREIRKFYRKQQKGKCAYCQNPVTLSASGCHVEHIVAKSLHEEFMFTPKNLCVICPDCNEIKREQEVMANIESTLKNDSPKTYPRSSAAFITYHPHFDNYNDHIINIDGYYLDKSEKGANTIRMCVLNRKLREFGYDDSAIAIPGHLDFMIRIFYSGKIDEIKKLIGMN

SEQ ID NO: 83344 - protein, 434 aa, Burkholderia xenovorans LB400
MKIDKVRLTNYRCHRDIAVSFSPHFNVLVGANGSGKTSLLKGIAELFNGFVGGVSSKSIAPTLTADSVRVERIDIQGRLRFEEQYPVSVLAEGSIGDKRLSWGVTREAPTGNFTYLGGQPGDVWKTASDKGVNTALAKKLPILAFYQANRQWNLNRASELEAATSKDGRMNAYNNFFNASSDAASLQTWVISKCLERFQVSSETNRLFDEVTDDELALVNGALANAIGEIQGIKFDMREKSLLVEWKQSAGSSRSATVFGNLSDGQKAVVGLIVDIARRICLLNPQLGQSAIKETPGIVLIDELDMHLHPKWQRALTLGLQSAFPSVQFIVASHSPQILGEMKPEQIIVLTGGTTSNPQVSYGLDSSAVLEEIMDVPARPLEVANELSALFEALERNELNVARQHLAKLRAGAPGIVELNRAEALLKRKEVLGR

SEQ ID NO: 83345 - protein, 215 aa, Burkholderia xenovorans LB400; identical to SEQ ID NO: 80921

SEQ ID NO: 83346 - protein, 193 aa, Burkholderia pseudomallei
MLRLRQVELCKSGADTGFLISQASSGEQAVVLSLLGIGSQIRDGSLICIDEPEVCLHPEWQEKYIQLLYSTFEHFTDCHFVIATHSPQIVAHLPEGNCHIMSMETGSATDASSFSRKSIDYQLAEVFGAPGVRNEYLSRIALNLFASVSKVRRFDADARKTLQSLEKVVELLRKDDPVYDLIMALREMRKNYA

SEQ ID NO: 83347 - protein, 217 aa, Burkholderia pseudomallei
MPDIANPVAYTDDLDRLVQSKQNDVTFTHQQWGHDDLAPLRAHVRTHYRNEQRAICSFCRGPLGLQAADNCQVEHIVPKSIRPEFMFEPKNLCVICADCNVIKRDQEVTATIPNTVVRGRARQLYPRTSTAFLIVHPHFDNYSDHILIHHGFYIDRSPKGNFTIGACRLNRRLHEFGWDENIVNRPTLMEAAQQYVDSEPGLDRLAALQRLREEVLP

SEQ ID NO: 83348 - protein, 193 aa, Burkholderia pseudomallei; identical to SEQ ID NO: 83346

SEQ ID NO: 83349 - protein, 217 aa, Burkholderia pseudomallei; identical to SEQ ID NO: 83347

SEQ ID NO: 83350 - protein, 450 aa, Cedecea neteri
MIHELSLANVGPASTMHLTFGNRLNLLTGDNGLGKSFLLDIIWWALTRRWPAEVNPKLVAGKKALPALDLTGAEASIAFSFAGKVKTERYESTYARREQSWTGRAGRPANPGLVLYAMADGSFAVWDPHRNYWRTQDGIDVQERVPAYVLNPTEVWDGLPGDERSWLCNGLIRDIASWQKEKGAAFKHLNAVLKVLSPSITEVLSLGELTRISLDDVREIPTLRMPYQKDVPVLHASSGMRRILALAYFLVWAWEEHQRAASIVGEDVSPQITFLIDEVESHLHPSWQRSIVPALLKVMGKLNAKAQVQLITTTHSPLVMTSVEPLFDGSRDAWFDLDFLHGAVVLERREFEKHGDVTNWLTSEAFDLKSGRPLEYERLVEDAAKLLNKSDASEKELDAMYQQLLAALDVKDEFLFRWRFIRGKKANPEQNNKKIKKGRKDDSGGVTGGA

SEQ ID NO: 83351 - protein, 203 aa, Cedecea neteri
MIPVVLQAEPDDFDVEVRQRGHNWLSKKGIALNAPPPKASDLPNYWTHSNYSLWESYCGVCAYLAIYFEWVTGASSTDHFVAKSHNAGDAYEWNNYRLSSLGPNRNKNDFDDVLDPISLQPDTFVINFLSGEISPNYALYPNGSLYATQAESTISRLRLDSQEHRRMRTRHFEKYINGDWSLDSLKDDSPFVYAEIVRQGLTR

SEQ ID NO: 83352 - protein, 410 aa, Phaeodactylibacter xiamenensis
MEVLKLKIDKYKVFKGFEADFSNEDGTTKKIIVLAGVNGSGKTSLLEFIHKMVVDPKIDRKGYVDILTEFGSEKDNRKLIESVASLRLNYRLFKNITAFEKKQKNVDSDDNLVYLTANGTTEIIFKDKEEIFVEAISKLKSSVVFLNTEQFDFKNVNNLIFSFVKKLIFNKNVSPKDAYNEVQNILDSLFEDFDLRVRFGSIDASWEAGKESFLVYFKNRHSDKIPISDLSTGEKELITRAFFLEVVTPYNSVVLVDEPERSLHPKWQQQIFDVYARVSEKYDAQFIIATHSPHIISSVDPNSLFILNLEESVDEPNNLSISIENMETLNKHTKGVEPNRILKEIMGVSRLRYGEIDKKVNDLVSLLNIHDYDSDDVAKRRDELIRILGDKDPTMIRVNHQIKVLERKLN

SEQ ID NO: 83353 - protein, 242 aa, Phaeodactylibacter xiamenensis
MRFVSNENKCDEWSEFLKSEAKSLKVKRPWDKLTKISRKDKVTGERIKVGSNAKRALHEHLWREQKGLCIYCMQEIHKTRLNSDSHLEHLMNKSQFKELIFEYDNLSVSCNGYDCSTDQDSKGKNQFCGHYKDKKNKKPEFIAEKYINPCEDENIESYFEYDVEGRIKPARNIEPDIKGKASYMIDLINLNDDGLVSARKAAYESLIESEIQEGEKFVLDLLDEKNKFFLGYHSMLKSLFGF

SEQ ID NO: 83354 - protein, 424 aa, Phaeodactylibacter xiamenensis
MRLKKVVVQNFRGIEYIELDLDDQLNILIGENGSGKTVILEALTVAVGAFMIGLRDVSTRGIRDDDVRYTVQQEYAYPVVIEANGIIDGQRVSWSRERHSKTGSTNYKNAQPISQIAQTMDDRVRSGEYVDLPLISYFSTGRLFVEAQSQQKKQPTARNGKKELGSRFRGYRESLDAKSSFRRFVDWFELKELSQLQKKETDPSLFMVKQAIRKNLPNCKDVFYDFDPDTNRGLTVALTDGRTLPFEYLSDGVRNFFAMMADIAHRCVLLNPHLQEKALAQTEGIVLIDELDLHLHPSWQKSVIRSLTETFPKIQFVVTTHSPFLIQETEANQLIVLEDCKVKQTGSGNNLSLEDIAEELQGFVNPRWSNKREALYEIGKKYYTAVAEGSTADNIEEEMTQAEKDFTEDTLFYAYLEALKAMKQ

SEQ ID NO: 83355 - protein, 222 aa, Phaeodactylibacter xiamenensis
MRAVDKGVAPRAYLNYTDAKPDLFDRIGPYCAYCEMPVRDLGYVDHVHPLANGGQRLAWENLLPSCFFCNRVKWNRNTDRSQHLWPDIDNTDLAFEYGKAYIVRPIRTLTRAQNQAANNLIQLTGISRTAANSTRKDRRWKNRQEAWRKAEAMYAAWQTQQNRPGLLIAIPEIAESTGFFSIWMSVFKDETNLRDAIRRKFPNTFEQSDSNGKRVKRLHALI

SEQ ID NO: 83356 - protein, 408 aa, Escherichia vulneris NBRC 102420
MLCSISKINTPIPFSRKKVDIQLDGRSLIITGGNGCGKTSFITAIYNYLKKGIDDPRNNDVQYLMGQINHIQNQIKNIGRDGGHYNYYQDELSKHKNRIEEINNFNIETNSIDNKDIRSLLRFHSATRQSAISSPIQTPKHSILVEENKHFANDKDGSQFFESYLLSLKKNQSYAIAFDKNVNEANRINNWFEKIQSDLRSLFEDENLVLDFDTKDEKFYLHQDGKDKYTFQTLSAGYSSILSIYTDLIMRVEMWGVSPDNIQGIIFIDEIDAHLHVSLQKQILRFFIKSFPKVQFIVTTHSPFVVTSVTDSVIYDLTANEQIIDVSSYSYGVVMEEIFGVLPDSHALTDKLIHIEKLSQNITIDNICELENIISSLATEKEHMSDDTQAFLDTAQLKLIKTKKNISK

SEQ ID NO: 83357 - protein, 217 aa, Escherichia vulneris NBRC 102420
MFNVIRKMPAPNSLLAQKKYDSDDVHSALQECFHEKCYLCETKKPLDINIEHFDPHMGNVNKKFSWHNLYLVCSRCNNIKLTKYTNLLDCCSISVWDRVKLTPGFSPKSKEFIITPQYFDNKTLETAQLLNDIYNNDNTINKRLTARSLRAKVVETTHKLTQYMIIYYDDDSTDEEKENAFNKIKIMIKKSYPYSAFCRWIIKDDEELDKLLTPLMD

SEQ ID NO: 83358 - protein, 514 aa, Acinetobacter baumannii; identical to SEQ ID NO: 82756

SEQ ID NO: 83359 - protein, 213 aa, Acinetobacter baumannii; identical to SEQ ID NO: 82749

SEQ ID NO: 83360 - protein, 767 aa, Comamonas testosteroni
MQRFDRTTEPPPIALQGDAASQARRVLSDFMRYGDERLSQTNVPRSELPLEDASIREALNRLFRGRCAFCESRDKISPYRFRPATEAVPSSTPRQAHLYYAWLEHAWENMYAICSSCRPAESNYFPVSGPRVRLPTPEELDRYAEENLGLWRAYPIREKAVFLDPCAEGDFSKHLWPQTNGSLIGISTRGETTIENFNLNAPERVVGRRARYVEYFARLSECLTDSESIAHAPGMFEFPEFEFGGSWYLLLRRLALLMGPEFGGRPIVSQARIQRFYMAMLGKPDTANRLRQGWGRLVHEDHNYKAAPAITKRPSKARVTSIGLRNFKAIEDLSIELPSPSQGNESFDVMHPVPSLLIIGENSAGKSSILEAIALAISDEAARKKLALKPGNFVLNPTYMGAVNVAAVERAEVQVGLSNGASRRLTIDLGGMKDHGDPGSELIPVFAYGAFRQYQHKQRPRSPDKYIRNLFDGSVLSNPEKWLLSLQPSAYAMVMRVLREILSIEGEYEVVQRDLEEKRCYVITAAAGIHGEPRFSRTPLGAVSSGFRSVLAMACDVMQGLMDPNVYVGFESLSTARGVILIDEVEAHLHPRWKMQIMRGLRRALPQMTFIATTHDPLCLRGMEDGEVVVLQRVLAQDSHSTTDLPVFVERLVNLPHVSELRIEQLLTSDFFQLHSTDAPEMDVQLAQIGDLLAKDPRDLSPTEGSTVDKFRRDIAAALPIGASEAHRLVQEAVAEYLMERREVSERRTKELRQTAKSRIVEALRGI

SEQ ID NO: 83361 - protein, 115 aa, Comamonas testosteroni
MVLPGKAVGVESERGSVSIFIYGLNRLGLVQERTRLLRRLEFLGDLVIELGTVIQEIEVPAVALALQGVGVEDVPKRLRLLQDKTLREMREMASPEAPYSAMVRAWLRAFKNRLS

SEQ ID NO: 83362 - protein, 377 aa, Vibrio coralliilyticus
MSNNFNLKNTNSNIKIIIGENGTGKSALLNELSLDYLNDNKTVIAIATSIHDKFTSRRRKFHFYGGRQGRSMVERAIKKSLLGDSNSDVDRVKYLISALEYAKYSPRIGIKVEGFEPDNIESLYLAAKEDERIYDVFSLIKKYHEPFSRESVVAISLWAVTKENNNVSGSALSAFIRYEKILKKYKIIKRFRTYLYREDSEIALENASSGELMIISMLVHISSYIDKDTVILIDEPENSLHPRWQRKYIDMILDVFYLFQPKIYVASHSPQIIPIDNDLYKIFAPKNGVVVEVDEKTSNNEELLSEVFGVITPENRFLSNKMVETINNFDAKNIEYNDALQIIEGYKNKVYDPRQVTFLEGVNEIIEKINNSRTSDA

SEQ ID NO: 83363 - protein, 204 aa, Vibrio coralliilyticus
MPNRPSFTDLEKRSMQEASRIGHTGWDKNPSLTSLKDKIKNFGLIKTEDRCCYCGRNIYGEFRMVIDIEHILPKSIFPKQMFKGKNLSVSCKRCNMNIKKSKVDFLEGINTAHTGTLLRSKYYKIIHPNLDFYDSHLLLIAGQVGRKVMLKYSVVNCSSKGAFTYDYFKLDRLEKNSFDMAQGNQPRVEIDNPELQEAFDAIAP

SEQ ID NO: 83364 - protein, 514 aa, Neisseria mucosa
MQVKSITLHNIGQFKELTISLTPLTDKAPKVTVFIGNNGSGKTTILKSLVTALSWLPARIRSERGRGLDIPEKVIMNGHSSGMVVLNIENTEQSFTWQISKAQKGRKNQFSTDLKAINQLADIHRTHLTENEQTDLPILAFYPVERSVLDIPLKIREKHSFAQLNGYDNALEIGVDFRRFFEWFREREDIENEENAFLDIEQISNEIDEMNSYIDNSLDTFDKMVSLQKDIEEKERELIKAKNNNELEKIANFSKQLIELTNKFIKAQSDTDSFLTKAESLRKKDTLRKKINYLDIQLKSVKDAVQNFTNFKNIRIRRKPKLRMIVEKDNLEFEVSQLSQGEKSLMALVGDIARRLAMLNPSLENPLNGQGIVIIDEADLHLHPQWQRQLIERLTKTFPNCQFVLSTHSPLVISDSKDIIVYSLENGEIRQVSSQYGQDANTVLLNVMETAIRNEEVTQKLNHLLDLIQDNQLDEAKMKLTALRKDLPENNLELAKAQLLLKKQEIRHEKNSKS

SEQ ID NO: 83365 - protein, 206 aa, Neisseria mucosa
MKKIQKADEPASFTKYKQHNPTHQYKDLNDEIIRQDIRKKCTEEQYYLCAYCCKEISGTKMDTMNEHIQPRHHYPNLSMDFNNIVASCNQKGHCDNSKGSKILSLTPLMDECETEFEFRINGTVIGKTERAKEAIDILKLNHEKLCESRKQAINSLLITQGLGNPIEVEDDELLQSVCDDIMQPENGKLIAFTPAIVNAIKNWTNL

SEQ ID NO: 83366 - protein, 538 aa, Colwellia psychrerythraea
MKLKELTLPNYKGFVNFTTTFDQGSAITTIIGQNGVGKSNLIEVIVAIFRSLDLGEQTDFSYVLLYECRGHDVQVRHDVKNKSQNLVNINGVKKSFPFLKSNANEYLPLNVFTYYSGTNWRVEELFVKHQTQFYKRLTEGDDSLLRRFFYCRDVHSFFVLLAFLVDDDPACKALLKKLDIKGIDSVLFCLKKPYWFKNKPSEIMQAEGDARFWYSRGIVKDFLSNLWKHSIAPIDNKERKTIDFRGRSENQERLYMFLSDETALRNLAEEYSDTTSFFKNIESTYIADILENVEVTVELENGQELTFDQLSEGERQLLTVLGLMKFTRDDESLFLLDEPDTHLNPRWKLDYFAQIEKILNHKIEGTNKTAWDSSQVILTTHDPLMLTSLYASQIRVLTESSIDGKKSDEPDEDPIHMGVEAIIQSGLYGIRTSLDKELQLKIDLRNRLLSMQKEDSAPSEELISINNELDAIGLSQVHPNPYFSNFAKALSRNPLFRKPEFTADEYEEIQRLSEEMLNEILECETVDLDKQNSDGKIT

SEQ ID NO: 83367 - protein, 277 aa, Colwellia psychrerythraea
MIKIVIPRDLPDEIIVWKARAEEITAEIIEAVTLEDKKRLITRYKNHWRNEDLVNWLSSLSDDKCWYTEAKFGGDNQEIEHFRPKGQVKDKDGNVHDDHDGYNWLAFDLDNYRLCKGRPNRRKSTFFPIIDERNRAISEEYDWRDETPLFLDPIEDEDPLFITFDENGIPAPEDELEDQDQRRVEFTIDKYFLDDTVLNRRRALTWSTCRELYYSYQHKMHEAKNAPNDRVRLRTEAKKDLETLKSLLMSDKEFSKVARCSIEKIGDRFARNLVSSI

SEQ ID NO: 83368 - protein, 473 aa, Colwellia psychrerythraea
MIIKSVLLNRKRYNLVNDNVDIDSNVFSAIIGINGAGKSRLLHRIIDSTIKVNNNFERKEIPNYFTNHIEVINDSKQINIYSRVNSKFSVLGDQNKNYFRHKLNSKLIAATTSPFDKFPVENKITSTYKHHDEDLYHYIGLRISENSYNKSNFINLLVRSFLKQGVTEIQNRVLNLLKYQNYYDIKFKTKFTSSELIELENSNSSFSIINKSPNVLDVFYKLLERRYPTLFKKVQHKSKLLDDILHSVLCCSRELEYGISSIDNLPQDKSFMLTFLLDLGIIQIKNVCLMNNGGEPVNLSEASSGEQCVLLTILNISGVIKDNSVICIDEPEISLHPHWQKEFMPMLMFCFKDFKHCHFIVATHSPLIVSTMKGPNCFILNMEVTKPVLAEQYVQKSVDYQLAELFNSPGFNNEYLNRVVVSLLSSLSRNGKLDKEQRNQSKMLLKLNNSLDDGDTVKELIQVLKAALEKLKQ

SEQ ID NO: 83369 - protein, 213 aa, Colwellia psychrerythraea
MIDRAVEFTPQELTQIRNKLQAPNFSNNSWSDEDIANIKSKIKEHYLTEQNTTCPYCKRNLQTRHGRSWDIEHIIPRSTVENFMFEPLNLCMACVDCNGAKSDKKITSSTARVNYPSRSGQFLIIHPHFDVYEDYIMVIREGFYYVALEAKGAKTMDICNLNRFYEFAGYGGDVDNDDEIAILSNQLSNIDNVQSKQRILLKIAELSIKSAVG

SEQ ID NO: 83370 - protein, 614 aa, Vibrio navarrensis
MQLRYLAIPQFRNLRNLEVSFASELEPVSGTLGNTPAKRIRSHALIGQNGTGKSNLIEALITLFRDVDLDREAAFDYTLEYEIRGHIVRIQADTAKQKRPYVWVDGDRVSQEYLIKNDPADKVPQDERRGPRLLPTHIFAYYSGRNERIEQLFQEHQRRFNKRQEITTDEVLSEDLLENFAASDADIRAIKEAKRRREAKLKQAGDDRLRRLFYCRGGHSQLVLLACLLSDDPVFKKVLNNLHIESLESALFVLKEPHRLREKRRGGKFDEIEINEGDPRFWYARGNVVSEFLDKLWQVAWAPIEQEASKQIDFRGRTEKQKQLYLYVPNKEKLKELGELVGGPDSFFRYAEGAYIGDLIDEVRIRVKKRDEYGGKVSFTQLSEGELQMLTVLGLMRITREDHCLFLLDEPDTHLNPIWKLRYFDDIEGVLSSEKDSLAQGESQILITTHDPMMVGSLRKEQVHIIRKSEGNTLVEQPDEHPQGMGVSGLLKSEMFGLPSTLDRHTLNTLQRRNDLLAKRKYEGLSHDEQQELDCLVVRLDDLGFSREYRDPMYQLFIEQMYKVRSKPLDELLSEQELQEQNALAEKIMEQLVKAQRKEDLSSLAQELAEKLKE

SEQ ID NO: 83371 - protein, 275 aa, Vibrio navarrensis
MRKVIITGTPPADWVAEADAITAQLLAAADDIARQAIVDENEKHWRDQRIRGWLMSQFANKCWYTEAEESVSPIHVDHFRPKGRVKNLDGSYEEGYWWLTFNWKNYVIAGHLINTKKSDFFPLMEGERRAAVNSSEVQLKLEGAVLIDPLTDQTRLISYERDDDGCIAVLAGDIDDLEKFKAEKTIEILGLNRIDRLNQKRGKKWDDCLKDIQDYRGARAHGAHALVWLVKETAIARLKERIKYDAEFSSVAEACIRKQAPEAVIAAVFERRSNM

SEQ ID NO: 83372 - protein, 450 aa, Vibrio vulnificus
MITRITLKNFKLFSDEQFEFNPEFNLIVGVNGSGKSTLLKGLAISLAGWAHAYIKDRKNLRPIEDNEIREIEQDGRFDKTKKTSISAHGIFPIISRLGYTVNGMVDWTRYRAEGEEQTFFTGGIRYESRDGGSYSEKEYPLNLSTLGSDVMRHIEQGKQFDLPVIAFYECDRLWMSEGDIDVKNTAMKQYSRFEPYVDCFHTGVNDKALVEWLLKLELAALQKKTSSPLKSAIEMAAKGALENCIGFGFDFEESRVMVRFEDGTSTPFEHLSDGQRTILGLFCDIARRAAILNPHLGESICHETKGVILIDELDLHLHPKWQRVIIEALRTTFPSIQFICTTHSPFLIQSLRSGNEIIKMDGEPLLEFKNKSIEDISINMGVEHPTTSRKYRDMKEAAKGFMQDLSEVQGTPKDKQEEFKKRLASITGLYAENPAYQAFLELQYLSKFRS

SEQ ID NO: 83373 - protein, 258 aa, Vibrio vulnificus
MRPFKKGSSPVSGDYSDYSDAKTDLISRFSSGMINGSHKAAYCSYCERVITQSLAVEHIQPKKGKYNHPTLIGRWDNFLLACVNCNSAKGSKGVFFDYLLFPDRDNTFKAFIYEPDGKIYVNKNNNVVMQSLAINTLRLTGLDKTSRETFDENGKLIAQDRINQRMEAWGTAEVQLNIYLQDKHNVHIREMIAMQMVTTGYFSVWMTVFSEHDDMKKIFVDSISGTRASGCFDQKTHSCVHPHDNPDRLPTGRFSMYK

SEQ ID NO: 83374 - protein, 583 aa, Burkholderia cenocepacia
MRLDKLTIGSVKDSPTHRFKNLKNVTIDFDQNHWVTVVIGWNGTGKSNVLEALAIIFRDLIAKKRTPAFAFQLAYRIGAGEKLRHICIDADPDRKNAPFLIRVAGATQIEQSDTAHGLLDFGEEPDTTLQGEPIKLTAFLNSDAEYLPRYVFCYYSGESPRMHEVFWPYLESYDTKLRNGEDPGLKRLFYALPVHSQFVLLAFMINQSVEVRELLENDMGIDPDEGIESILFVLKQPGWSKRRGNKMVDVAGDDRFWGAKGVVQIFLDRLQDIALAPIRIKRDKQITLWNKESTEFQYLFVKDIDALRRLVGEQLPAHFFRDLESTYVSELIEEVRIRVRLKKNDGSVTFRELSEGEQQLLTVLGLLRFTAEEESLFLLDEPDTHLNPRWSVDYISYLKKFIASGAKQQETSHVLLTTHNPLAIAELDREQVQILRMHEQEGHRQIVACYPEMAPRGMGYAAIVTSDMFGIASSLDFPTQELLESQRAFAAKDKLTPDEQHELDRINAQLDRLGFRFFHPDDEYSRYLRLRNELLVQQFKTEQPKELAKNVVQMSRSERENLAKQLITELLADEANPPQGDAP

SEQ ID NO: 83375 - protein, 270 aa, Burkholderia cenocepacia
MRYVDRAKLVKPAGWLARAQAASQAVANGADLNDHSAVWRELKSGLANLLHDKCWYCETVIDRSDNAVDHFRPKGKVSDARKPHTGYRWLAFDESNFRYACTYCNSRRKDLENGTAGGKADRFPLINEAQRVYDVGAVDAEQPLLLDPCEISDWRLLGCHQENGQPCTTSPDAIAKQRAEASIEIYHLNYEPTCKRRHAAAVQLMADVDEGKRMFELATRDPARAPDFKSVAARLRRAIDRESPYSGDMHFLLRGQRSDAHPWIQDLLEA

SEQ ID NO: 83376 - protein, 439 aa, Burkholderia cenocepacia
MNPIFKSLNVAGWRQFRNVEIDFHPRLTVITGANGAGKSSLLGLLNTHFGWQRAYLGTPRRNRLNGVTTFSAGLRRRRNLKGTGQQPLQPNHEVGSITYSDGNRASIQVANGAQQYSASIVGQLPVVGTFMSSHRPFPIFQQVGSIPTNVIRPDLAYANHFNETVQRLNGQGGGLSPIFRMKEALLSMVLLGVKTDFSAGDKDALETFSGFVEVLRIMLPPTLGFKDLSVRPPDIVLETASGDFLLDAASGGVISIIELAWQLYMYSLSSVAKNAERYSVVLDEPENHLHPAMQRSLMSSLLAAFPKAQFVIATHSPFMVSSVKDSNVHVLGYMPISDSEDYAAEDDGDEDSSLTNLVYGVKLDTVNRAGNASEILRDVLGVPVTVPVWVESQLQEIVAEYRCKDLSVETLGSLRERLNEIGFGELYPQALAEVVKIHD

SEQ ID NO: 83377 - protein, 209 aa, Burkholderia cenocepacia
MIKLTKGAKPEILAERADEWTKTLIEKKARGEEPSDGEKSRYRHPKIKEALILETHGKCAYCESKLQHIAYGDVEHISPKSNDVRLTFDWNNLTLACDICNTNKGVVDGIVDPYNSDPSLHFTISGPLILANPADDVARLTEMKLDLNRAALVERRKEKIVFLRDQVEIYLRAANPNLKAVLKTDLERTIADSEEFSAVARHCVAVWCG

SEQ ID NO: 83378 - protein, 477 aa, Pseudomonas syringae pv. tomato
MFRLIKVKPGTGQQFVVPSHNPKEPFKSVIVGGNATGKTRFMVSIIEAFRGLAATKALSNDMVSRSYKKRTSFTPGFSFSYYMDGEKVDCKYDTKGLHVDVDGEPINHKEIPLPSRVIAISASWNDKFPFSDTDEDNFYKYCGVRETSNASWTATLSRRSIENLLNVPLRLHQESITELFEYLGVDTKLKITFRFRNAEDLLALIGDPHELVSFVQSYSKNNSRMQVDFFKKFSLQDALRVEAGWNQISRKKTFELDVNLRHTTVDYSDAYFAINVFRRIGLITDVDLRVQKIDSTEAYPFASSSSGEAQLLYCFSSIIRHAKDNCLIIIDEPEISLHPAWQIKYISLLKRALSSFRGCHVLIATHSHFIVSDLASESSSLHIFKKIESVSDIRNVEYSTYAWSADNILYDVFDVRNVGNLAFERDLELALTLIAQKTTNFTELRALKQKFEKVLFQDSDPLKKVIDTISEYVDGNH

SEQ ID NO: 83379 - protein, 209 aa, Pseudomonas syringae pv. tomato
MAITEWYLNIEQLPIFAKATLDYLEGLKPHEAKHWDLQTNAMKIYKTELLSQLLRIQNNRCAYCGLGLDRNLIDREHFVHKDQNGGWPEFMFVAENLIAACAYCNRALKGCTTTVAQYSANYADCRFNLVHPILDDPRAEIAFIPDMHGDAILAKSLTKKGLDTLTFFELMTPIMTAKRAAYLLEIKRMEEMALADYNELRAISHYKPS

SEQ ID NO: 83380 - protein, 452 aa, Pseudomonas syringae pv. tomato; identical to SEQ ID NO: 81250

SEQ ID NO: 83381 - protein, 216 aa, Pseudomonas syringae pv. tomato; identical to SEQ ID NO: 81251

SEQ ID NO: 83382 - protein, 782 aa, Pseudomonas syringae pv. tomato
MQRFARNEIPPPIFREKRFKLARKELLELFTLDTQELSQTRITGEELSLDLSQVGPIHDALGHLFHGKCAFCESQDLTVPYRFRAASSVTSAMGMADSHLYYVWLANAWENIYPICIKCIPRQPAFFPVDGKRVPIPSLEQIRRYAAEDLGSWRTSGPRESAVLLDPCIDRNFERHLFPSVDGDLLPLSERGDTTIANFRLDRLDLNKARAARLREYREALLAPDRNRANLRYSNFQNLFDFQELEFGGLWYLQCRLIARYLSQKVGMVMPTGRSHIARTLKTLLFMGDYKLSHEQLKSWIEETDFGHLPLEIPPTDYGVLEPAPVIQKAVVPRIYPSLHSLQFDHFKVIEHLKLKLDIPTAESQLNNAALQPALLILGENATGKSSILEAIALALSPRETRRALNLTPGSLVLSPAQLGSNDTPTQFWARVRLGFDEGRDKVLSIDNAACKQFGPRLVPPVFAYGAFRQYQKKTPPVFEPAHGIINLFETDRLLANPEQWLLGLKGEDFNDVARALKIIMSVEGDIKVIEPAPDGKSCLIVTAPAGVVTKTPLNDVSSGYRTILAMVCDIMQRLMDRRINPDFPGLEHAQAVVLIDEVEAHLHPRWKIQIMQVLRRALPKITFIATSHDPLCLRGMQDGEIVVVHSRSRAGGANTQYATCIEQLHDLPDSTQLTIEQLLTSDFFNLMSTDQPATEKQLANVADVLNKLKRKETLTDEDEQVMRYFEKEIKEALPIGTSEAQRVVQEAVAQFLQERREKPSIEWGAIRTDAKTKILNILRNS

SEQ ID NO: 83383 - protein, 351 aa, Pseudomonas syringae pv. tomato
MRPRKTTVSAADQELLDLTAHYEKKSAALAAALAADDPVAASASVAEEFSAKKPPFTTHRKDSVKTQLYAIFHGKCAYCETFYPAVAPVDVEHYRPKGGVSQDADHPGYWWLAMEWENLLPSCIHCNRLNKHATPKLSTQLVELRADGTGFSDQYKVTTGKGNHFPILGPRATPASRDCSTEYPLLLNPCLDDPQEHLAFHVDRKKLIGLVLPKPHNGAGLPAHVSTTDLLPAFADEIDQALRDKLSLRGAVSIHTYGLNRLGLVQDRTRVLRQLAFLEESVKDLCAMIQSLEARINDPFAVENIRIIKRMEALVERTAQHMADMAKPQAPYSTMVREFLQGFEARLVAIP

SEQ ID NO: 83384 - protein, 736 aa, Burkholderia thailandensis E254
MRKIHGRDDLAPSVLAGPEAKDARAKIAEHYRQPEEQRLQRRIPLDRTLLYSVEVVRALATLSHGKCSYCETPIEGTTGTVDHFRPLTGALGIGMHGAKDSPDYYGWFAYEWRNFFIACRACNSAKSNKFPVSGRRAPLLCAWQEANDAEEGTILDPCRDTPEKHLRISVAGQMTGHTVRGERTISCLDLNREKLLENRAWKIQRCLDLLRRAIDGAGDAEYALEAEIADEKAFSGVARIFLVQLIDEAARRLGMPKSRSSNLVNTAIRLLKLLPMQLDIAEFAVEAEADVTSRAVALYDDHDVLYEVGDGIARLDSVSSISHIEIRNFKGIGHLAFDLTDRTNRPDRARCMMLLGENSTGKSSVLQAVALCLMDDDMRRRLKLDAEDYLSRDVTGWKFYGDRDCFIQVTFDNQRTVQLVIDAARKRFEGSGGPATILLAFGARRFFDTRRKRGQATDRVKTLFDPLCALPDLISWLNGIREREFYAVARAMRGIFVLDEKDDLFRSDDGEILVRAHGRATPINNLSEGYRSLFAMTISAMKHILENWDNFESARGVVLIDEIETHLHPRWKVRVMAALRDAFPLVQFIATTHDPLCLRGMDAGEVEVLYRNEEFEVERMANLPDVKSLRTDQLLTSDYFGLLSAADPDYEQALDEYASLKGEQLGADANSTKLLELEAQIEKTLKIGDTPFQQIVHEASSRYVEHYKGKPMARREQFREASVKDVLDALIKARGE

SEQ ID NO: 83385 - protein, 311 aa, Burkholderia thailandensis E254
MRFVHRPADEDDIPKPLAERGSDGAREREGAAKYYEVRKKKCYPFKTYKSPEVVEALEKLFHGKCAYCESKYTAVGPVDVEHFRPKGGVEEAPEHQGYWWLASDWKNLLPSCLDCNRRRRHRIATLGMTLAQLTGARRESRGKKNSFPIAGVRAFAPADDWPGEDPLLIDPTSTDPASHMAWPVDGSLSVVVPVSNHGVEDPKGAATIYTFALNRQRLVEERTRVLNAIRMQVLSLRELLEIACTINEESPRRGLIDKAVRDIAQLKQLGNASSEYSALAQAVFEVELDALVEEFRKILGEIEHRAEPEEA

SEQ ID NO: 83386 - protein, 540 aa, Vibrio cholerae; identical to SEQ ID NO: 80874

SEQ ID NO: 83387 - protein, 205 aa, Vibrio cholerae; identical to SEQ ID NO: 80875

SEQ ID NO: 83388 - protein, 521 aa, Polaribacter sp. Hel1_85
MEKSIIQNGFKLDSLEVRDHPILGNNTFNFLDKEDDSNSIYFTVLIGSNGTGKSELLKLILHLFRGVYLIEGNRFRVNYFFALKFWNSGYLFEFSNNRDIKFVDITNKKSKYPSPNFYLNNKTIEREEFINAFPSSIIANSLMLTDKFIAPRNGREQADFPIYKYLGVRNRPQQASTRSYVRKTVEFIVEQLNSEVFKEGITNLSKFLGFNGSVEVRYSTIYTKKFYTGNLKKEELEDYFYKIDEQYKNSTVTPPFKLNYFKSLTKEDGELDRLVFFINTLFKTDRLIPVYRSTKKELSYRVDNKLEHSLLKEEYEHLDKLRKLGLVNPPSVNFIHNDKPLGIQQTSSGEFHFFSTMVGLMATVKPGSLILIDEPEISLHPNWQMKYLAFIRKLFNEPKYNTCHIIIATHSHFLISDLQGASSKIIGLKKTNTKIETLHINTNTYGWSAEEILLDIFQVPTTRNHFVSERIGSILDEIAKPDKDTNLIKQAVKDLQDKNIDKLSNEDPLKEIIDKLIEKYG

SEQ ID NO: 83389 - protein, 227 aa, Polaribacter sp. Hel1_85
MASLSKLLDYTLVNKTYNILADEQLTINNNPTYLKEDWDKSVFTTLKGNIRKHYGRRQNRKCAYCRLTINPDAYGNAIEHIMPRKHKPQWMFVQHNLTVACIGCNSSKGSDNTMISHENNYGHNANHCPSNSNEFKIFNPHFDKWSDHFEIQDKFFLVPKPNTKGPATYKFCNMHRYQIVLDYIDVLNSRKKSFKSITGRLRKEKRNYVKVELEKAKESILDFIENS

SEQ ID NO: 83390 - protein, 532 aa, Polaribacter sp. Hel1_33_49
MRIDKIYIEGFKNLRDFSIDLNEEFMSTVFLGQNAAGKSNLLEALVIIFRDLDLEEETVFNYIIEFQCKDNLLKVEGGKNTKGKFQFYKGVKLKDSIAYDVKPISKTLIKKNKSDYLPKYVFSYYSGISNRLLEHFDKHQKRFYDELIKGVDAPPRPLFYARQIHSYFVLMAFYAFSDKKASEFLKEFLGIVGLESVLFVLKKPVWARSKTEALDFWKAKGVVREFLDELFESAMAPIVHEDTVREDFRRSHKQEQLYLYLSNQEKLEKIAKKYGTNTEFFKSLESTYISDLIQEVRVKVKKVNVHGDITFKELSEGEQQLLTVLGLLRFTKEDESLILLDEPDTHLNPLWKWKYMNLLEEYSGKDESSQILMTTHDPLVIGGLTKEQIRIFQAVKKIDKEAKEYQHIEAFEPDFDPKGLGVAGILTSEFFNLPSTLDEETQNELNEYRSLEVKEKRGDLSEKEKTLLTKYTKYFEELGFNKYTRDPLYAKFIERTANLSEFKSIPKTKEAQQKQDDLTVSILEDLLKEDSE

SEQ ID NO: 83391 - protein, 278 aa, Polaribacter sp. Hel1_33_49
MRTIDISNLENLLPEGWLENAGTLRDSLIGKTPEQRRAIFKASPIWQDLLLVLKGLSNNKCWYSEAQEVMSDMDVDHFRPKNEARNIDENGKSIKRDGYWWLAYDWRNYRLSSIYSNRLRKDKHTDQEIAFGKGSFFPLREGCNTATCIDELDDEVIYLLDPINPNDPDLLFFSDDGKAIPSVEKEDEPWNYSRAKVSIDVYHLNHTPLKDARLVVWNLCERKINQIKKINRKAIRTAGDNARIEILKQDLREMISKEAEFSAVAIACVQKNKIRMVA

SEQ ID NO: 83392 - protein, 539 aa, Roseovarius mucosus DSM 17069
MRIDWLWIGEYKNLKDLTIDFAQGHLITVLIGRNGTGKSNVLEAATVLFRDLIMGEDANGSKNKPSFSYRVCYQIKDKWVRIDADPAGKEAYRVKIAPYDPNAEPPPAAISFEEAPGEALALSKLRDPDDGYLPKFVFGYYSGQSERMEEVFLKYLERYDKDLRAGKNPGLKRLFYALPVHSNFVLLSFIVNNAELTDKFLQEQLGLEEGGIESVLFVLRQPSWTSKDGDPRFWNARGVVSDFLATLYDISLAPLRITRKEKVSLWNSRTLEFLYLFVKDLDALRKLAGGKSTAQFFQDLESTYVSELIDEVRIRVKLRKNDGSVTFRELSEGEQQLLTVLGLLRFTAEEESLFLLDEPDTHLNPRWSVEYLQHIRNFLNVNGIEKQSSHVLLATHNPVAVAELEKEQVQILSRDKETQAISAAEPDTHPRGMGYAGVMTSEMFGLSAALDTHTQDLLERKRRISAMDVLSEDDRKALKEINEELQNYGFRYEVRDPELKEALRRLDQEVKPTGEREEMPDEAEKASRLIQDALKQGED

SEQ ID NO: 83393 - protein, 260 aa, Roseovarius mucosus DSM 17069
MRYVNLDQLKLPDGWQARANAAIENDPGKINDYSDVWRTLKQPLMELSHDKCYYCEIIQERSDGAVDHFRPKSKYPWSAFSPSNYRFACTFCNSIRIDKESSKTGGKGDNFPLLDDAKRATCCEEEVNEGPILLDPCKPDEPGLIDFDETGKPIPTYSEQMHAGRYKRANESIRLYHLDHADLVDKRKTLALSIKRKIDAADRLFPHTESGNVDIDISFSDHVRSLANSISESAELSAFARKIMAGHRDVLWVENLLRSA

SEQ ID NO: 83394 - protein, 423 aa, Rhizobium leguminosarum bv. trifolii
MYAKSLHIYDFKCFRKAELRLQYPGRSGEGVSELGNVNLVLGDNGGGKSSVLRALAIAVLAPALLDSGFVPYRLVRRVMPGNDQVEKAFLKVEGMPEKNEILPNVSRRKKLELIARIQTRGRGNLDRLHLDSTPDSPIAEVLFDDYSPAYFVVGYGATRRVESGEFSPSSAQRSRALRYQRIAGLFEDHVALRPMQAWLPRLLSKDPKQHELVVSQINKVLPSNIRFSGARDDDQDQYMFEFEGVPTPFSALSDGYKAFVGWVCDLIGHMADVATDGRSIAELPGIVLVDEIDLHLHPEWQRSVVPALAGAFPKIQFVFTSHSPLVASTVRRENVFVTDVAEDGTATIKQLLERVYGLGAEQLLLSSYFGLQSTRPESFNRQAETLFEKAAKGDASAALTYLDQLTVPSDSAPATPTKRNVAK

SEQ ID NO: 83395 - protein, 295 aa, Rhizobium leguminosarum bv. trifolii
MIRYDFDRTVVEADIRAVDSRWFNKAEKRTKSIVKLGAFAEKTSIWSKIKPTFMRLQKNKCVFCERQFENPDYGTIEFDVEHFRPKSSVVTWPDAVRHSKLKYEFGTGDPYATGYYWLAYELENYAASCKVCNTSLKLNYFPIAGDRGNVLATVDDLSSEQPYLCYPFGDIDDDPETLMTFVATTAVPTASDEFKKRRGKTIIDFFDLNGREQLHRERARMIAMCGSALMADAEGEATDQDQLVIARMDSPVLPHSNCLRAFKRSWATDKELARQIYEKCRAYALGGDSSGPPDL

SEQ ID NO: 83396 - protein, 426 aa, Desulfobulbus sp. Tol-SR
MIKHLKMTNVGPAAKMELEFGKRLNLLTGDNGLGKSFLLDIAWWALTRRWPAEINQKLTAGKKALPAAEGRAKISFSFSGKSKEESYESSYLRKEQAWTGRPGRPANPGLVLYAMSDGSFAVWDPDRNYWRTQGGLDVQDRVPAYVFSPMEVWDGLPGQGSTWLCNGLIRDWAGWQKEKGRPFSQLKSVLKVLSPSTKETLEPGDLTRISLDDVRDMPTIRMPYRQDVAVVHASSGMRRIMALAYFLVWAWEEHKQAAKQIGEPATKQITFLIDEIESHLHPSWQRSIVPALLSVMEKLTRNAEVQLITATHSPLIMASVEPVFDSQKDAWFDLDLTKDKVTLAKRQFVRQGEVSRWLMSEAFDLGSARSLPAENLLRQAAEILSEKVIDHERAKELDAQLRGLLGDTDPFWIRWRYVGEKQGWLK

SEQ ID NO: 83397 - protein, 199 aa, Desulfobulbus sp. Tol-SR
MIPVVAQPEPRTFETKVRRKGLAHLAQKGYALDQPLPPRADINPYWRDCLNDLHKVYGGVCAYLCVFFERVMGGGSVDHFIAKSAHAGLAYEWNNYRLVCSTMNSRKRDYADVLDPFFLAPELFRLQLSTGHIYPNPNLDIRAMRIVEETIDRLGLDDPQCRELRARWYQDYLEYGLPADYMKKKSPFVWQEANRQGLL

SEQ ID NO: 83398 - protein, 417 aa, Vibrio tubiashii ATCC 19109; identical to SEQ ID NO: 81430

SEQ ID NO: 83399 - protein, 219 aa, Vibrio tubiashii ATCC 19109; identical to SEQ ID NO: 81431

SEQ ID NO: 83400 - protein, 450 aa, Dickeya chrysanthemi; identical to SEQ ID NO: 83350

SEQ ID NO: 83401 - protein, 203 aa, Dickeya chrysanthemi; identical to SEQ ID NO: 83351

SEQ ID NO: 83402 - protein, 468 aa, Pseudomonas mediterranea CFBP 5447
MKLIRLELENYRCFPTLTLELDSQLTLLVARNGQGKTSLLDAIKVALWPYVRGFDLGSMTNDVTGIQPEDVFLRPLAAHQMEPSLPARLTAHALFHEKAWTWSRRRESIRKGTQTREDATANLLQTTAEALEVQIFNRTVVDHQDPFDLPVLAYYGTGRLWSQKKLTSAQEKAENAELSRTYAYRDCLDPASSYKHFAKWYTRIFRSYREEQIRNLERGKLSIDVKDELALPVLAVQNAVNAVLATRTGWRDLAYSSEFSDLVLEHPVHGVLKVSQLSDGIRNIVALAADIAYRCVKLNPHLGISAPRKSSGVVLIDEVDMHLHPAWQQTVVPDLLDAFPHIQFVMTTHSPQVISSVPAHCIRVLQTVTDEGGRQIIVNDVEQQTQGVASSQVLAYVMDIDPTPDNEPAQKLSKYMALIQQNLHETTTEGLELRQYLDKHFGVKHPNMLDCQRLIRLETFKRKKLTKP

SEQ ID NO: 83403 - protein, 216 aa, Pseudomonas mediterranea CFBP 5447
MRKLVRGEGPRCLSRYKHGVHKWSPQSPTALEREQVWECLQAMQDTRCAYCEADIRTSRHIEHFRQRDRYPKGTFEWINLFGSCCREDACGKFKDRCGAYEHAILVKPDVDNPDDYFIFVSDGTIVPRANLDDRSRHRAVETLRIFNLDAQNGALREMRREAVRPYLNTAQALMDMMDMPEEYSENDIQDFLEEEVQKIASLPFSTAIRHTLSIKH

SEQ ID NO: 83404 - protein, 455 aa, Pseudomonas chlororaphis
MDINRLMLDSVGCFTDLNMALAPTPDHVTNVTVIVGNNGSGKTTILKSLATSLSWLIARVRTEKGHGSAIAEEDIQNKALGAVITIGITDGSHPRCNLVETPVEDYGFVWSLARTQQGRKSALHSSLTEVSLLADHYRTQLTVNTNASLPLIAYYPVERSVLEIPLKIKTKHTFDQLDGYDNALNRGVDFRRFFEWFREREDSENEISIPNTILAEIVEKYGKDSEVWRALSEVKTSPRDRQLTAVRSAIAAFMPEFTNLRVQRKPRLHMAIDKNEATLNVAQLSQGEKSMMALVGDIARRLAMMNPSLDNPLDGDGIVLIDEVDLHLHPQWQRSLIRKLSETFRNCQFVLTTHSPLVISDTKDVLVYVLNNGKLHEHNGLYGLDANQVLLEVMDTDIRNENVQRSLNQLLKHIQDADLENAQKLFAELSGELPEGHIELAKAALLIRKLELRRA

SEQ ID NO: 83405 - protein, 209 aa, Pseudomonas chlororaphis
MRKIIKGTEPDSLAKWKLKNKTATYPDLPPEERQSVRAACITEQFGLCAYCCQAITVDGSHNEHVEAQNRVHNRTLDFTNIVASCENRPHCGHGRGTQLLRLTPFMDECETELKFYLSGLVAGKTSRAEEAIKALNLGHTEESNRALIGRRRTLVEALIYKVGVQPGELPEIEDKEILDLLLDDLLLPKAHKLEPFSPVLVNIIRQMPA

SEQ ID NO: 83406 - protein, 416 aa, Janthinobacterium lividum
MKNKIESLHLRGMRQFHEVDVHFNAGFNFIAGPNGCGKTSILAGISHCFNTNFQYSRFSENVEFWVDLEANNRNFRIGIGEGAFSRFSYRDTQLYKWVHPPVAENRESLIIADVPNRPELLIPLFIGAQRRIKYSKIQGLKREEGLQNQIDMYISNATKSLHGEWQADVKQWFINRYFIIEKEWGKEEAANWQHMIEMLPHVGPFDSDFRYITIGKELEPVFSIYGKKCYLEELSAGFQAVLLIIANIIEWIEASRKDGDRNVKEATGTVLIDELDIHLHPEWQFNIRNGLSRIFPNIQFIVTTHSPHLLSSADANEVIVMPARLQTNEKLVLRPSNRSYAGWSTDQILSDVMGVRSLDNKVHEKLVAKALDCIDTKNVEGLRTAIAELKEVCHPNDTMLVVLTTRLAGLEALADD

SEQ ID NO: 83407 - protein, 249 aa, Janthinobacterium lividum
MIKLKRQPEPQVIKDNGAVWLLELESAIATHGTLKNIPENEKSKLMAHYRHADIKEALRLSSNGKCAFCECIPEGGYLEVEHFKPSSIYHQFTFVWDNLLPACAQCNGLKKAHDTVLEPIINPYEISAIHCFEYNSMRVKPIVGPSYDVAERTIIVCGLDGVRLWKPRADILMALYGFTDSIKISMEEINDADTERKKVIRVRKLKEAIITIETLAQPGSKFSGFCLAYLRSCTEYIEAKRIIAASDQA

SEQ ID NO: 83408 - protein, 419 aa, Citrobacter freundii; identical to SEQ ID NO: 82802

SEQ ID NO: 83409 - protein, 262 aa, Citrobacter freundii; identical to SEQ ID NO: 82803

SEQ ID NO: 83410 - protein, 434 aa, Candidatus Thiomargarita nelsonii
MRLDQLFVQNFKGFEHKNIQFSPQFNVLSGDNATGKTAILDAIAVGIGALFLGFDSISSRPIRTSEIRHIGYPLGAELKLEPYPPAIVRCSGEMVDSGIITWERSLLKPGSRTTYQNAKSIIDKAKQLQKRVRAGDQSLILPVLSYYGTGRLWLQKSGRVETIKPDSRLSKYEGCLEPASDEKRFIRWLKTMEIAALQRQIPIGVLECLRKSIRNCLEGCESVYFDIPHDELITTLLPNNQSLPAYMLSDGQRIILAMVADIAYKAASLNSQLEEKAALETPGIVLIDEIDLHLHPNWQRKIVDSLKTTFPKIQFIATTHSPFIIQSLREGELIDLNESEPAEYEDQSIENIAEYKMGVEIPQRSQRYLEMMTAAKEYYRVLEQAKDVPLEKIESLKNRLDELSAPFSENIAYHAFLEMQREAAGLGRNADETY

SEQ ID NO: 83411 - protein, 236 aa, Candidatus Thiomargarita nelsonii
MRPIERGEVPTDTKGQPKQYHHYDQAKPDLMNRMGEYCSFCERFIPTSLAVEHIQSKHYQPQLERSWDNFLLGCSNCNSTKGSQVRDDVTQSGYYWPHLDNTFRAFVYKQGGIIDINQALNAEGREKALKTLELTGLNKHPNAQVKPTPKDKRWNHRREAWDLAQQAKTLLATSNNNPSMRNFIVKQAKTNGFWSIWITVFQNEPDILNRLIQVFPGTCHQCFDSNGQPTHRCGGG

SEQ ID NO: 83412 - protein, 434 aa, Candidatus Thiomargarita nelsonii
MKLNRITIENFRAIKRLDLPLEPQLTVLVGNNAAGKTTILDAIAVGLGAILTRLPSVSGKKFRPSDIFSSENEQSAPYTRVTLESIDGVIWDRTEKRDQNKRTQQEIPPDKKLGELYHFLENIINDVQDGKSTNLPVIAYYGTDRAVLSSSLQRDFNKKINRFKALENALVATQRFQTMIEWFAFQEDIERREQTKRRDFEYRLPILESVRQAVCQMMPGCSNPHTLINPLRLIVTFEYLKGHQEILSLNQLSDGYRTTLAFVMDLARRMAQANPHLGEKAIQKSEAIVLIDEVDLHLHPMWQQQLLVDLMETFPNAQFIVTTHSAQVLTTIKPEHIVLLTRQNDDVIAEQATSSYGAESGRLLVEIMGVNERPPAEKNKFTELLGKYYDLIESHQGESKEALSLRCELAKESPNDPILIKADMEIRRLRAQSS

SEQ ID NO: 83413 - protein, 283 aa, Candidatus Thiomargarita nelsonii
MKKLKQLETIPTGLQHFLKEYPPEKRDKRDWDAFKNEEHEIYSELTQALIKIQHGLCAYCEINLTENDRQIEHFHPKSDIPHENDWMFEITNLFAACKGGTQTNLFGTKSRYPDPTRCLSPIKKNRSCGEAKDDNVMDDEIIKPSDLPVSPPLFSITRRPSSGVVKPSDKLGALKVNKNACLQAGIDPNKVKATIETFNLNCDRLCLARKTVLEKLEEDFELELANLGENPSDQQVKSLLDKMAKYNLAVNRNGTLPAFFTTIRVFFLPQAESVLAQSPQNWI

SEQ ID NO: 83414 - protein, 381 aa, Candidatus Thiomargarita nelsonii
MRIKQLHLKNIGVFDSLNLEFQPSKCPDKAEINIFTGENGTGKSTLLYALASANGSSELLRQRFRTSNPLAEVIIDETNEQMMAFAYSGNRALKSYQLSGIEEITESPFDNALSFTNTTDSAILTKWIIYNKAKEAFALMENESAKAETYRTAIQHIESVIKEIVGLNIEFILETEPKFNVVLNIEGQRLELDVLPDGFKSIISWIASLFMRMDRMADDKNILDRHFILFLDEIDIHLHPAWQRKILPVIQKLFRNAQIFVSTHSPFVVGSVSDAYVYKFKLDQGISRLDSIEESKAGSSILLVLDDIFDIDELFDIETETEFEQFYRLRDEIMTDKKNEDKIPELLELARHLTQKGVEVTGVIGRELRQLSRIIHQDFSL

SEQ ID NO: 83415 - protein, 152 aa, Candidatus Thiomargarita nelsonii
MMPLKRGVAPACLKKYKQWGRDYAAKRQQNPNVSFYWHQYQNRSINHILIEELEKLTANHCAFCDFFPLGAQSRQTIEHFRPKSKYPKLAYVWQNLFLCCDVCQTAKQEKYDKRLLKPDVTAYEFHRYFIVNQTTGEIKPNPRQLKKKNVPK

SEQ ID NO: 83416 - protein, 394 aa, Candidatus Thiomargarita nelsonii
MANNATPPPAYFKTLTIENVKCFKAEQTIDLSDGNGKPAQWTIILGDNNTGKTTLLRCLARFDFRTFINPRENSSEKKISHDESIKSHLLIKESGTWKFKDRFWDEKIAGLIIYGYGTARRMDTSSLSEKENKYATSSLFSDDMTLINAEEWLLQTDYAVKNGVKAAASRLAKIKQVLTSGILPDVTDFRFTTTKDLKSFVEFKTDYGSVRLNELGYGYQSMVAWVVDLAKRLFERYPESENPLAEPSIVLVDEIDLHLHPEWQRKIIQFLTAQFPSTQFIVSSHSPLIVQSANNINLVLLEKQSDHVTIRQPNLTTYQGWTIEEILNELMDLGEKTLSDNYLALIKQFDEALDKEDYAKAKAAYDELDKILHPESSQRKLLRIQMSSLMPETV

SEQ ID NO: 83417 - protein, 252 aa, Candidatus Thiomargarita nelsonii
MIRLQHLPKPTELTDEVEQELTARYKKDDTSVWKKPYIIKALLKMSTNKCCYCECNITTESNYLEVEHFHPKSLYPDKVVVWENLLPSCKRCNGTKGDHDTQKEAIVHPVRDNPKSHLTLKAYRLYPKTDLGQMTINVVNLNDRTRLVKKRFKIGVELCDELENLLELITEYDNGTSTSTRRRNRIVETLRNLMKEGTRQSDFSATAATVILHEKSYSQIKQLLNNNNLWNNELNDLEKEVEFCALDVEDNE

SEQ ID NO: 83418 - protein, 430 aa, Candidatus Thiomargarita nelsonii
MYLSKVTFKNVQGFENLTIDFMGNHNNVQMSSLFLGNNSAGKTAFLRSLALGMCDETGAAGLIENFRWAFIRQGEKEAIVNIEFMSPHGQYRIVTVVKRISTQERLRQQYYHLSETQQMREIPPEDFPWQNLFVCGYGAGRLFGESTKAYEKYRIREAITTLFRYDYPLLYPELSLHRLIRATTGKKDEIDTLQHFLTLMDDLFMLAELETIELTDNGIEVVSEKERISLLAHGDGYKNTATWVLDMITWKMLADQNFHPQEMAGIVLLDEVEQHLHPKWQRHIIRLLRQQFPNIQWIMTTHSPLCAAGIADLPDEEGQLLRFNKEHQGFIKLMEIASLRGLKADQVLTSPAFGLATTRNPEIAEKLNYFSTLYLKESRTSQEEHEFLELSDYLNQQLPEPAEDSETRVMQSKLKKMLGDLAMLSNGGAS

SEQ ID NO: 83419 - protein, 139 aa, Candidatus Thiomargarita nelsonii
MIQLKQRPPIPATLKSKKVKKIKRQIAEKIEQGEVITSEDFPSYWRKDDIKETLWEYHNRKCCYCERKRDLKRESDVEHFRPKAAVTEDKEHDGYWWLAYEWDNYFFSCKLCNQEYKKKLKSNTTKICWTGFATPSVTF

SEQ ID NO: 83420 - protein, 217 aa, Candidatus Thiomargarita nelsonii
LLPNCSHLHTEMEPVNFSIRFLITFQNEGGEEILSLDQLSDGYRMMLALVMNLARRMLQANPQRKKNALESEAIVLIDEVDLHLHPKWQQRLLIDLMAIFPNTQFIVTTHSPQVLTTIKPEHIILLEHEKEVIAEQVTSSYGAESGRLLSEIMEVDERPPADVNEFTRLLEQYYHLIERNKGESEDALKIRSRLNELSIDDPDLITADMEIERRREA

SEQ ID NO: 83421 - protein, 282 aa, Candidatus Thiomargarita nelsonii
MKKVKQLNVAPTSLQRFLQDFPQTSRHISDWEAFRNDNGGETFRELINKLTHIQHGLCAYCEINLVKMVEEQAIYDREIEHFHPKSDIPHQSDWMFEITNLFAACKGGSETNRFGEKAREGYKDSARCLPPIKKNLSCGGTKEDKILDEQILKPSELPISPPLFSVSILNGVISVDENACHQAGIDPEKAKVTIKELNLNCKRLCQVRKRILKKLDADYRKLRANLENTTFTQIDAALNQMTAQYLAVKPDGSLPAFFTTISAFFGSRAEVFLEQKGIVKPN

SEQ ID NO: 83422 - protein, 381 aa, Candidatus Thiomargarita nelsonii; identical to SEQ ID NO: 83414

SEQ ID NO: 83423 - protein, 152 aa, Candidatus Thiomargarita nelsonii; identical to SEQ ID NO: 83415

SEQ ID NO: 83424 - protein, 434 aa, Candidatus Thiomargarita nelsonii; identical to SEQ ID NO: 83410

SEQ ID NO: 83425 - protein, 236 aa, Candidatus Thiomargarita nelsonii; identical to SEQ ID NO: 83411

SEQ ID NO: 83426 - protein, 433 aa, Candidatus Thiomargarita nelsonii
MKIKKLQLENFTQFTELKVEFPRDVTVFIGNNGAGKTSLLRALAILLTWLIARIEREKGNGSPILDSDIENDAKYSKITLEVCESDNRLFQWTLVKQRKGFKSEQSSELKNVTRLADSYRNRLTQDDNSSLPLIAYYPVERVVLDIPLKIKKHHSFDQLDGYDNALTQGVDFRRFFEWFREREDAENENNLQQIMKLIFEENIPKEQLQDKLPYDKQLTAVRNAIAAFMSGFSKLQVQRKPRLQMTVEKHGKILDVAQLSQGEKTLMALVGDIARRLAMMNPGLEKPLQGEGIVLIDEIELHLHPQWQRGIIQRLRDTFPNCQFLLTTHSPLVISDAKNVQCYILDEKQLTQIDDLYGLDANQVLLKVMDTDIRNPEVEKKITVLLNLIQESELYKAKTALSELEQELSADDLELAKARLLIKRLEVLRAKNN

SEQ ID NO: 83427 - protein, 206 aa, Candidatus Thiomargarita nelsonii
MRKIIKRNEPIALSNWKRHNPNGHYPDLSHVERQAIRDSCLKEQYYLCAYCCQRIDDKNSHNEHIQAQSVAPNQMLNFHNIVASCNQSKQCGDAHGSKTIPLTPLMDECETELKFYISGEVKGITTRATDTIKILNLGNGNKALINKRKQLLDALIFMHSESPEELQLLDDELLQILMEEINQPQDGQLSAFAPILQNILRQFLKK

SEQ ID NO: 83428 - protein, 434 aa, Candidatus Thiomargarita nelsonii; identical to SEQ ID NO: 83412

SEQ ID NO: 83429 - protein, 283 aa, Candidatus Thiomargarita nelsonii; identical to SEQ ID NO: 83413

SEQ ID NO: 83430 - protein, 394 aa, Candidatus Thiomargarita nelsonii; identical to SEQ ID NO: 83416

SEQ ID NO: 83431 - protein, 252 aa, Candidatus Thiomargarita nelsonii; identical to SEQ ID NO: 83417

SEQ ID NO: 83432 - protein, 111 aa, Candidatus Thiomargarita nelsonii
  MOD_RES (92)..(95): Any amino acid
MHPIWQQHVLVDLMATFPKAQFIVTTHSTQVLTTIKPEHIILLTRQNDNIIAEQATSSYGAESGRLLVEIMGVNERPPANKFTELLGKYYDXXXXWNPVKYPLPTNFHIGF

SEQ ID NO: 83433 - protein, 282 aa, Candidatus Thiomargarita nelsonii
MKKVKPIDTVSAGLQRFLKAKPPEKRDKADWNAFKNEENEAYRQLIQALTDIQHGLCAYCEINLTENDHQIEHFHPKSDISPETDWMFENTNLFAACKGGTQTNLFGSKTRHPDQTRYLPPIKKNRSCGEAKDDEVMDDEIIKPSELPISPALFSITRKPPQGIVNKVKVGALKVNEKACIQAGIDPKKVAATIDTFNLNCERLCLARKTVLEKLEEDFELELANLGENPSDKEIKSVLEKMAEYSLGVNQDGTLPAFFTTIRVFFFPIAESILAQIPQNWI

SEQ ID NO: 83434 - protein, 266 aa, Candidatus Thiomargarita nelsonii
METTDSRQIIQSIATQKMKQAIELSQNNQKQAEQYNRVIQEIEKAIEEMVGWDIKFKLEAKPFNLFLEIDQKRLEFDVLPDGLKSIISLLADLIRRLDQIVWIDDCNVLEHHFILFLDEIDIHLHPAWQRKILPVIQKIFPNAQIFVSTHSPFVVGSVSDAYVYTFQLKESGVSILDKVENSQAGNSYSMILEDIFGVEESFDDETEAEFRQFYQLRDDIMHGDDEKINEWLQIARHLMEKGIEVTDIVGMELRQMSRILKKDLSI

SEQ ID NO: 83435 - protein, 198 aa, Candidatus Thiomargarita nelsonii
MMKLTRPPKPAYLDGYKEWGRKYALKKQQGLKPKWHKKIKQWERLKKDLAELTADHCSFCDSYPLAAKNKQTIEHFRPRSSYPKLAYVWHNLFLCCETCQTAKGDDFKKNLLKPDAEEYEFNRYFIVNFKTGDIEVNTRGSKKDQERAKITIRIYGLNSYGRPKARADHYNWVKNQVRKKKLNKDKDIDILSYRFMFV

SEQ ID NO: 83436 - protein, 551 aa, Klebsiella pneumoniae
MTKQLERKAKGGSLLSAFELYQQEKNNNLHDLNNKSDQWFELCWNYLQQPAHDGNLDIYHPENQFCLRSMSFTDFRRFPQLDINFEEDLTIIIGNNGQGKTSILYAIAKTLSWFTANILKEDSSGQRLNEYSDIRNDSDNNFSDVSSNFFFGKGLKNISIRLSRSTLGASERRESIIKPAKEVADIWRIINERRMVNLPIFALYSVERSHPFSKPAKESIEKREDRFDAYNHALTGAGRFDHFVEWFIYLHKRAEAQGASAIELLEEQVNHLKQSVENGLTSMVPLLEETQKKLLTAQMRKESLQSVNMLTETAQMDIVSRAITTVVPSISRIWVETASGADIIKVTNDLQDVTIEQLSDGQRVFLALVADLARRMIMLNPLLKNPLEGRGIVLIDEIELHLHPKWQQEVIIVLRTVFPNIQFVITTHSPIVLSTTEIRCIREFKQNSESGELFLDSPPIQTKGSENSDILEQVMGVLSTPPNIAESYLVSNFEKSIIDDSEELSAESRRLYNKIISHFGQHSSELKKADSLIRLHRMKNKINKAKREKDS

SEQ ID NO: 83437 - protein, 215 aa, Klebsiella pneumoniae [sequence omitted]

SEQ ID NO: 83438 - protein, 413 aa, Klebsiella pneumoniae
MKKHIEKINYQPKHASGEINIHLAGRDLIITGGNGCGKTTFLNAMNKYIQHTYVEKKHDAKERLLQNLAHWQNQMDQNPKGTSQYAQSEEQCKYALRELNEYDTGVELTIPDTIGFCALLDEGKAIYKYFIAERKSEINASSGATKASLDDKISNNKFQINAQRLGSEFENHLVNLKTRQSFAETYDKDFELASKLQQWFNELEKNISILMEDDSFELKFDSDGFNFLLTQDNKAPYTFQSLSSGYSSIFNILSELIMVAEAYKTSPQDMQGIVLIDEIDAHLHVSLQRKILPFFNSLYPNIQFIVTTHSPFVIGSLDNAVVFDLSSKQEFTDLSNYSYEAIVEGLLGVPVVSMSLEKDIKRLSGLLSENTPDVAAVTELVEKLSPHNDKLDDESAVFLIKAKMFLRDDRKGV

SEQ ID NO: 83439 - protein, 219 aa, Klebsiella pneumoniae
MFQVLKTMPAPASLENKVSYSSKDVIEQLASDFHNKCYICEIKDPISLNVEHFEPHKSIDNEKKYDWKNLFFACARCNNIKRSKYDDILNCTSTDIDVLMAVKHEFPVTAHAKKVNITAMLDDEKTKMTASLIDEVFNSESTGNKELSRTYLLKRLIAQYRKFLELLFQYEDEDTIEEERIIVEKRIKNMLKVEYEFSAFLRWAIIDSPKLHHLRDGLF

SEQ ID NO: 83440 - protein, 416 aa, Vibrio anguillarum; identical to SEQ ID NO: 81400

SEQ ID NO: 83441 - protein, 229 aa, Vibrio anguillarum; identical to SEQ ID NO: 81401

SEQ ID NO: 83442 - protein, 584 aa, Vibrio anguillarum; identical to SEQ ID NO: 81398

SEQ ID NO: 83443 - protein, 291 aa, Vibrio anguillarum; identical to SEQ ID NO: 81399

SEQ ID NO: 83444 - protein, 384 aa, Acinetobacter baumannii LAC-4; identical to SEQ ID NO: 83046

SEQ ID NO: 83445 - protein, 246 aa, Acinetobacter baumannii LAC-4; identical to SEQ ID NO: 83047

SEQ ID NO: 83446 - protein, 553 aa, Aeromonas salmonicida subsp. salmonicida; identical to SEQ ID NO: 81450

SEQ ID NO: 83447 - protein, 287 aa, Aeromonas salmonicida subsp. salmonicida; identical to SEQ ID NO: 81353

SEQ ID NO: 83448 - protein, 553 aa, Aeromonas salmonicida subsp. salmonicida; identical to SEQ ID NO: 81450

SEQ ID NO: 83449 - protein, 287 aa, Aeromonas salmonicida subsp. salmonicida; identical to SEQ ID NO: 81353

SEQ ID NO: 83450 - protein, 440 aa, Vibrio parahaemolyticus
MKIKTLKLTNYRAFDELELDLDPRLTVLVARNGAGKSSILDAISSNLGAFLTRLPGVSGHNPKDSDFRVTESGEKPPFMRIFTRSFDGVEWDRTERRDKTKKTQALIPDGVGIKALNEYVDQFIDAQNEGNDYELPVFIYYGTGRGVFDIPQRKRGFGKKFPRFEALSGALESRTNFKRFVEYFYFLENEENKLQKEHRSFDFEVPELKAIRLAISRMMPQFSNPRSAAPAGLMLDWEHDGTTSQLRIEQLSDGYRTTLAMVMDIAARMAEANPEMQEPLETGGIILIDEVDLHLHPEWQREFLPKLLNTFPQIQFVVSTHSPFIIQSLNDGKLVDLDHVQTNFNKSLKKEQSIEDIVENIMGVHLPSRSARLQKMYTVAQEYYALLDNAEKYTEEEIESLKHKLDKLISPFSENVAYHAFLERQRIKAGVISSEEREAD

SEQ ID NO: 83451 - protein, 232 aa, Vibrio parahaemolyticus
MRPVHRGDVPEDNEGNPKEYTEYTNARKDLISRIGEYCSYCEMELDTSLAIEHIRPKAHHSHLELKWDNFLLACTNCNSTKGDKDPNPNDILWPHLDNTFRAFEYTTEGRVKPAPGLSAALKRKAEDTIALMGLAAAPDTQKASDRRWLNRQEAWQDAILSKADLAEADLPAMRRQIVRTAKAKGYWSIWMTVFHDDPDMLRRFIDVDNFPGTAQDCFDINGLPILRTNGKL

SEQ ID NO: 83452 - protein, 426 aa, Microcystis aeruginosa NIES-44
MKIKSIKLINYRGAVSLNIDFHRQLNVFIGVNGAGKSTILDSLAIMLSWLVNRLKNTNASGRQMSETEINNGQGTAIIEITGVTEDSQEITWKIVKTRTGYIHAGERSNFSQLNEYTQQIQRQITEHQGQINLPLFVYYSVNRAVLDIPLKIKTKHQFDSLSAYENALTSGSDFRTFFEWFREREDLENENRKYQDYLIKPEGFCFPDPQLEAVRETIERFLPDFSNLSVRRNPLRMEVTKKNEIVTVNQLSDGEKCLIAMLGDLARRMAIANPQNPDPLTGNGVIIIDEIDLHLHPQWQRFVVPKLLEVFPNCQFFISTHSPNIITHVQPESLHFMEQTEMGIKFHPVQESYGKNVDRILEDLMGLETTRPKEIAEALKDIYEQISQNQLEAAKNKINDLRAKIQDDPELIKAEVIIRRKEIIGK

SEQ ID NO: 83453 - protein, 210 aa, Microcystis aeruginosa NIES-44
MKYIRKRQEPPEFKNWKEQANSDWQPDFKNLAGKPKEILIKALMTEQGEICCYCENRLIDGKCHIEHFKPQSDPTVDPLDYANLLCSCQANLTPSEFRYCGNLKNNWFDENLLISPLNPDCESHFAFNDDGAIKPAQEDDQKAINTIEKLGLNLNKLKALRKAAIDPFLDEEIDNDELKFFVNGYLCLDDQQRYKPFWTTIKYLFSDLIE

SEQ ID NO: 83454 - protein, 457 aa, Microcystis aeruginosa NIES-44
MEIQRVILNNIGLFEKLEISLAPTEQNPSNITVFVGNNGAGKTAILKALATSLSWFTARLLTEKGSGNPISEDAIFNTANAGSIEIEVWDSSNSLNNPDQSDIDHYFRWILAKSRKGRKAQYNSNLNDCTRLANRYRDALTHDDKTSLPLIAFYPVERVVLDIPLKIRTKHTFLQLDGYDNSLSQGVDFRRFFEWFREREDTENESGVPEDVLNQLRPIMAETNQDLWQWLNERNASAKDRQLTAVRTAIGRFMPHLDNLRVRRKPRLYMAVDKNGETLNLAQLSQGEKSLMALVGDIARRLAMLNPALENPLAGDGIVLIDEVDLHLHPSWQRRLCERLTETFPNCQFVLTTHSPLVISDCKNVLIYTLANGELRQLPSQYGQDANTVLLDVMNTSIRNEKIDTELNDLLDAIQDSKLTEAQQLLAELSEELPANHLELVKAKLLLRKQELRHGNH

SEQ ID NO: 83455 - protein, 214 aa, Microcystis aeruginosa NIES-44
MRTISKGAEPCCLKAWKRKNPHGAYDDLDKTEEGKVVRAKIRDYALNEQFYLCAYCCQRIEKINACHNEHIEAQKLNPKRTLDFSNIVASCNTPNQCGDAHKSQHLPLTPLMTECETELRFKISGRVEGLSDRAADTIRVLNLGDHEKNNRALIETRKQLSNVLLWENGINPDDGLEDDEILNILIDDLSQPQQDQMEPFTPVVINILRSWLQA

SEQ ID NO: 83456 - protein, 474 aa, Microcystis aeruginosa NIES-44
MWPNKLEFYRSLLSSGGMSMWVESITLENIKCFQNQEIKFIRNPNNQRHWRAKPYHWITLLGENGVGKSRILQALALLLAGPEAAKELLPRPTGWICNPKTPGKLTAVLHQEDGDAGKFGTDKTRKTFAYSYFVTGKERLELGASKDKQTYTEPALIEENSKILGWLRANAFASDNHGWFAVGYGAFRRLTRVSQVIIPSLEPPQRSSNFFSQFHEDTSLSSFERWMVYLDYRIAKNPEDSKSKQMKKIGEEAITKLLPGNVEIAEVTADALIQFLVNGQKVPTISLSDGFRSMIALAGDLIWRLLQSFPNLDNPTEASGVVLIDELDIHLHPSWQREIAGWLQEVFPKLQFFVATHSPLIAAGAGPNSLTLRIDLVAGESEIVEIPYKELAANVDRTLTSSAFGLKSTFPTETENKIKRYHQLNRKNKNLAAEEKQEYEQLSLFVREVKPFGEISQPNSLESRIDALLEERLS

SEQ ID NO: 83457 - protein, 229 aa, Microcystis aeruginosa NIES-44
MIPVTRISEPPVLAKNAARWLEALESIKSNNKATKADINKAQNKYRHPQVKEALVKMFNGKCAYCESKIIVVTSGAIKHFYPKSQYPDLTFTWENLLLSCDKCNDANHKGTNFPLDDITGNPLLIDPTDGVTDPNAHLEFVWDEMAKLASVYGRDRRGQIVEDLFDLNGMRGRKELINYRSQYIKRLLALLRFAKQGDSEALSLLQEACQPGAEYYAFASIYILPHLPP

SEQ ID NO: 83458 - protein, 582 aa, Klebsiella pneumoniae; identical to SEQ ID NO: 83298

SEQ ID NO: 83459 - protein, 285 aa, Klebsiella pneumoniae; identical to SEQ ID NO: 83299

SEQ ID NO: 83460 - protein, 484 aa, Vibrio vulnificus
MSFRILGVSIDGMKYKLSYPTRHKENFITVMTGKNGSGKSRILEFISRNFVVNDDFLRYYPERWDDGLLESNKLAGSYHANSMHYNSSGINVYSEIIHKDLAMAFDIDHFVENRYDLFPSKLICLSTSPFDRFPSNKRSLKWMSSNQDIEVKNSIYTYIGLKNSSSISVKSMITNVIDTILKSPVKIKNNVGVIRDTLSYLGYGKRIRLTFKTAIQSGYLLHDDMENVMSKVESMNEMLSSRDLREISDSIRILRDKHNSKTEQFSVSMNLVADELFNDDYISSIRVLLNNDMIKILSFKLSLKEDNRRFITFHNASSGEQCLALMMLGIASVIEDNALICIDEPEISLHPEWQEEFIPMIRESFSLYSGCHFIVATHSPLIVSKLDSDNCIVLDLDKNVLIDDFNTNEVSSDYQLATIFKSPGFKNQYLINECLDVLSQLSLNIDNNVNLARRADKLIEIEDVLDKDDPVLSLISIIKKVVRV

SEQ ID NO: 83461 - protein, 211 aa, Vibrio vulnificus
MIGKKVEYSKAENDLIKEYLQQGNISGDDWSHKRFEAIKDTIKKHYKNEQEYTCPYCKIKYPVTHGMVWDIEHIIAKDSKPNFMFEPLNLCVSCKDCNGSKSNTEVLVNKKRKTFPKKNTDYKIVHPHFDVYDEHINAIVPGDFYRALSKKGEFTIIECRLLRFYGTVNKEQPDQEINDLAKALINAEGFARELIERELSKKLEEKAKKAP

SEQ ID NO: 83462 - protein, 846 aa, Vibrio vulnificus
MTYRDEDLKLARSQAREIWKILNYVRGASPISNYRSLAYSIFFIRYLQSNTGQHFDAPRFDSFNLIAQYSYELINHAVHLGLIHRDVSNFLCDYLENTLHSFDNINESFVRHAIRDRLLHRSTSIASLSLSELDLLFAENEGKSRSEFYTPNDVNHLVTALGLRYQPKSVCDPFAGAGNTAFSFSNVSKERVCIDTQEVNKDAYFQLIISRVIRGIKGRDFFGDSLSQPTYQENKYDLIVSFPPFGMKIPKSSRENIYYSMRNEWLDVASILPESRSDWFITLSMLPALTERGKLLVGMSLGGLTRTGSEAKVREYLVSQGVIEQVILLPKNIHYSTSIPTVLLVLNSGLGNQNNRSVKFVDASLFYEPARGRNVLSPDNINAIVEACENDGRFSISLPPRQIAERQFNLDPSLYVRKDLKVSEVTVSNFRGYTNFKVPMHPSLNVLVGENGAGKTSILEAVACGLGPFLTAMPDAKGKLIKKSDIHVSSNGVASYARIAIETTSSLSWDLVAKGAGTSEPPKIGTAALTGYASQLVDSQSEFPLIAYYGTSRALTPTSSKVAINPFEKDIRGEGYDSALDAKVNYGIIKNWFSKIEVDELRKRDELKQHKFIHPAKRLVSEAVYQIVERATSIEFDKNSNDVVVHWKNEKDECVQLTLEQLSEGYRNMVALTIDLVRRAYLLNPASNNPLAVNGIVLIDEIELHLHPRWQQKVLNDLTSLFKNVQFIVTTHSPQVLTTVHAESIRIVSADESEAKLLTGTSTYGSESTRMLEDVLGGNIRPQHIDIVKKLNRYTELVEADQWDTDEALELKTVLYRWGGQTEAELQKLETDIRIREFERDNENHQ

SEQ ID NO: 83463 - protein, 265 aa, Vibrio vulnificus
MKTINKGAEPNRLGVFRAANPDALWDKDKKDNELIGETFRCCGARYQETQQQLRTDQGNLCAYCEQDLLSGTNGALDDCRIEHFHPKSKREQGEPNWGLDWANLLVVCCGGNQSKVVEPEQRFDTDRKNYSCDVPKDDKILDTTIFNPLNLPHHNIWKFSRTTGQMDVNESACEVQGLDTEMARQTIKELNLNSPRLMRARKMILEDLNSRITERVGRGLTIEQARSSLATSILRKNRAGDWPSFFSAIRSYLGRSAEAVLTQPL

SEQ ID NO: 83464 - protein, 484 aa, Vibrio vulnificus; identical to SEQ ID NO: 83460

SEQ ID NO: 83465 - protein, 211 aa, Vibrio vulnificus; identical to SEQ ID NO: 83461

SEQ ID NO: 83466 - protein, 846 aa, Vibrio vulnificus; identical to SEQ ID NO: 83462

SEQ ID NO: 83467 - protein, 265 aa, Vibrio vulnificus; identical to SEQ ID NO: 83463

SEQ ID NO: 83468 - protein, 107 aa, Aphanizomenon flos-aquae 2012/KM1/D3
MHIQKVIIKNFRCFEHLEVNLDPDINIFVGNNGSGKSALLDGIAAAMYPYVVQIQQIVGKKYREASPVFQRDLPVQKKDNERRNQAEFTVSTTGFPDWTIVYKKTTC

SEQ ID NO: 83469 - protein, 248 aa, Aphanizomenon flos-aquae 2012/KM1/D3
MKKVLKSPEPEELKNYKERFSSQFKRWNDLKKNKETLNAIRKTLASDQKGLCAYCEMSIHENNRSVEHFIPCRESTKENNHDLDWQNMLGICRPPGGVEDDHEQNSKLLKYSRCCGHKKDGFIPDSRLLNPLNLPTLRLFKFSSKDGEIRPDEKACEDSGIPIENVQFTIDTLELNVQRLKNLRLAVIDEIEKELDDETIDINDLEEKIAAEYFGNGTDNWPPFFTTLRWVLGAGAERHLINISYSEK

SEQ ID NO: 83470 - protein, 410 aa, Escherichia coli; identical to SEQ ID NO: 81738

SEQ ID NO: 83471 - protein, 252 aa, Escherichia coli; identical to SEQ ID NO: 81739

SEQ ID NO: 83472 - protein, 763 aa, Escherichia coli; identical to SEQ ID NO: 81340

SEQ ID NO: 83473 - protein, 308 aa, Escherichia coli; identical to SEQ ID NO: 81951

SEQ ID NO: 83474 - protein, 771 aa, Pseudomonas sp. SHC52
MQKLERPDKSPAVLRSRAAHQARQQMRDFWALDRQRRAQTSVPAIGLSSTDQRLITAVAGMSLNRCAFCEAKELLSVHRFRPAGNALPLAETSNAHLYYLWLADAWQNLLPICTSCIPRETQFPTDGARAPLPSLRQIDAYVERDDGLWPSYPPKETILLLDPARDRDFEKHLVPKLNGEIIGSSRKGETTVLVFDLNRAKRRHQRHQTYQSLIDRLLVLLREGKKFNDSPDWKLIFDFPMIEFGGTWFLLLRRIARWIAVSKVVRWKTSSNLIRAFFLRLADDGDAIYHLEAALSAIAEEDEGLRARRWSIGPMYTARTSIAAVEISNFKAIEGLQLTLGEPAARRGDLVSGRAPSLVILGENATGKSSILEAISLALTTSAARTALNVPWTQLVLDPSQLGLERVKTALPAEVRVKLTNDQSVTLTIEHGAPTVRSELGNHHVPVFAYGAFRRFLTGTRRPAPHKHIRNLFDGSTLSNPEPWLKALKQDQFDMVIRTLRDLLSIEGEFDVIQRERGSRQLRMVTSLTEPDGEIRYSRTPLHAVSSGYRSMLAMVCDILRGLLDPQVYEGFESFRNAKGVILIDEIEAHLHPRWKVQVMSSLRNALPGMTFIVTTHDPLCLRGMGEGEVVVLQRIAAIDSARESQMPIIVERMMGLPSVADLRIEQLLTSDFFQMLSTDDAAADRSLAGIADLIAARARGDELSLEDSRILADFERDIASALPVGSSEVHRIVQDTVAEYLRRRRDASSETLQRLRDDARAEILAALEAL

SEQ ID NO: 83475 - protein, 321 aa, Pseudomonas sp. SHC52
MRRVDRGSVDVPKSLLLGGAGPAELTTVKEHHNAPNPPANQNSGKKKSFTFTAYKSADIRAALEKLFYDKCAYCETVYAASAPVDIEHYRPKGAVAEDAAHGGYWWIAMDWDNLLPSCIDCNRKRGQVLVEPSSSLAVLAANVKPAVTQSGKKDSFPLAVTGVRAMGEEAELEDEQALLINPCCDDPATSLMYSFDPAHPAGLVVPTGELDQQVRGAVSIQIYGLNRLKLVQDRTRLLRRLEFLGDLVIDLASSITELEAPAVQRALQGTSAENVASRLRLLRDRTLAEIKSFTKDDAPYSSMASAWLEQFKARIRPVTPV

SEQ ID NO: 83476 - protein, 439 aa, Desulfosporosinus sp. BICA1-9
MPNNEFYIKQITLKNFRGFDDRTFELAKDFTVFVGDNGKGKTSVLEGMCVALGGWVRGFMSSAKDFRNIYKNDVRSIKSVVSAKGLIKQYPVEVACLGEINGLEIEWSRELDEKGHTKTGGLKDLSEVTKKIAKKVNTANDIDVILPVIAYYSCLRASKDRVSNTGIDSTSRVYGYSGSLLKETKYFKMLNYIQELRYEYLEDPHNTQMYIMLMDALTKIVESAAGKGSRVDFKVKHGELMLEHINGELIQFSELSDGYKGMISLVADIFFRMAKLNPQLKQTLLLETSGVVLIDELDLHLHPKWQRQVVGDLKKIFPKVQFVATTHSPFIIQSLGEGELVTLDGTNLEDYVGASIEDISEEVMGIEMPQYSAHKLEMYKSAFEYFSALDGLKQFDEAKLKDLKLDLDILSKRYGDNVAYYAFIEQKYYAKKAELEARR

SEQ ID NO: 83477 - protein, 229 aa, Desulfosporosinus sp. BICA1-9
MRPVHKGDSPYLTINHYSEAQEFLLERLGYYCSYCELPIKHVPHVEHVECKHRGGSETNWNNLLLACSHCNSSKSTKIGLGERDTRIWPDEHNTFLAFKYVGALPEINEEYLRTQEAGLLSKARRLYEILDLGYYPGIAGREPKKDRRYKFRNEALGIAEESLITWNEVKNTVYCERVKRSIINLAKAIGFFTIWMKVFNNEPQIKTILIDEFPGTEKEYFDEYGEAVG

SEQ ID NO: 83478 - protein, 447 aa, Desulfosporosinus sp. BICA1-9
MILKSITIENFRGIKHNTFDFDNKFNLIIGNNGMGKTSVLEAIAIGLGGFIVGIDGITTIHFTPDDVRSIGHLVGDGSYDIEYFTPTVVRCIADFADEEIVWNRSKSSQKKTTRTVTTKNISKYATTLTKNKNNVFPVISYQSAGRMWTQKRDKWEDVFTVNYMRNVGYTHCLASESNISMLTNWCQRMERIAYQKKTELAEYESVKKAVGKFIGVLENTDINSTIFYDERTGELVYFSNGEALPLRFMSAGYRSLIGMVADIAYRMAILNPDLRRDVTEKTPGLVLIDEIDLHIHPKWQWRIVEALMQTFPYVQFIATTHSPVVIASCKDKKIISLFDSDTSTPIIELDTKYIKSPYGWRVNDVLNTFMGVDERSPEVKPQLEEIKQLSFKKIKNQLSDEENTKLNQLKDDVYSNLPQNDAAVELAELGSIEDILKERGKRNAQSR

SEQ ID NO: 83479 - protein, 149 aa, Desulfosporosinus sp. BICA1-9
MFEGQCCFCESPIGVQVFERIEHLMPKSKFPHLCFEWCNLNYSCEVCNSKKYKGDKWDDENPILNPTFDEIKNYLEIDIETAKILSINNDLRAKTTIEHTGLNREGLIERRRDIVNKLKELLRIAVKAGAVEDFKDIKNQCQRVGDIHF

SEQ ID NO: 83480 - protein, 476 aa, Pseudomonas putida
MFRLIHVLKPSNQEFVAPSTGGATPFKSVIVGGNATGKTRFIVSLIESFRLLSEAKEQHGKFSTVKKKGAITEQLQFKYYINGDLVECVAGDFGVGFTVDGEEGSAFDLPLPSRVLAISSTVNDKFPFADSDEDDFYRYCGVRETSNASWTATLSRRTIENLLNIPLRHHHHSLDELFKYLGISPTIEVTFSLKNLQNFRELVADPGTLMLAVQGYSNQSSRLQVQMFRNFSYEDAARACSGLANREFTGRNNSVIIDLSDTLADYSDLYFGINVFRRIGMISDVELNIQKFNTKKSFGFGHSSSGETQLLYTFSSLIRHAKPNCLIFIDEPELSLHPSWQIKYVALLKRALASFPGSHVIIATHSHFIISDLEKETSSLHVFENKDEQLCVRNVEYSTYAWSADHILYDVFDVRTVGNLAFESDLAEALKLISSKPKDCHRLVQLKKKFERLVFNESDPLHRVIKNIAEIVNAHQ

SEQ ID NO: 83481 - protein, 209 aa, Pseudomonas putida
MPISEWYLNITELPAFDQATVDYLEGLKPHKAEQWDIKTNRMKAYKASLLEQLLKIQNNRCVYCGTGLMRQLVDREHFAHKDQKGGWPEFMFLTENLFAACGYCNRMLKGTKPMIKLYNENYKKCKFHLVHPYFDTPSKEIAFVKKGGSDAIFVEKITNKGKNTITFFGLDSAAAIARRAGYITEIKIYEQLTAENAAEVKEISHYRPS

SEQ ID NO: 83482 - protein, 454 aa, Dickeya solani
MIHELSLANVGPASTMHLTFGNRLNLLTGDNGLGKSFLLDIIWWALTRRWPAEVNPKLVAGKKALPAFGLAGEEASIAFSFAGKVKTERYESHYESTYARREQSWTGRAGRPTNPGLVLYAMADGSFAVWDPHRNYWRTQDGIDVQERVPAYVLNPTEVWDGLPGDERSWLCNGLIRDIASWQKEKGAAFKHLNAVLKVLSPSITEVLSLGELTRISLDDVREIPTLRMPYQKDVPVLHASSGMRRILALAYFLVWAWEEHQRAASIVGEDVSPQITFLIDEVESHLHPSWQRSIVPALLKVMGKLNAKAQVQLITTTHSPLVMTSVEPLFDGSRDAWFDLDFLHGAVVLERREFEKHGDVTNWLTSEAFDLKSGRPLEYERLVEDAAKLLNKSDASEKELDAMYQQLLAALDVKDEFLFRWRFIRGKKANPEQNNKKIKKGRKDDSGGVTGGA

SEQ ID NO: 83483 - protein, 203 aa, Dickeya solani
MIPVVLQAEPDDFDVEVRQRGHNWLSKKGIALNAPPPKASDLPNYWTHSNYSLWESYCGVCAYLAIYFEWVTGASSTDHFVAKSHNAGDAYEWNNYRLSSLGPNRNKNDFDDVLDPISLQPDTFVINFLSGEISPNYALYPNASPYATQAESTISRLRLDSQEHRRMRTRHFEKYINGDWSLDSLKDDSPFVYAEIVRQGLTR

SEQ ID NO: 83484 - protein, 465 aa, Salmonella enterica subsp. enterica; identical to SEQ ID NO: 81578

SEQ ID NO: 83485 - protein, 198 aa, Salmonella enterica subsp. enterica; identical to SEQ ID NO: 82591

SEQ ID NO: 83486 - protein, 465 aa, Salmonella enterica subsp. enterica; identical to SEQ ID NO: 81578

SEQ ID NO: 83487 - protein, 198 aa, Salmonella enterica subsp. enterica; identical to SEQ ID NO: 82591

SEQ ID NO: 83488 - protein, 469 aa, Salmonella enterica subsp. enterica; identical to SEQ ID NO: 82612

SEQ ID NO: 83489 - protein, 198 aa, Salmonella enterica subsp. enterica
MTLLLNEQYHLCCYSEIRADLRGLGYHIEHVENKSQQPGRTFDYQNLAASALDSENGLPQLGINAFGGHAQGKNKSVDMAKFIHCHLPDCSRYFAYLSNGHVVPSIDLTEQEAEYAQYTIDHLNLNSGFLQTERRNHWEELEQLFDEHIEKVWDLQQLLQLDLVPTPDHKLHEFFSFTRQFFQQEAEQVLQDYAPELM

SEQ ID NO: 83490 - protein, 465 aa, Salmonella enterica subsp. enterica
MRIDKLSLLNFRCFRQLDITFDEHITILVAPNGAGKTAVLDAIRLALFPFIRGFDASLYVKDKSLAIRTEDVRLVFRPEALNMEMSSPAMITATGEWESGKTATWMLDKRGEQPPHEDKTAAQLTRWGEQLQTLVREEHNLQQVELPLMLYLGTARLWYQERYEAQPTEQRLDNSVFSRLSGYDDCLSATSNYKQFEQWYSWLWLSYREHQITQLESPSAKLKEGVRVQRMKEAIQAIQQTINCLTQEVTGWHDLEYSSSHNQQLVMNHPQHGKIPLSQLSDGLRNAVAMVADIAFRCVKLNPHLRDEAALKTQGIVLIDEVDMFLHPAWQQQIIQSLRSAFPLIQFIVTTHSPQVISTVKRESIRLLEQDENGNGKALMPLGATYGEPSNDVLQSVMGVDPQPPIKEKADLQKLTAWVDQGKYDEPEAQQLMAALQVALGDQHPQLQRLQRSIARQNMLKGKAQ

SEQ ID NO: 83491 - protein, 198 aa, Salmonella enterica subsp. enterica
MTLLLNEQYHLCCYSEIRADLRGLGYHIEHVENKSQQPGRTFDYQNLAASALDSENGLHLFGINAFGGHARGKQEAVDMANFIHCHLPDCSRYFAYLSDGRIVPADELNAQEMERAEYTIDLLNLNSGFLQTERRNHWEELEQLFEEHIEKGWDLQQLLQLELVPSPDHKLHEFFSITRQFFQQEAEQVLQIHAPALI

SEQ ID NO: 83492 - protein, 465 aa, Salmonella enterica subsp. enterica; identical to SEQ ID NO: 81578

SEQ ID NO: 83493 - protein, 198 aa, Salmonella enterica subsp. enterica; identical to SEQ ID NO: 82591

SEQ ID NO: 83494 - protein, 465 aa, Salmonella enterica subsp. enterica; identical to SEQ ID NO: 81578

SEQ ID NO: 83495 - protein, 198 aa, Salmonella enterica subsp. enterica; identical to SEQ ID NO: 82591

SEQ ID NO: 83496 - protein, 465 aa, Salmonella enterica subsp. enterica; identical to SEQ ID NO: 81578

SEQ ID NO: 83497 - protein, 198 aa, Salmonella enterica subsp. enterica; identical to SEQ ID NO: 82591

SEQ ID NO: 83498 - protein, 465 aa, Salmonella enterica subsp. enterica; identical to SEQ ID NO: 81578

SEQ ID NO: 83499 - protein, 198 aa, Salmonella enterica subsp. enterica; identical to SEQ ID NO: 82591

SEQ ID NO: 83500 - protein, 465 aa, Salmonella enterica subsp. enterica; identical to SEQ ID NO: 81578

SEQ ID NO: 83501 - protein, 198 aa, Salmonella enterica subsp. enterica; identical to SEQ ID NO: 82591

SEQ ID NO: 83502 - protein, 477 aa, Pectobacterium carotovorum subsp. brasiliense
MKLDKITLKNFRCYSSLEIDLHREMTVLVANNGQGKTSILDAIRVALWPFVSQFDLANTPYKDPANTITIDDVRIIKATRSPSATGSGALDTMVRKLPSSVSAIGDYGQGTVEWQRFRDREAAKSQTKDDKNCRELKAFARNLQRQAREHDQEPITLPVFGYYGTGRLWKEKRLTEFKRGQNGNDENIRTFALRDCLDPASSYRQFEDWFTDAYKKVLEYQIAQLQQGETFIEVDPKLKSPVKVVQNAVNEVLKPVGWKNLQFSQRDDESLVLRHDKYGVMKADRLSDGIKNMLAMVADIAYRSVLLNGHLGEEAAKKSPGVVMIDEVDMHLHPQWQQTVIGSLKHAFPNVQFIVTTHSPQVLSTVSAECIRVLKHDVDPDTGEIISIAERQENQTIGTSSSDILVDYQKVNPIPPVKEASWVVEYTALIETGMHDSEKGKALRQKLIEVYGQSHRVLLDADKLIRFQIFKKKNTKS

SEQ ID NO: 83503 - protein, 228 aa, Pectobacterium carotovorum subsp. brasiliense
MHKLNRNIVESPARLNHYDHQLHSWSDLDSECKKQLRAALVKMHGIPDVTTEDASEYGVRCAYCEGAIHHEGHIEHFRRKNQSHFPELTFEWTNLFLSCGSQEHCGHYKDRPKGAGYNADCLIKPDIHDPDTYLFFHSSGQVEPRSGLGNTDRQKANETICVFGLDRGTLPSERARAVKAYKDTVLNELDEILSWEPELRADYIQNEIEETQWQPYSTTIKHFLSSNF

SEQ ID NO: 83504 - protein, 487 aa, Pectobacterium carotovorum subsp. carotovorum
MKIKQFKLHNVGRFASLDAPIAPTADYPSNVTVLVGNNGAGKTSILQALATSLGWLVARIRSEKGTSATISESTITNRQPSAAIEIAVHGGTQHLESGEEKEASYSWTLAKARSGQKGQHVSQLNDLSALADRYRTALTENDQSSLPLIAFYPVERSVLDIPLKIKGKHRFQQLDGYDNSLNQGVDFRRFFEWFREREDIENEDGEALAFLRMMEESPERVSRILNDLENVPERLNKIETGRFKELSGEIKKLSDAFQLMSEIKDTSKDPQLTAVRSAIAAFMPDFSNLRVRRKPHLYMSVDKNGETFNVLQLSQGEKSLMALVGDIARRLAIMNPALDNPLHGQGVILIDEVDMHLHPSWQRSIIERLTTTFPHCQFILTTHSPLVISDSKDVLVYSLDDGKLTEVPSQYGQDANSVLLEVMDTHIRNAHIASKFNDLLDLIQRKQLAQAKTLLNELTEELPPTNLELTKARLLLRKQELRGEKNN

SEQ ID NO: 83505 - protein, 210 aa, Pectobacterium carotovorum subsp. carotovorum
MRRITKGTEPVSLTAWKRANPTGRYDDLIPVARQDIREACTKEQFGLCAYCCRPISGDHQDTMNEHVQARNSAPQRSLDFTNIVASCKTPNQCDAAHGSQSFSLTPLMAACETELQFMISGRVTGTTSRAQDTIRVLNLGDSETHNKKLIETRKQAINTILWMNGIEPDEGLEDDELLQSIINDLCTPKNGLLEPYAPVLVNILRGWLSV

SEQ ID NO: 83506 - protein, 479 aa, Pectobacterium carotovorum subsp. carotovorum
MKIKQVKLHNVGRFASLDAPIAPTADYPSNITVLVGNNGAGKTSILKAMATSLGWLVARIRSEKGTSATISENTITNRQPSAAIEITVHGGAQHPEPDGEKEASYSWTLAKARSGQKGQHVSQLNDLSALSDLYRTALTENDESSLPLIAFYPVERSVLDIPLKIKGKHRFQQLDGYDNSLNQGVDFRRFFEWFRLREDIENETIPSLTDTISNILNSNPEQFISQALDPDDNKDIDIKAEVTKLKNVLSKLKLSEKSNKDPQLDAVRHAIYHFMSGFSNLRVRRKPRLHMSVDKNGETFNVLQLSQGEKSLMALVGDIARRLAMMNPALDNPLHGQGVILIDEVDMHLHPSWQRSIIERLTTTFPHCQFILTTHSPLVISDSKDVLVYLLDDGKLTEVQSQYGQDANSVLLDVMDTDIRNAHIALKFNDLLDLIQRKQLAQAKTLLNQLTEELPATNLELTKARLLLRKQELRGERNN

SEQ ID NO: 83507 - protein, 210 aa, Pectobacterium carotovorum subsp. carotovorum
MREITKSVEPACLTVWKRANPTGHYDDLTPAVRQDIRDACTKEQFGLCAYCCKPISGGSHDTMNEHVQAHNSAPQLSLDFTNIVASCTTPNQCDAAHGSQYFSLTPLMTACETELQFMISGRVTGTTSRAQETIRVLNLGDNETHNKKLIEIRKQAINTLLLRDGIDPAKGLEDDELLQSIINDLCIPKDGMLEPYAPVLVNILRGWLSV

SEQ ID NO: 83508 - protein, 477 aa, Pectobacterium carotovorum subsp. carotovorum; identical to SEQ ID NO: 83502

SEQ ID NO: 83509 - protein, 228 aa, Pectobacterium carotovorum subsp. carotovorum; identical to SEQ ID NO: 83503

SEQ ID NO: 83510 - protein, 479 aa, Pectobacterium carotovorum subsp. carotovorum
MKIKQVKLHNVGRFASLDAPIAPTADHPSNVTVLVGNNGAGKTSILQALATSLGWLVARMRSEKGTSGTISESTITKRQPSAAIEIAVHGGTQHQKSSEEKEASYSWTLAKIRSGQKGQHVSQLNDLSALADRYRTALTENDQSSLPLIAFYPVERSVLDIPLKIKGKHRFQQLDGYDNSLNRGVDFRRFFEWFRLREDIENETKPSLTDTISNILDNNPEQFISQALDPDKNKDIDIEAEVTTLKNVLSKLKLSEKSNKDPQLDAVRNAIYHFMLGFSNLRIRRTPRLHMSVDKNGETFNVLQLSQGEKSLMALVGDIARRLAMMNPELDNPLHGQGVILIDEVDMHLHPSWQRSIIERLTTTFPHCQFILTTHSPLVISDSKDVLVYSLDDGKLTEVPSQYGQDANSVLLEVMDTHIRNAHIASKFNDLLDLIQRKQLAQAKTLLNELTEELPPTNLELTKARLLLRKQELRGEKNN

SEQ ID NO: 83511 - protein, 210 aa, Pectobacterium carotovorum subsp. carotovorum
MRRITKGAEPVSLTAWKRANPTGRYDDLTPAARQDIREACTKEQFGLCAYCCRPISGDHQDTMNEHVQARNSAPQRSLDFTNIVASCTTPNQCDAAHRSQSFSLTPLMAACETELQFMISGRVTGTTSRAQDTIRVLNLGDSETHNKKLIETRKQAINTILWTNGIEPDEGLEDDELLQSIIDDLCKPKNGLLEPYAPVLVNILRGWLSV

SEQ ID NO: 83512 - protein, 505 aa, Pectobacterium carotovorum subsp. carotovorum
MDIIIVPREQRIPASGISTAYLHVDRWNDFSFITMFYMYLFDQNGERHEIGNIKIGFQGQTTEKSTYSTLGSKLRILPEGYFSVGQDVDYYQKISNLPESVKVSLLEALKDIAYAPELIDLVKDEEVFKTSLLRYVSLSVIKGQFARVLEGKNPLTNFEFKFIRPAQDKISDIELSFKVKVGEKPSTNIHAIIGRNGVGKTTILNGMIEAVTSKGTSNAKFYDLEGWSDDPIDNDYFSSLVSVSFSAFDPFEPPSEQPDPSKGTCYFYIGLKKKGESLKGLNDIHEDFLQALTLCFSQIPKRERWLQAIDTLESDENFANMELKNLAGYNGEMLVSNARKRIKRMSSGHAVVLLTLTRLVATVEEKTLVLIDEPESHLHPPLLSAFIRALSDLLLDRNGVSIIATHSPVVLQEVPKRCVWKINRSRLSTESRRPDIETFGENVGILTREVFGLEVVKSGFHDLLVRSVKSGGTYEEIVDEYRNQLGVEARALLKALVTHRDRSVK

SEQ ID NO: 83513 - protein, 285 aa, Pectobacterium carotovorum subsp. carotovorum
MLKLKQPAYTYADMLTSCREGITGNPGLLLKVNEAITDLQTLAASYSASALTGELYTIQPLQNKDEEDPIVVGRLNKSDFVKLYGNYVVGKKKPARTIYDALMTAANEKCPFCGGIGRPRNLDHYLPKAHYPQFSILPVNLVPACRDCNMDGKGEAFARNEAEQIIHPYLDDSRYYDEQWISARYLVGKNDEPGVIEYFVSPPADWDDAHKQRVEKHFNDFDLSLRYSKEAGARLVVLLALYNSVLPFFGDKNAAKDLIFQTIISNSPFVNHWERVMCLALMSDL

SEQ ID NO: 83514 - protein, 467 aa, Pectobacterium carotovorum subsp. carotovorum
MSYIKTINFSAHAIFNTSEVRLKNKRRTEGSNFITLIIGENGTGKSEFLKEIVEYFRLREQSKGKAISKFIRIDTPIDKNTKWPEKLIASSFSLNDKFPFLNKDAEEKNKGFYRYLGIRTASNNAFTGKIRDELFHCMVKIGANPSRLRIFKEIINDFGLPLNYKFDFSQSRGVEELFENSRQKSIVTLSTIVKEMVDSFKISNRFAPSTLIKMQDDVILKNDVLRKINKTFKDTEKNISINFDLDEMLKVGLPKNAHEVDYVLKSRLITLTDFSPGGNIKFQHLSSGQFHLLKSIITLMAELEDSSLILIDEPEISLHPSWQINYMSVLNKMISQFNNCHVVVATHSHLIVTTLPLKNSDVIVARKSKINGQIFFSSLDGSPSGWSADMILYSVFGVLNKNNQSFDYDVKFVASSMSNWTQTSENIKKLREAVLRLSQYKLPDADPLSKFIVQSEIFLSKVENETL

SEQ ID NO: 83515 - protein, 227 aa, Pectobacterium carotovorum subsp. carotovorum
MRLYKFVKPLQAFILTGSEVALANKCNLLGAKSWKSNASELNTFIRGDIKARDALKKKIKTTLKGYQENHCFYCGIHFSLLKNENSNVHIDHFYPKGAEHGNYEKFVFEMNNLVLSCCLCNGLGVKGENDYGINNSESILRIGSTIIHPYFDNIDEHFFLNENTGVIEFINIDKSKAIKTEEVFRLNSPAQIRARLGDILVELHDSGRSLSERITDSIGLCGRVALN

SEQ ID NO: 83516 - protein, 451 aa, Arthrobacter sp. W1
MHITRLDLQSYRRFEQFSIELDPKLTVIVARNGQGKTTVLEAVVAALGPFVGAFDEGRGHHLQQSDVHRKTTSEQWPANEPQYPVIVSAELARDGDSNIEWSRRLNSGKKGSKTTVKEAAPLVSWGKTLQNDVREGIPIDLPVVAYYSSNRLWLSNMNRRSRSSAILTKSRTAAYEDALATSVASFFQLEEWMKTTYLASMQESVRADRTNRFAGWLVGVSNCVDYVMAEEGWADFKFNFALDELSMDHPDHGVLPVSMLSDGVRAIISLVGDLALRCVRLNPHLGVDAPNRTKGIVLIDEVDLHLHPSWQQRVVRTLRNAFPEVQFILTTHSPQVISTVSSNQTRIVQRDHDGRWQAFPPDEQVKGLESSVALSDVMGVSPVPDIPESKMIRDYSYLVESGKKESGEGLALRKQLEGLYGPTHRVLIEADRLDRFQVLKTGLRKRQRNNG

SEQ ID NO: 83517 - protein, 238 aa, Arthrobacter sp. W1
MHFLDRASIEKPECLGNYVYPERNWDSFGSSCKKKLRAALVELQGEPGVSNAPGAEEFGVRCAYCESFIHHDGHIEHFRRKNPNHFPELTFSWENLFLACGATTHCGHFKDAPRSEIYDPNDLVKPDVEDPRPFFFFSVQGSIHARDGLSASDRHKAVETIRVFNLDDPNLVAKRRKAMASLREKYDELLSEFDDLLVGDKSESEMRDIEALISEWIQGEIQASKYQPFSSAVQDLFA

SEQ ID NO: 83518 - protein, 326 aa, Halocynthiibacter arcticus
MNEQSEGGRILCLSGTMHDKYAPSIYRAKSRSERVIYLGNKVNNNMISDVAPFRTLSTFLLRKLSAEDGLDSLSKKTASTALNKLKFQDRIGLKFRYSKGRKSDIADLVEPELFCSLTDIRLDNIEAIRGYITHLDAGDITLSDIKFIKEGETFGLADLSSGEKQYALSLLGMIYCGNPNCTVYFDEPENSLHPSWQMSIVKDLVEISDHLFPNSTIIVATHSPLITSSVRGAKVFTCNFPAEQLWGKSDLFGKPSDSVLRDQFNLYSSRSPEVYKCINRCLDLIARNQTTTLEFEEERDLLRSFDLQPNEDDPLHDVIQTILGIP

SEQ ID NO: 83519 - protein, 225 aa, Halocynthiibacter arcticus
MAKIRPVARYALKRQKYKGCISKLLSGDCEWGDKDLKPLKDEIRKLLRVEQNEVCPYCQRIIIPERRNLNEHIEHVLDKSKAKYKKFSLTASNLILACHGCNVEKGQKDLLNSGTPAPIYLRLIDLPFIWPHPCVDDMVRCVHKAPGPVYSPIEGSGKEAEAERMIKDLKLNDTRNIESRYGRLVERRDRIMTLLGRLARINDEKSRRRMAPLILENEKVAAALN

SEQ ID NO: 83520 - protein, 393 aa, Flavobacterium sp. JRM
MLRIKNITIKNIGPIKNLNLNFDDHFNIICGQNGIGKTTILDCLAQSFGSWGISLKKTANTIAGNWEISILSNGNVINNNIKVDSFHPHESSSLVGSIFQSLSNGVIVFKTHRDIQYQSLNSVNTDPVKDISSFSQETIGGSLSHDLKSWFVHRHLWSAHLNHLSENQIKNINLAKECFQILNPNISFDQVNPTTNDILLKTPSGEIYFEYLSSGYKSCISILIGLIKEVEFRYKNPSKFVKDFDGIVFIDEIDLHLHPEWQAKIYEALKIILPKAQIFTSTHSPHIIQVAKPNEIIPLILDSLDEVRLNEIINKDYGCQGWTVEEILSDIMGMNETRTDSYLNAISNFNTAIDNEDTETATHQFNILDKMLHPENSLKKILKIQLTGIAEND

SEQ ID NO: 83521 - protein, 250 aa, Flavobacterium sp. JRM
MIKLERTSKPVELTVELQTQLTNEFKLTAKSVWNKDFIKNNLLKFSHNKCCYCEMNIKEESKYLEVEHFHHKNFYKDEVLEWENLLPSCKKCNATKNDHDTVKEPIIDPSKIDPKKHLKYWRYRIKGYDDIGKLTVSVLNLNDQDRLVKMRFEIGNAIQIKLELFNELLTDYINGIKTTTQRKNRIVNGVKDLMKEGLPNSVYSATTATIIVTDTEFSILKANLILVNLWDDELSKLESTLNNYALDLER

SEQ ID NO: 83522 - protein, 478 aa, Dickeya zeae EC1
MKIKQFRLHNVGRFTSLDALIAPTADYPSNVTVLVGNNGAGKTSILQALATSLSWLVARVRSEKGSGSVISEDTITNGHASAAIEVMVQNTPLSGNAADNDAEYHWTLAKAHSGKKGQHASQLNALSTLADRYRIALTQDEQSSLPLIAFYPVERSVLDIPLKIRNKHHFQQIDGYDNALNQGVDFRRFFEWFREREDIENEATPSLVDVLSNILDNNPEQFITQTLDPEKNKNVDVKDEIAKLKTALSELKQSEKSNKDPQLDAVRHAIYCFMPGFSNLRVRRKPRLHMSISKEGKPFNVLQLSQGEKSLMALVGDIARRLAIMNPALDNPLHGQGIVLIDEVDMHLHPSWQRSIIERLTTTFPNCQFILTTHSPLVISDCKDVLVYSLDNGELAIVPSQYGQDANSVLLEVMDTHIRNAIITEKLGDLLDMIQHHQLTQAKTLLEELTEELPATNLELTKARLLLRKQELRGEKNH

SEQ ID NO: 83523 - protein, 210 aa, Dickeya zeae EC1
MRKITKGTEPASLTAWKRANPNGRYDKLTETERQDIRDACAKEQFYLCAYCCKPISGDNSDTMNEHVQARKLAPRRSLDFTNIVASCTTKNQCDAAHGSQPFSLTPLMAECETELQFMISGRVEGKTERAQEAIKVLNLGDKKGNNKPLIEARKKFIDSLLLTNGIDPNEGLEDDDLLRAVINDFSSPQNGRLEPYAPVLVNILKSWLSA

SEQ ID NO: 83524 - protein, 445 aa, Xanthomonas citri subsp. citri A306; identical to SEQ ID NO: 80878

SEQ ID NO: 83525 - protein, 127 aa, Xanthomonas citri subsp. citri A306
MGSPVEHIAPKAMYLGYMFEPLNLCVCCPDCNEYKSNREVHVDPPIKGYLPVAYPNDPEKFRIVHPHFDEYSQHIRRAGILYIPLSEKGSYTFYVCHLGRYLSELGMTEELFNDLNAVMQRHRFHEG

SEQ ID NO: 83526 - protein, 414 aa, Hassallia byssoidea VB512170
MLKELHLQQVGPAAHFDVAFTNRLNIFTGDNGLGKSFLLDIAWWMMTTNWAEQPAYPQQVRGENPQITGVVSTKKNIREYQSYFDFYEQQWRSLQMPPLLKEVVIYVRVDGSFSVFDPARQRDIAYNFNPNTLWNGLKSKNKVLCNGLIQDWVTWQNQPNKYPFKLFSHVIKKLAPHPSEWIEVGEPTRVSIEDVRDIPTVNLPYGNVPVTQTSAGMKRILGLAYLLVWTWYEHKKASELRQQKPVNQIILLIDEIESHLHPRWQRVILPAILAVVKELQPRMKIQALVTTHSPLVLASLEPNFNEQEDKLFLFKLQNREVSLDEVPWSKQGDTVGWLTSEIFGLKQARSKEAEIAIEAAEAWMRDDDMNAFPENLRIPTQIQTELQRVLPGHDPFWPRWIVTTEKRNSGLSEV

SEQ ID NO: 83527 - protein, 195 aa, Hassallia byssoidea VB512170
MMPFNPPPEPPDFNKKVRQPGNTWLRKNPDPKKGTRDYWSPFKSYLADGFNNLCGYSVMYEPVGTVEHYRSRENYRNLAYEWSNLRFASAWINSSKGTLDDQILDPFDLGEDWFEILLPSLQLVLTDKVPPQQRQKAEFTLKRLRLRDDERVLRQRQQWYQLYLDGDLTLQGLEKKAPLIARAIKKQQQAISQQE

SEQ ID NO: 83528 - protein, 451 aa, Vibrio owensii CAIM 1854 = LMG 25443
MIEKITIHNFKLFSDETFTLNPQFNLIVGVNGSGKSSLLKALAVSLAGWAHAYIKSESNLRPIERSEIREIQRQGRFDLSKETSIEVYGEFPIVDRNLESKRGYVQWKRFRQEGDTKTYLSGNIRYLNTWSGEYYPTEYNLILSNLGHDVLKYIESGEQFDLPLIAFYECDRLWISKNQANIESAARKQHSRFDPYLDCFHTGTDSNAIEEWLLKLELSELQKKNVNPVKKAIEIAAMSALEDCIGFRFDLEESRVMVEFKENLTIPFEHLSDGQRTILSLFCDIARRAAILNPHLDGEAIKMVEGVVLIDEIDLHLHPKWQRKIVESLRNTFPNIQFVCTTHSPFIIQSIRSSEEIIMMTGEPLLNYANKSVEEISKNMGVERPDVSIKYEEMKEIAKSFMEELEELDCTDREKQEEFKKRLASAVAPYADNPAYQAFLELQMLSKFGEK

SEQ ID NO: 83529 - protein, 260 aa, Vibrio owensii CAIM 1854 = LMG 25443
MRPFRRNSSPFDSDLKHYEDAKTELISRISRGEFASKHVTSYCSYCERSIPTNLAVEHIQPKKGSYAKPELQGRWSNFLLACVNCNSSKGSRGVFFDYFFFPDRDNTFNAFKYSSDGSITVNSSNHLAIQGVAKNTLWLTGLDKTVRNTYDSEGKIIAQDRISQRAEVWGIAENHLEIYTKNKGNAGIKELIVSSMLGHGYFSVWMTVFKDCPEMKNSFIDSISGTRESGCFDQHGDSSFRHSNKDKLSDSKFKFYSDKI

SEQ ID NO: 83530 - protein, 409 aa, Vibrio owensii CAIM 1854 = LMG 25443
MIESIDFKLIGTSDKYVTINLNGKNLIITGGNGCGKTRFLRQLDQYLKQFFNRKIQSKEATQQQLNNYQTQLDRIGVSDQNYNFYANKVQLFKGQLERISNENMDISDSDALFELVNKNQFILRFFEANRLASNIAGNGQIESISNVKQAGKSQGFEEDSSNQFEKYLVSYYNYGSHVIARENNPEKEQQINEWFEKVQNDLRNLFEDNELILQYNPEEQAFYIHQEGKEPYRFNNLSSGYSSILSIYADLLMKVELRDIPAEDITGFVLIDEIDAHLHVSIQRKIFSFFDKAFPKIQFIVTTHSPFVVQSVNDSIIYDLSKLETLEDLSMYSYESILKGLLGVESTSDILNKQLDEMAEIINQEPVNTERLQELIDGIEPHEGQLNARSRAFLLLGKNALLDSTDGEG

SEQ ID NO: 83531 - protein, 221 aa, Vibrio owensii CAIM 1854 = LMG 25443
MFNVVRTYPTPDSITKNQYNEVDVLKKLKPMFFEKCYLCERDEIQDVEVEHFIPHKKVPELKYNWENLYYSCSRCNSIKSSTHINLLDCANRFYDVGAMVKCLMPSTPDGDVEVSATSAKPCTQTENTVTLLEACYNLENTALRGISRTALMDQMWEYYTKLLLARQVLRNKSSGRTAKQEAEETFEAMLNVKHPFSIFWRYYYLNDSYLVDNHPQLRVGF

SEQ ID NO: 83532 - protein, 433 aa, Azotobacter chroococcum NCIMB 8003
MLNSLMLEGVGPAERLDIEFKPRLNFLTGDNGLGKSFVLDIAWWSLTRTWARGVMAAPRLDAKQSSIDYCYTGSAGPFAYKSRFDHQSQQWSVKQGRPAVPGVVIYAGVDGSFSVWDPARNYWKAEKEDTASPSRPRSFDFTPDEVWNGLLSSDGKTQLCNGLIHDWVLWQEGGKPAFDDLVKVLDALSPSGVEKLRPGQPMRVGDSVKEQPSLHMPYGQDVPLLHASAGMRRITALAYLLVWTWREHQLAHERYRVPQAREIIFLIDEIECHLHPQWQRRIVPALLNVMNALTGTRDVPVQLLAATHSPLVLTSVEPEFDRERDCIWDFDLIDGEVQAALYPYSRKGDVNAWLSSEVFNLKEPSSVPAEEALEQARAFLREVAATQQPLTTEQKQKLQDIDEKLRASLSDVDAFWIRWSQFREQQVGQACSG

SEQ ID NO: 83533 - protein, 236 aa, Azotobacter chroococcum NCIMB 8003
MLRVEMAAEPVDFDTKVRKPGLRAIAELAGEADLPKRRGRPRNAVAAAREQIPADKFPAIWTKALPELLDAYGRVCAYMSIYIEPVTGAASVDHMLPKSLDWREVYEWRNYRLACSLMNSRKNAYQDVLDPFEIEDDWFRLELVGYQVIPGANLDPEIHGHVEATIERLKLNGHDCLQLREDYAMAFFQGDISLDYLRRRAPFLAREIEARQRLAVLSELAAMDQELGLGYEVNKD

SEQ ID NO: 83534 - protein, 412 aa, Hafnia alvei
MSNFIKSINQLSFMKKRDIVINGKNLILVGDNGAGKTKFLTALHSYLIQVFNQSISTTLEQLTKDKAMFENQLKNITEGSNDYQSMIGTIEYYDSLIRDRENFDVIFCNSGEFFNEVKRKNVFLRFFQAHRRYESNDLNLLTSVDALFEEFKANTLNNANVQTSSYFEKYLVSMSNYALIEKGAGGVEEFERVVKVIGKVESDLRELFEDFSLKLSYNRKKLRMEIEQNYKEPFGLNTLPSGFASILAVYAELIMLSELSGKGKGNIEGIVLIDEIDAHLHVTVQKKVFEFFSKSFPCVQFIISTHSPFVVQSVSDAIIYNLSNGERLEDLSVYSYTSIVKGLLGESGNSAELEKTLQELDSLSKDNDFGSRFNEILLSLEQNFIVLDSRAQAIVMGAKSRQIDWEEAQGNV

SEQ ID NO: 83535 - protein, 224 aa, Hafnia alvei
MFNVQRSIPEPLSLALQTSYKGQDVIDALRAIFHDKCYLCEQDSISSPEVEHFVPHNKTAALKFGWNNLFYSCRRCNSIKSNTHTNLLDGSNSQLDVFSEIIHYAGNAAMGEVVIKASSANPSPETVNSVNLISKCFNDENTSLRGISKESLLEILLEDYTKFLIHRNVLAYRGSTQREIQAAKEKLSVMCQVQHRFSVFWKWHIINDVTVNRKFPAIRVELDF

SEQ ID NO: 83536 - protein, 441 aa, Hafnia alvei
MRQQYRLESITLRDVGVFEHTRFDFPQIKNEEKDAEKAEIHIFTGPNGCGKSTLLYALAAVFEGHFTGQSPIVKRFRSSQGRINYLFNEEQGSYIGRHFDEDFVGTDYSVWIGSNHEVIKERHHSIRNFTSDKMITFPFSVFAYSGYQHSHVQNKIDISQDIKLSPFENSLSFFNPVNTEGFLNWVARNRMKSVLSSINDASNVALLYDGAITKVRGFLKDICDLDIDFKLQVQSLDIEMLIGDEQVSFEVLPDGLKSIISWVADLARRLDAIPWQENRDIFSQPIILFLDEVDIHLHPKWQRRILPAIQKLLPNAQVFVSTHSPFVVGSVEDAFVYRLPDPQRTVCRDPASAEVITPTPSAAGKSYQLILDEVFGIEEQFDVETEALLEKFYQLKKAYLSNPQDDSQLVALAAELSSKGSEVATIVSMELRQITRLVNKG

SEQ ID NO: 83537 - protein, 199 aa, Hafnia alvei; identical to SEQ ID NO: 83253

SEQ ID NO: 83538 - protein, 634 aa, Pseudomonas batumici
MPTELQLETYVLENLGTWPGYPLKERHVLLDPCERINIADHLSVDLSGELSALTERGRETITHFKLNRGQLLKQRASKLKVYFDELIDEQLSRSEEDKLFPPVLDFAAMEFGGLWYLLCRRIVLELSPARVPPLALSPGRIGATLRTIVRNLSFQDWCGGLEARLALADVQRLVQAPEPPSALPREYSPLASVHLNNFKGIEQLELLMPSAQEAPTPNVRPAQPALLVLGENAAGKSSILEATALALCSEEARAQLPIDVASLPLDPELLGAGQVPRCTSATVTVTFQNASKRELIIAGGTYWHEGTPIAPPVFAYGAFRQYQKQVRRYSPGKSIINLFDSTALLSNPEKWLLGLKQVEFDSVVRALRDILSIEGEFEVMERDFENQRCLIVTAAAGSQALCRTPLSLASSGYRSVLAMVCDIIQGLMNRRINPHFESLETAQAVVLIDEVEAHLHPRWKIQIMGALRSALPNVTFIATTHDPLCLRGMRDGEVIVMQRVASADNPDSEWPVMVEQVIRLPNVSQLTIEQLLTSDFFSLSSTDQPDTERELAMFADLLAARERGQPLSDAQQQAWSRFERDISDALPVGATEVQRLVQEAVVEYLQNRRQASALKLGELREKSRQRILAILEGI

SEQ ID NO: 83539 - protein, 331 aa, Pseudomonas batumici
MRAVIRTTAKAPQALSGADSPAARELQKLKAWFAAPVGSPPAFTVYKADSVKQQLDELFHGKCAYCESFFASTAPVDVEHYRPKGAVSEDASHPGYWWVAMDWDNLLPSCIDCNRKRKQVTPRLSARLLTLRDDRQGFNQGRLLLSGKKDSFPILGQRAMSDAADLAAEYPLLLDPCRDNPDEHLKFHIDRSNLIGLVLPRPHTGADLVPMAEAVMDDHLQDALTAGVSLKGSVSIHVYGLNRLGLVQERTRLLRQLEFLEMLALEVGEMADKLVPDPEAPPSATVASIAKRLYLLQDRVLGEMKRMARPEAPYSAMVRAWIEDFKVRLQA

SEQ ID NO: 83540 - protein, 762 aa, Mesorhizobium plurifarium
MANRQALQSFMSYSSERISQSVTPRAFLSLEEPSVQNALHRLFHGKCAFCESKDTIKPYRFRPPAEAEPFQSAIDGHLYYAWLVDAWDNIYSICDNCHPLRRGRSKFFPVKGRRARIPAHSEIAKFVEESTGLWPFYPPHEKPLLVEPCEQKDFTQFFHVELSGKLVAKSERAATTIETFDLNREDLIKRREAAFAERLAALEAAIGRSSGKDLFQDQVDLITAFADLEFGGTWFLLLRRLCMAVGSGGGPLPALSMQRIRRFLYRLRARSDAMLRLSSAIEATGEADKIGLDAEFASTVRRTGTMRVQSVSLRNFKALEELDFTMPEPMHPAGRPTDAAPAPSILILGENAAGKSSILEAIALALSDEAARDELALDATDFVLKPQYMGAPSLSSPGTSSVVLTFEDGSILTMTAAGSGFDVVLPFAASQLPPVFAYGAFRHYLRKQRNHSPAKYIQNLMRSDEVLSNPEKWLLGLDDAVFAMVVRQLRYVLSIEGEFEVIRRNREDGRCYIVTAIVSPDGNVRYALTPFEVASSGFRTVLAMVCDIFQGILDPRVNGTVDNLAQASGVVLIDEVEAHLHPRWKMNIMRGLRQALPNMTFIATTHDPLCLRGMGDKEVMVLQRSSREADEGIGILPVFVEKMQHLPATSQLTVEQILTSDFFQLYSADAPELEGQFARIADILGKRNRGEVLNAVDRQTLQVFESDIASAMPVGTSEVHRLVQEAVALFLQERRKASDDHLQIIRENSKQEILAILRGAGT

SEQ ID NO: 83541 - protein, 307 aa, Mesorhizobium plurifarium
MRAVNRNEVFLPASILKRGEAELASVKLHIADANPKKGVFDFQVYKDEEIKKALHKLFHGKCAYCETFYSASAPVDIEHFRPKGAVSEDKNHPGYWWLAMSWDNLLPSCIDCNRKRKQLILTEKRSSLADLWNEGRLARAVQGMQSGKKDSFPVRGTRLRPEEKHYDQEQALLINPCADDPRLYLSFGKVQRGSLPLAISLDAEEPHSRGNISIQVYGLNRLALVQDRTRVLRQLEFLSDVVLELSAVIDKIATLPEHVKTELDRVPYRLKQLRDRTLVEMRSMADPVQPYSAMVAEWLHAFAAKLR

SEQ ID NO: 83542 - protein, 410 aa, Capnocytophaga canimorsus
MKLHKLYLKNIGPFLEGEIEFDQVTILTGENGTGKTVVLDAIRKMLLGNDYYRILPKMRNIRRENSFKIDLSLSFNKKKIEIESDRINNNYLFESFEIKKSGSQYYDLGSVFSNSTKAKGNLWIANYWTSQNDHSDFHIPSLDFIKPENYLIDCLDGIQKNAETTKIVTFLDYYKSSDKPEEKKEGEFIFEILKKIFKISLYEGEFVYVDRSRLMPVIIQNGVEVSLDKLSSGNLYLVQRLIGLLGQMYSVYKLNNLPLEEMCNTPGLLLIDEAENHLHPKWQKTFIKSILELFPNLQIVAATHSPFIVGSVENAKIYVCKPETDHSIIVDETANYSNKPIEEILISEVFGGTTPFANEEINKLLKERKEAIEKGDKQEEERTEKRLLELNPQYFSYLEMDKLLDELKNK

SEQ ID NO: 83543 - protein, 205 aa, Capnocytophaga canimorsus
MVHLERLTKPDVLAKNETKWTENFIQSGKDRPSSSKYGHPEIKEALASISANKCFYSEILLSPISDAQIDHYVEVSEDKTKAFDWNNLYFTHKNCNIGKSPNKSIPVSECLDPFTDSNEEIEKHLYFEDEMILSDTEKGKRTIQKYNLNSDYFNLQRSRTLNKFQQAIVLCLQDKVSKEEVIRFANSDRPFSLMIRLYLKKHNIL

SEQ ID NO: 83544 - protein, 409 aa, Capnocytophaga cynodegmi
MKLHKLYLKNIGPFLEGKIEFDQVTILTGENGTGKTVVLDAIRKMLLSGRWTNALSKMRNIHRDDSFKIELSLLFNNETFKIETNSIANNLYESFEIKKSGSPYYDLGSVFSDSRNAKGNLWIANYWTSQNDHSDFHIPSLDFIKPENYLIDSLDGIQKNAETTKIVTFLDYYKSSDKPEEKKEGEFIFEILKKIFKISLYEGEFVYVDRSRLMPIIIQNGVEVSLDKLSSGNLYLVQRLIGLLGQMYSVYKLNNLPLEEMCNTPGLLLIDEAENHLHPKWQKTFIKSILELFPNLQIVAATHSPFIVGSVENAKIYVCKPETDHSIIVDETANYSNKPIEEILISEVFGGTTPFANEEINKLLKERKEAIEKGNKQEEERTEKRLLELNPQYFSYLEMDKLLDELKNK

SEQ ID NO: 83545 - protein, 205 aa, Capnocytophaga cynodegmi; identical to SEQ ID NO: 83543

SEQ ID NO: 83546 - protein, 410 aa, Capnocytophaga canimorsus
MKLHKLYLKNIGPFLEGEIEFDQVTILTGENGTGKTVVLDAIRKMLLGNDYYRILPKMRNIRRENSFKIDLSLSFNKKKIEIESDRINNNYLFESFEIKKSGSQYYDLGSVFSNSTKAKGNLWIANYWTSQNDHSDFHIPSLDFIKPENYLIDALDGIQKNAETTKIVTFLDYYKSSDKPEEKKEGEFIFEILKKIFKISLYEGEFVYVDRSRLMPIIIQNGVEVSLDKLSSGNLYLVQRLIGLLGQMYSVYKLNNLPLEEMCNTPGLLLIDEAENHLHPKWQKTFIKSILELFPNLQIVAATHSPFIVGSVENAKIYVCKPETDHSIIVDETANYSNKPIEEILISEVFGGTTPFANEEINKLLKERKEAIEKGDKQEEERTEKRLLELNPQYFSYLEMDKLLDELKNK

SEQ ID NO: 83547 - protein, 205 aa, Capnocytophaga canimorsus
MIHLERLTKPDVLAKNEAKWTENFIQSGKNRPSSSKYGHPEIKEALASISANKCFYSEILLSPISDAQIDHYVEVSEDKTKAFDWNNLYFTHKNCNIGKSPNKSIPVSECLDPFTDSNEEIEKHLYFEDEMILSDTEKGKRTIQKYNLNSDYFNLQRSRTLNKFQQAIVLCLQDKVSKEEVIRFANSDRPFSLMIRLYLKKHNIL

SEQ ID NO: 83548 - protein, 782 aa, Pseudomonas fluorescens
MQRFLRNKVPPSIFREEQFRKSREQLLDFFSLDTQERSQTRVPMEDLELNLNQVSPVYDALGQMFRWKCAFCESKDHPLPYRFRPTSSATSTMGGIDSHLYYVWLANAWENIYPICLKCIPRQPSFFPVKGKRAPIPNLEQLRQYADDNLGSWRFSTYRETAVLLDPCVDQRFEKHFFPSVNGELLPLSEEGDITIANFRLDRPELNELREARLRQYREELLASGEHLPRLRQATFQTYFDFAELEFGGLWYLQCRRIALYLSQRAGLTMPTGRSGVAKTLKTLLSVGDYQQTREQLQGWIKETDFGRKTLNIPPTDYGVLGTEPDQQKTPVPLVYPSLRSIELQHFKAIEHLELNLGTLSAESQLSNETLQPALLILGENATGKSSILEAIALALSHPDTPATLNLTPASFVLSPAQLGSDDVASKTPAQVRLSFDEGQAKVLRIDDNVFRPDGPDDVPPVFAYGAFRQYQKRSPPAHEADHAIINLFETDRLLANPEHWLLGLEGEDFNDVARALKIIMSVDGDIKVIEKAPDGKSCLIVTVPAGVVTRTPLNDVSSGYRTILAMVCDIMQRLMDRRVHPRFQGLEHAQAVVLIDEVEAHLHPRWKIQIMHVLRKALPKVTFIATSHDPLCLRGMQKGEVVVVQRRSKAGGAKTQYATCIEQLSDLPDSSRLTIEQLLTSDFFNLMSTDQPEMEKQLASVADLLSKRKNREVLTAQEQRVMAYFEDEVNDALPVGTSEAQRVVQEAVAEFLQRRKKEPSSEWETIRVETKTKILNILKDF

SEQ ID NO: 83549 - protein, 366 aa, Pseudomonas fluorescens
MRFVDRSLVKKPLAMLPRKTTVSAADQELTDLTAYFKEKTAALETLARARATLAADDPVVIEAAKAVDSLKKPLFKTYRKNSVKTQLLALFHGKCAYCETFYPAVAPVDVEHYRPKGGVNDTDHTGYWWLAMDWENLLPSCIHCNRLNEHITPVLSTQLVELRSDHLGFSKQRRVTTGKGNHFPILGPRATQDSRDCSTEYALLLNPCRDDPQEHLAFHVDCEKLIGLVLPKPHDGAGLPEVIPTQYLLPEFKGEIDKALEDKLSLRGAVSIHTYGLNRLGLVQDRTRVLRQLAFMEESVKDLCAMILKLEVCRNAPCADENKRIIKRMEALIDRTVRHMKEMAKPQAPYSTMVREYLAGFEKRLV

SEQ ID NO: 83550 - protein, 463 aa, Tolypothrix campylonemoides VB511288
MKVKRLIMNSFRGIGDLTLDFDEVGPTVLIGVNGVGKSRILDCLAILLSQYTGRVQDDSTRSLSEQDITNGHKQTQIEITISLNQGEDITWSLSQERQEGKSGQSPANRLEAIKLLADISSEQRLQNLSRGGNDLRKFLQTAVEILSQEVDEVSQEPLEKVVDEINSQLANNENASIPLPVYYPVNRAVLDMPLEISEEYLMTQRNAYDQALTGGRIDFKGLFEWFRKREDLENELRRDNPSHRDKQLEAVRGAISSLQPDFSDLRVERSPLRMTVKKQGQQLIVNQLSDGEKCLLALVGDLARRLAIANPGLSDPLQGNGVVLIDEIELHLHPKWQRQIIPALTRTFPNCQFIITTHSPQVLSHVKPDSIYLLEATPEGIVTEQPENSFGRDSNQILEDLMGVSERPQEIKENLRDLFRLIDQGHLDSAKQLRQNLADEIGEDDPEFVRADVLIRRKEILNR

SEQ ID NO: 83551 - protein, 214 aa, Tolypothrix campylonemoides VB511288
MKYIQKGREPDSLTKWKQKLGKRTPDWKAFPQAIKNQVYESLLQEQGYICGYCGMSIARKQCHIEHFRPKSVYKHLTFEYTNLIASCQGEDEHRPRVPVHCGHKKHAWFDEELMISPLDPKCGDYFKYSGFGEILPSDDPDKQKAANTTIQKLALSIDKLRKMRRAAIDAALQATSGLTDAEIQLLAQGYDKPDVDGRYTPFSAAITYILKQYF

SEQ ID NO: 83552 - protein, 468 aa, Scytonema tolypothrichoides VB-61278
MKLKRLNMNSFRGIGDLTLDFAEMEPTVFLGINGVGKSSILDCLAILFSQLTGRIQNSNSIRHLSEQDITNTGHKTHISITISLKPEEEVTWSLTQERKEGKSAKSTGEVRLEAIKSLIDGISQQRLQKLGRGDEVTNALQAASILLSQIEADEVNQNPLKDLQTLVDNINNQLENHDNASIPLAVYYPVNRAVIDMPLEISEEHLFTQRNAYDQALTGGRIDFKSFFEWFRNREDLENELRRDNPNHRDKQLEAVRGAVSSLQPDFSDLRVERSPLRMTVKKQGQELIVNQLSDGEKCLLAMVGDLARRLAIANPGLDNPLEGKGVVLIDEIELHLHPKWQRQVITAMTKTFPNCQFIITTHSPQVVSHVKPDSIYLLQATPDGIVAERPENSFGRDSNQILEDLMEVSERPQEIKDSLQNLFRLIDQGHLDNAKQLRQNLADKIGEDDPEFVRADVLIRRKEILNR

SEQ ID NO: 83553 - protein, 214 aa, Scytonema tolypothrichoides VB-61278
MKYIHKSKEPDSFTKWKQKLGSRIPDWKSFPQPVKNEVYHSLLQEQGFVCCYCGMSIGRKQCHIEHFRPKSVYRDLTFEYTNLIASCQGEDEHKPRVPVHCGHKKQAWFDEELMISPLDPKCADYFKYSGFGEILPTDDKDKQAPAKTTIQKLALSIDKLRKMRRAAIDAVLMATDGLTATEVQLLTQGYQKPDANGRYTPFSAAITYILKQYF

SEQ ID NO: 83554 - protein, 428 aa, Thioploca ingrica
MDPEPNEIFQVKKLKLENFRGFEQVELEFHRNLTVLIGDNGTGKTAILDCLAILLTNFSKRILRIKNDFEENINILDIKQDKLKTTDEIYLLIEHKQEKVEMKWSISFNKNYGSDSYLQGLDILQGVPKPWYTNNEENLPILIYYPTSTAALINFIDFKNARDDFRTDILTIYDHALDKKAFNFTYFFEWYRWQENIEKQLGKNPTLDQVRQAIYSLLSDDHNQFTNLAINWLNNPSGEMLIQKNATVLNINQLSSGEKTLLALVADLARRLAIANPHREQPLTGNGIVLIDEIDLHLHPRWQRRVIPQLSKIFPNCQLIVTTHSPLVLSQVKPENVVILENFQVVKNTPHTFGRDNNSILYELMAVKQRPDDMQKQLDKVYELLDEGNKAAAQELLKQLSQDLGENDTAIVRAYHHLAFMDEADETD

SEQ ID NO: 83555 - protein, 213 aa, Thioploca ingrica
MKQIEKSKEPASLLAHRKKIHSNYDNYPEKDELRDYLLKEQGQICCYCMQRISKENMKVEHWQPQSKYPEKQLDYQNLLAACRGNEGEPKHLQHCDTHKSEQEMILNPLDKLIKSIKYRKDGRIYSDDPNIDQDLNKILNLNTQTLVNNRAAIMDDVIQNLTNLKGNKADWAVAHVKRKIQQYETKTAGKYHPYCQVIIYFLNKRFAQELGYF

SEQ ID NO: 83556 - protein, 235 aa, Pseudomonas sp. StFLB209
MINGYGVKSETKVIMPSDPQQIKNFEGFRDALRLILPKTLGFEDLEVRDYEIVFCCNKGADEFLLETASGGIAALIDIAWQIYMFDNDAKEPFAVVIDEVENHLHPSMQRTLLPSLVAAFPHAKFIVTTHSPLIVTSVENSHVYALRYDENKKVRSYLLDFKSEVKNAVDILDEVLGVSTTIPDWAIVKLTSIIRKYADADPTAESLVNMRDDLERNGLGRLFPQAIATIAGDNK

SEQ ID NO: 83557 - protein, 191 aa, Pseudomonas sp. StFLB209
MIRLHRPACPNPIALRANYKNSENKAALEGASNGKCMYCESHVSHVYFGDVEHIKPKAENRFPHLEFEWSNLGFCCARCNNAKKDQFDENCPLIDPYSEDPSEHLIAFGTIMRHKAGSERGAITIITTDLNRAELIERRAMRLADLQHALDACYRTSNVALQNILLHALEAESDSSKEFSLFSAALMAANK

SEQ ID NO: 83558 - protein, 545 aa, Sulfurovum sp. FS08-3
MRLKKVEIIEYRNFKNSVIDFEKSNNFPNVFAIASKNGGGKSTLLQFVFTFLHCFMDKERKQYLQNILEYLPEMTQKTDLVTFVIEENHQEYNLDFSILPTVTETMDFNLYLDSQEIQEQILDYQKNDQKYQRILQLKKDLESNDRITPIMENNLNYIKNHVKSMGDMELDFLYDKAKATKDLQIYKNLIEIIINKNAISEDTLNELKELNIKVNHQVKNLEDVLNQNNILYITHLLNTKNVLLLQTNMPKELLVTLTNKVFLTAPSSQVFLFLSSQEKHTIFNEFSNTNSYYESYYEKVKKAKKELKNFFTYDFASTDLILEAFKKASVEDLKIKRETGHYGNRYDELTNELKNFLDGKEIGENREGNGVIFTLKKSDYPLSPEDLSHGELKKLGIYIWLKHIVEKDSIILMDELDIALHPQWQYELVKDLTKWSQGSQFLLATHSPQILSSTYYKNIIKLDKGKVERYTKPPIDRDINSIITQVMDAPDFPMDLLLLHKAYRTLINDGKIESDEAKKLKEEILEHESESSSFFQDINFDLELM

SEQ ID NO: 83559 - protein, 207 aa, Sulfurovum sp. FS08-3
MRYIQKVQPPQFFIEDTLNLESWSSYFSHKKHKLKEHLLEHEQNYLCCYCESKISSDTNSSHVEHIRPKGHDKYPHLTFEYHNLAVSCNGTCQNLPNDSTIHNCGHIKSNEYDENLFLNPVELEDIRDYFEYDIDEGKIEASAKNEQKASYMIDTLRLNDGGLTKAREKALENFIEKMKKIEANLRREEIKKILKEEKLEQISFFEI

SEQ ID NO: 83560 - protein, 499 aa, Sulfurovum sp. FS08-3
GLVYDSIGEYDKALEFYQKSLAIREEVLGIKHPDTATSYNNIGEVYKSKGEYDKALEFYQKALAIREEVLGIKHPDTATSYNNIAHLYYAMEKYEESAKYMQKAKDIWEKVLPDNHPNLMSAKENLSIIQQSIKPIKIDKSYLDAIKIKNYFSLIDVEIENLGDKREIYFVGENGDGKTILLQAIVLALKGRDKDYTKLAYDYIKEIKDKMILETKDTQYPSKYHQYKNLKNIFAYGINRNKVDEDNFDTSGYSGLFDTPQLAYTTFFKKPEKILSKKSPIVDKFIDKLEDLMDNKLTIDRNSEGELRFKGVDRFNMLSEGYKTTIIWLTDLLSRLMEKQPDIQALKDYEAIVLIDEVDLYLHPKWKYNFMYKLRTIFPKIQFIVTTHSLVTVLGASEDAVFYKLYRDEEGRTQVSQQIDDISHYTANILMTSPLFDLDSMKVRGFDKNERLSSDDYIYREIHQAVREYMQNNPSAMSEELKQKVKDELKARMAQLRQK

SEQ ID NO: 83561 - protein, 296 aa, Sulfurovum sp. FS08-3
MREIDPHRRGKVHNHLHSEKVSKAFIKNIADNKHSTGSVYSDDKSDKKDSIKWTLKEIYHQKCAFCESKLTNDYGDIEHYRPKNKSEKESKDCDKGKSYYWLAFGWDNLLPACKRCNGKKSNCFDIDGEYKEYEGESLEDLHLVTQKYNEVEKPKLIHPEYDRFEKDIVFDSEGKMRSDNERVAYTIRVCDLNRENLVGSREEIVTDFISKLNRHLLTFDKVFNGNNLEECLEYFKVSIEDFCKESRKEYEYSLIRKYIKDNLIEFLESIEIGYDDKGFAILIIESAFGEFCLEDK

SEQ ID NO: 83562 - protein, 401 aa, Sulfurovum sp. FS08-3
MLQNFTIEFNEKINIIIGENSSGKTSLLQAITLALLDKNVAIQTGKNPYSQYITKDTDVSTITLTMDEFEKKIVLHEASRSVENNFLSPFVLAYSSSIFTKYGEVESLVEKLLAQKVYEDFTKSIFTDYIDTLYNPKAILNVLKDKKSKRAKEVEKIFVGTINSFLSTLDDFSLEIGDKSGNYCFRDKKKKEFTLKNLSEGYRNSILLIGDILIKVLGVGKKPDTIEGVILIDEFDRHLHPKWQSNLVTKLTTIFPYIQFILTTHNPMSVLGREANEITIIKEEDKELKAIKKSGTKNIDAGTVLVKYFGVNLVSNVMHDNLKRFTQLKLKNQELSEEETKEFAKLEEDLSETVATNFIYNNGYFKFLKFAKTHQDIDFDELDELSEEELDRLLSDFEESL

SEQ ID NO: 83563 - protein, 249 aa, Sulfurovum sp. FS08-3
MINMRPIYLDASFQKALQKFHKKLPQECYETTDCEWSLFKKAFLKFSKYKCPICEDRVRRYDDIDHFRPKEEALYPFLKCCYQNYIVMCSECNRFYKKSNFPLLNPTQKATSVVELKNEKPLLVNPMHDDIFELFQLEFIVSNKNNKKMLVVAPKDGIDDESRQKAQATIELYGIGNCDDNDKIDDCRIDLLENHYDQFIELAKRAKKYFEDKTERNRVLLGKKIKEKPSLEKYGFVEFIKKGQFKIAI

SEQ ID NO: 83564 - protein, 547 aa, Vibrio sp. JCM 19232
MNAKSLRAIKSRANKGNIASRFQLFEMFQDGKDVELDLEQAFEHLKKCTQELAFHEGDNISAKHPLRLNSISFYDFRRFGHLSFSPKTNLSVIIGNNGAGKSSILEGIAKAFSQINNNLIYRNASAQTLEPTDVRVGITGTAEIILRFDLGEGTRYQGKFVTASKGFTSNSATDLTELKSLSRLFRRVNEEGNKTLKQQLDLPLLAFYSVGRSQIKPQLTYNEAEFDMNSRLDVIDKSAIDGEGNVEDFLRWFIYADNLANYGDFDRLDRIKSEVAAYKSILDVHTESGAKEEHPLYGVYIERLSDMNALEARLSQFDLSLELKRLKCVKDAVISSVETISDIYIERATGKAKVMLINSGVSVNFRQASKGQQVYLALVADIARRMAYLNVNLDNLLHGQGIVLIDEVELHLHPSWQQGVIERLQKTFPNIQFIITTHSPQVLANVKAENIFIITPNGDDKFSLDHPHQAYGLTSNDILNEVMQPHSMQSLARNVVVEERLSNIHRLISEKKYDQATECIEELEIEINGEIPELVEAKLSIDLASWK

SEQ ID NO: 83565 - protein, 233 aa, Vibrio sp. JCM 19232
MYSIVKSIQPNSLVTYKNDPNASYENLPKNVKLDIKWSLLTEQGFVCAYCMTPIDENKMRIEHWACQKEHEDKELDYSNMLACCTGNENQRDEEYICDKMKGNKSLRYSPACYGHRINERIYYEHGNGTIHSSVAEFDEQLRSVLNLNYHRLVSNRKAALRAIHARLETVKKGGNATKNDIEGLLRDVCSRRATKVKRKVDVLGQNFTIEWPEKHKPFYGFLSDYLQHKLQGK

SEQ ID NO: 83566 - protein, 482 aa, Flavobacterium hibernum
MKIKSVYIPDFLILKDFKIVFEHNKDLAVIIGDNGSGKSTLLEVIAYIFGHLHKYFVLDDKTAEFIDGYEIEFTSTYKSKVYEIYLKSIYISQKTNTFKPVIRINGNEMSISQIEKEFGGFSNFLPSRIGVYYAGEAKFLQALSEHFENKFIDDLIKKGNPYTLNPLNLPKERPFYYVKDIYLGLILLSLLVNAGKNNEIKKLLLKLLGEVDMGGIDTIITIKKPIWAKSDKDTLWGINSNFVEQFVHKLNATASKVDNEKKDTIFYTYYGILDLVNLFSDSEDSDYAFMVLDTLFYNGLLENISITLKKTDGTEIDSERLSEGQRQFIVTSGLSALWKDQENKLFLYDEPDVFLHPKWQREFIPFIKPYFQNSFAILTTHNPSFISSLDNSFGSLYHFAEGKLHQHKSKYYGRDVNDVIREIMGGEIRPEWAEKKINEVDGLLDVDYEKGLKNFNKLKELLSSDDSEIIRLQTKIDFLKDF

SEQ ID NO: 83567 - protein, 226 aa, Flavobacterium hibernum
MEKIIKLGTDPVPLDSFKKARIDEGGEFRATTYLDFVNPEKNSYKKVLLEEQFYLCAYCNKLLSEENLHHLKIEHWYPQSLCKKDANYKTINAADILHSNMLLVCNGESVNPKYRHCDSSRTPKKMLTIKPQDSGYSFDLFLRYEGGKLISSDHDINIDIKELNLNHEDLMYKRRIVLDQFRKILLSLNRNSINKVALLKKYSNPNSEGRKAQYCTLILNEIKKIK

SEQ ID NO: 83568 - protein, 454 aa, Prevotella sp. P4-65
MRQIIIKNFRCYEEKVIRFRRGINLLIGDNSVGKTSLLRVCNLVMNAFFSGYSDENTVWKSADDDDFREIKSEDVVDNDLPINITFDLDKEDLPDIVLEGGKKVCLQTNEPEVEEGCARFYIEKKSKKNARNLVTGLKNLKAFSSMLQKSSHTINNGVAIQKNALPLFAYFTTEDIHTTRKFDKEKKNFKKYPQKPSFGYFESFDCKGLLDCWIKRMLVLKEAKKGESEIECVRKAVVRSLGPKGCGIIDDMDIRHNDGEVFFHYCDGREVRSNLLSDGYRRLVSIVVDIAFRCALLNKVMYGDEAYKHTHGTVIIDEIDEHLHPELQVRIMKALHETFPKIQFIVSTHAPLVMSSVETNEDNVVYKLEYIDGKYSHKELNTYGLDASTIMDVYMDQTPRDLAIDAEIKAIEKLIDAEEYSEARKLLDMMLERPGSEANPELTRIEATLSFFED

SEQ ID NO: 83569 - protein, 224 aa, Prevotella sp. P4-65
MIEITKNKEPKEWTEYRNTPGVDYQSIPELVESLLKEQGYICAYCMRRIPHRDKLYKKDGIKYVLTDESHRIEHILSRDNHPERKLDYNNMVICCPGHIGDEDHCDRLKGSNDISFSPLDSAFISTLSYKTDGEIVSSEQKYNKEINEVLNLNTPLLKQNRKESWESVKRELIAIKKGNAWNKAVIEKYIKKYRSMHIKDGKSQYIPYCGIVIYNLQKKYRQIQ

SEQ ID NO: 83570 - protein, 449 aa, Prevotella sp. P5-125
MRINDITIKNFRGFIEERRFEFDSKMNVILGDNTTGKTSLLHAVQIALGAYLQALKIIPGGKAFSRNFLSTDYVKRYSEANKDFIQDTGKPEISVNADFFAIVYNLDDYSHDDQVHSISWTRSSNSISKRSANELMLEVTAMEQERISADTTHKNSVFPLFLAFGSNRLEKNYRKAQKTRARESRLEKAYKCSLDGQQVDFKSAFNWIYKYNFSLKKGAEFEGTDRAFFEAIAHAIPAIKGFRVDTKNNELAARVQMTKDPEPYWLTYDMMSDGFKAMINICAEIAYRCIQLNGFIGVEAVRSTPGIVMIDEIDLFLHPHWQQHVLQDLQNAFPRMQFIVTTHSPFIVQSVDSQNVIALDSQNAPISPNNRGIEEILACEMGMQGMLRSKTYRTKQELAKKYFELVKAGKSGEAETEEVKKKLNELELEAGLLHDPAYEAFLKLNRGKL

SEQ ID NO: 83571 - protein, 244 aa, Prevotella sp. P5-125
MRPLDKKNAGDSIDLYADIFDMGTTVHTIKSEYKEYGKARKVLLANFGNYCSYCENYFANGATFQTEHVQPKGLEKYAHLKTVWDNFLLSCPTCNYKKGDNDVIYEDIHLPHRNNTYLSLVYKEAGVVEVNPALSAESQARAQALIDLVKLDNPDSETDFRCDVRRQTWDKAQMFLKKYENGEYELRDMINTIKECCCWSIWFTVFKDHPEVRKELIDKFPGTAKDCFDPNNGYEPIACVSHPV

SEQ ID NO: 83572 - protein, 454 aa, Prevotella sp. P4-76
MRQIIIKNFRCYEEKVIRFRRGINLLIGDNSVGKTSLLRVCNLVMNAFFSGYSDENTVWKSADDDDFREIKSEDVVDNDLPINITFDLDKEDLPDIVLEGGKKVCLQTNEPEVEEGCARFYIEKKSKKNARNLVTGLKNLKAFSSMLQKSSHTINNGVAIQKNALPLFAYFTTEDIHTTRKFDKEKKNFKKYPQKPSFGYFESFDCKGLLDCWIKRMLVLKEAKKGESEIECVRKAVVRSLGPEGCGIIDDMDIRHNDGEVFFQYCDGREVRSNLLSDGYRRLVSIVVDIAFRCALLNKVMYGDEAYKHTHGTVIIDEIDEHLHPELQVRIMKALHETFPKIQFIVSTHAPLVMSSVETNEDNVVYKLEYKDGKYSHKELNTYGLDASTIMDVYMDQTPRDLAIDAEIKAIEKLIDAEEYSEARKLLDMMLERPGSEANPELTRIEATLSFFED

SEQ ID NO: 83573 - protein, 224 aa, Prevotella sp. P4-76; identical to SEQ ID NO: 83569

SEQ ID NO: 83574 - protein, 475 aa, Vibrio harveyi
MKLTSVNLNDTEYQLSNGDEDKSNTFTIIIGKNGTGKSRLLTKITNTLLKAKRYSQNHPKLKHKKVQEMTFKSKDRVITINSAMGKSGRILERNKRTREYMCKKLIVASISPFDKFPLPEQNLSHRNSKSFYNYVGFKTDKNSLSDKNLLIRFATSIVSSRSNIAVKRTLRLLGYKSDISIRFKHNSDRYFRTSDYLNNNLTFSEIVLNNKELYSKVLHDNNYLMSKMILEELSLDSNTRIGKKTINDLIGNESLPEFYSTSNELDDKLRSSLIRSLELNISEVSSIALRKIGSNNNLTLNDASSGERSLLLLVCSIASQISNDSVILIDEPEISLHPEWQETFIDLISKAFAHYQRCHFIIATHSPLVISNLPKEDCYILNMDSNKTFESQDYFNKSADFQLAKLFNTPGFQNEYLNRLCVSVLSDFSEGKVISEEQENNITFLISIQNELDERDTVKSLIEIIKKAWEVSKSC

SEQ ID NO: 83575 - protein, 218 aa, Vibrio harveyi
MLTPISYTQDDKDLIARKKSENNFTHKSWSDEDLTPIKDSIKNHYHKIQKSICPYCKQQLNSTHGRYWDIEHIIPRSHVPNFMFEPQNLCMSCVECNSEKSDKKVTSSTAKTRYPTNTLQFSIIHPHLDNYEEHLLVVEAGLFYYPLKPKGRKTVEVCGLNRFYEYAGFGNNGNVFQTIQALTTAASSVEDDVIKQQILGQITALALRGMVENKQSTD

SEQ ID NO: 83576 - protein, 480 aa, Vibrio harveyi
MSFRVLRVSIDGKNHDLSLPVENDENFITVITGKNGSGKSRILEFISNNFVQNDDFLRFSPHRWTRGLNKLRLRYDSNTITYQSSGYDVVGEILHKDLAMAFVSESHPNERYDIFPSRLVCLSTSPFDRFPPTKRTKKSDDVTCEEPQESIYTYVGLKNSSAALSVKGLITNVIDTILKSSERIKKNVGAIRDTLDYLGYGKRIRLTFKSTLPSNALLYGDLNASVLLILEERPELTEQADHILKAVSVLRSKHAKSKGQFSVSMQLVEPELLSDEYMQAVRLLLNLGLIRILGFKLSLKADNRKFITFNHASSGEQCLALMMLGIASVIEDNSLVCIDEPEISLHPEWQEEFIPMIQKSFNFYKGCHFIIATHSPLIISKLNASSCCVLDLDRNKLVEELNSKEFSSDYQLATLFDSPGFKNQYLLNESLEILSLLSKSVFIPEDTLSRARSIIDIIPNLDEEDPVLSLASAIKKVVEV

SEQ ID NO: 83577 - protein, 212 aa, Vibrio harveyi
MIGAEVTYSCDEQRIIDDYLKHNGSKGEDWSKGGFDPIRKSIKVHYRKEQNYTCPYCKVKYPVKHGMVWDIEHIIPKDKKPQFMFEPKNLCVSCKDCNGAKGNKEVLVNSRRKTFPSKSSDYKLVHPHLDDYEKHIDAVCPGDLYRPLSEKGEFTIVTCRLLRFYSLVDKEQPDNEIDELAKAMISASGVARELLEGELVKRIKSKQQASEE

SEQ ID NO: 83578 - protein, 414 aa, Vibrio alginolyticus
MSGYLTKIKAKIPYSDKEVDINVDGKTLILTGGNGCGKTQLLNYLNEKLHDRIIKRDNSALVQLEQQKVRYEKMIDRDGPASQSYDSWVQHLQKTVQKIDELKQPPITLSDLEGFILKHKDLKAVLLHFEAGRKSDILKPSSVTSLSSLKEKDRLSVTNPHQKKTASSLFEEFLVTSIANQAFSESKKINNDPVEAERIDKWFKKLEADLQNLFEDDELRLVFQSDTFSFEIHQPHKEPYTFQSLSSGFSSIMAVYADLITKISLRLIDPDDLTGIVLIDEIDAHLHVSIQKKILAFLKNAFPKVQFILTTHSPFVVSSVDDAVIFDLSQLKQVEDLSMYSYEAVLEGLFGVLPVSSLLQQNIEALAKLLEKHPVDVEEVQSLLEKLPEDEDSLDSESLYFVNSAKLAINKAKR

SEQ ID NO: 83579 - protein, 222 aa, Vibrio alginolyticus
MFNVVRSEPAPASLADGKKYDSEDVWEALKKVFHKKCYICETFEPQDINVEHFVPHEGDEKLKYDWDNLYFSCGRCNNIKLAKYDELLDCCDPTIDVVRAIKHLPPSTPYAKKLHIKAQATDYKTELTAELLDKVFNSEHTPNKAVSSAFLRKKVFERYNLLLSQLNKYYKPMALQEEKDDAVARIKLLLKPSSPYSAFISWCIMDDEELGPMLHDFIGETE

SEQ ID NO: 83580 - protein, 480 aa, Vibrio harveyi; identical to SEQ ID NO: 83576

SEQ ID NO: 83581 - protein, 212 aa, Vibrio harveyi; identical to SEQ ID NO: 83577

SEQ ID NO: 83582 - protein, 414 aa, Vibrio alginolyticus; identical to SEQ ID NO: 83578

SEQ ID NO: 83583 - protein, 222 aa, Vibrio alginolyticus; identical to SEQ ID NO: 83579

SEQ ID NO: 83584 - protein, 407 aa, Yersinia enterocolitica; identical to SEQ ID NO: 81698

SEQ ID NO: 83585 - protein, 217 aa, Yersinia enterocolitica; identical to SEQ ID NO: 81699

SEQ ID NO: 83586 - protein, 480 aa, Variovorax paradoxus
MHGRASGSCAGRMLTHLNSMGGGFERRLAIAPQVEPGGNWFTVFIAENGGRKSYLLRCLVEVALGRHQYVADKGSSILLTAPAKLPRRVIAISGTPLDRFPRTGTRDLKIRRRKMPDDFVYLGPRASNGMAGVAQSERSLVGSLLSNRYRLKERASLLTEAFSSLGLSPRIDVLLQGSSERGGSREKIAESLYTLEQSLGDRPEDEALELYSTMEKYRANIGKINRELERLSNKTEARLRLGIDHATIGARTFIDVPMWELLIRLGHVVITGTRFHRIKHDETVLGDELSSGQWGWLGTFASLAAEIRDDSLILVDEPENSLHPRWQQEFIRELHAMVSNFRDCQVVVATHSPLIASGISEEWGSIRTLTKPTRKGAHVHSKELPTAFGWSASDVYGEMFGLESTRAPDFMDDANTALRKLSMRRPITDDEREQWIKQFRGRIDILPSHDSMRDVLEGIIARLKKQDTGESPGHGKNKNA

SEQ ID NO: 83587 - protein, 273 aa, Variovorax paradoxus
MSRFSTIKFTRSDNALLNEVRALAGKKWSTDLDAIKRLRTRLRELQNHRCCYCQAPIESDESGFRELEHILPKNKSYRCTHARGTSNDQDKRRSTLGYQEFTFEPINLAISCKQCNNYKGMHDPLKDRTTARPLNKFPSAAQLIWFHPHTEKYETHITIDEDFGFTGQTAGGRAIIAECRLFDSEVLGRKFLERARVRAKQAESFRQAVDALASGIELKAFSKAHAIQTLAQERGIPTAEAKDIINKRLTYATSVQTMKQYFDSILKYEVNTI

SEQ ID NO: 83588 - protein, 455 aa, Pseudomonas viridiflava
MKLNQLSLRDYRCFDALEIDFHPELTVLVASNGAGKTSILDAIAIAFGPYVGAFDEAVGKHFEPSDIRQVRARTTVTHEMEYSAKGVRLEARGIIPGSVAERIDDLPSRWRRSLTGPTKTKTSIKDAKELIDYGKRMQEAVRTPGSDVVLPLLAYYGTGRLWQQKNQKRQSWSEKIVRTSRTVGYTDCLDPASKYKAFVEWFRYWNFNAKELRIKALELRETAVVSEFDGYIESVSAAVNACLEPAGWKNIEYSFSRDALVAHHDDFGELPVELLSDGIRNMIGMVADIGFRATKLNGQLGAHAAKSTPGIVLIDEVDMHLHPRWQQTILSQLRDAFPRLQFIVTTHSPQVLTTVPSESIRILRGNKVYSAPPGTEGSEPERMLKQVLGLEEVRPPGNPATQELKEYLALVDRDQWSSERAKTLRERLDRRYQGQEPALLDADLQIDNRKWELGD

SEQ ID NO: 83589 - protein, 272 aa, Pseudomonas viridiflava
MGAGRLKLVARTAEPDELKAYREANPTFGWDEMRQDAEGRAVYDVIRPRLIEGQGGICAFCEIEIINLDPTHCRVEHFHPKSDRSTPHNWALDWQNMIAVCMGGSQRHQVLPYTKEPLPENLSCDAHKDKMIQSHRLEECCEGWIINPVALPAFPRLFFLEKSTGELLPDGQCCSEVSVEGNKHPTTQALVEYTINMLNLNCDRLCEARKSVLWNIERNKKRLRDAAKTPRQGMDELAGRFLQQRWPGFFTTIRFCLGDAAERYLQNNKYRG

SEQ ID NO: 83590 - protein, 440 aa, Flavobacterium sp. MEB061
MKISKLHINQFRHLENLDFDFTYPEDFHIEEKRGKPLEKICFIGQSATGKTGLLELIYQESYRLQKAVRFEEIPEHKTLNFNESRGVITFATDIVNQIFEIEKTNQDAIFYQLHTKKNFSEKEIEELIPFKEELNLLYFKANLISEANIDIFTKNPIDLIEAYRKNTEVNIENLLDKRSFSNRNLVFNDNVNPNIWLYLLSEILEYRKNFTQRISELIHIKDGSVDLSNLGSEIQKWQIDNPNKVELFAEKFNPILKKLSLEIDIVNTLYPIPIKNKKTNVSIPIESASTGTKGLLLSFLPLYKLNTKDSIILIDEPERSLYPDMQMDLMDYYKNLAPEAQFIVATHSPFIAASFEPEERFILHFDKEGKVQVKSGKSPIGDDPNDMLYNDFEIDYINKYGKKVYNEYLEKRRQLLFEKNEEIKQKLQDEIESIGDKYNF

SEQ ID NO: 83591 - protein, 196 aa, Flavobacterium sp. MEB061
MKRVLKSPLSLIISDKIIYKSKGDNSKLGSLLLKEQKGFCAYTEHYIGFDDANDTEHFNPNLKDQLEDNYYNWYKVKHLPNQRKTNSWIEPILMPYADDFESRIIYDEGEYFARPNDDEANNLIILLDLNNQKRVEDRKNYIKRRRESINDRKLQTDIEIKKYFQDKIDNEINSICYLRAIQEEFKIDIWNMIPEL

SEQ ID NO: 83592 - protein, 418 aa, Bacillus thuringiensis serovar kurstaki; identical to SEQ ID NO: 82064

SEQ ID NO: 83593 - protein, 215 aa, Bacillus thuringiensis serovar kurstaki; identical to SEQ ID NO: 82065

SEQ ID NO: 83594 - protein, 735 aa, Pseudomonas fluorescens
MYHDDREISANRIIETLEARIKGVINVPEYTRFLLMLVIISKVGKPSGTLYASAQKMMENPELASIKLSDFNHLLLEAENIIEPGEDADFLLTHLAAKAISLPLGIDYRHPKLVSALVGTIQSTLPTSLFEVNPNTAELSLGLLGAHPRDSFPMSDDIAPHLRDLISFRLAAMDIRANFVTAKNYRHSSPATFLVDAPYPDSTQMLYGLKNMLDNQVQGRLVLIYNWAHANTSDTWSRLYALIENRGRVEAVIGFSSLPNASDYCTAIIINTDLTQRETLYVDVSLSNKSLPPLDGIERMLLAGCIYNLWQGRAAHRHDEYLSSEVRRFLNNYFSAGFRPISRLCNTTQKRPGTVLKAVLTKRLLLKTASGGSSQRTRSDNSKFIADVLLRRGKPCCVYIIGNNGEGKSFLLSDIAYQLAEAENRSVGLPLSHADRFPADDTAIKHLFDYKSARNTQITKEIGAFSSDPGKVELLRECLGLIGFRSPIYLILKSELSHDRFGDQRRETLDLSDVEDMRYLNRDRSSIGEYEVNFIRERHRTIPFNNLSSGEQSIIGLLIKILASDSGQTTFLIDEPEISLHVSWQQRLPRILNLLSDRLNASFVIATHAPILIANAADGDICYLSRIGILDEIAAEERHSVETLLMEGFKTYTPHNREVHEQCAKLVAALISDMNTPDAALKPEAAIEKLKTFKTTIETSGRGEQDERQASDLDLIEKTLAAIEMLREESEPYHG

SEQ ID NO: 83595 - protein, 268 aa, Pseudomonas fluorescens
MVDLTQAEMDAVRARYEGACHEREIHRKKTLEHLSKQDALAVAEFKRRQTGLRASKTDLWSKLTKHRNGFKSGITGPLIRKALRSFLEQEQNGLCCYCQRPLVNIAYAKPIEHILPRATFVQYTFHFWNLAIACFDCNQIKLDNVWAGTDKHGLQAYPAPATFTEMYHPRFHRFAEHVRFIRVQTNDHIISIYRGVSEQGRHLCLNLLKDLSAREIVLNSKPELKDALEVINAHVASNEGNLASELETFRQALAKSTSLLIKNGGAAS

SEQ ID NO: 83596 - protein, 416 aa, Pseudomonas fluorescens
MDDVYIESLHVSSVRQFDQFNIVFNKGFNFIAGPNGCGKTSILTCIAHCFSGVDSSSRFDENSAFWVNITNADNKYRVGLGQGAFQKGAYRNPRIQLWAVPPTEADRISLDSSNHTRALAGFCPLFIGASRSIKYKALAGMAREEAIEQSRRGYISNATNSLDGSWSPDIKQWLVNRYFIIDKEWAVEERLNWNHLLENLKEVGPFESCFTFVEIGRDHEPVFSVYGRLCYLEELSSGYQAVLSIIANIFEWVESVNEVGSRSVKDAKGSVLIDELDLHLHPEWQLTLRDALHTMFPNLQFIVTTHSPHILASAKANEVIAMPSGPFPLNCNVGPTSNSYAGWSTDQILLEVMDVQSLENKLHEELVANALDQIDKKSIDGLRLAIVELSKVSHPNDSIVTVLGARLASLMATQND

SEQ ID NO: 83597 - protein, 248 aa, Pseudomonas fluorescens
MIKLTRKDEPEVLRINKVRWLAELRAAIDKYGSYKNIPISEKNSLTASYRHQDIKAALIESSYGKCAFCECVPAEGGNVEVEHFKPKSIYPDLTFEWTNFLPSCRKCNGTKLFHDTGLEPIINPYDDDPSLVFYFDELQLKVLESTDASIGLKTIEVCGLNTVRLWRPRADILVSLYCFASSLEEALTNFKEAETEGKRVSRFRKISEAVDQIELLTKEKEKYSFFCLSFLKKCNAYIEAKSILDEGL

SEQ ID NO: 83598 - protein, 420 aa, Pseudomonas fluorescens
MLDYLHMKNVGPAPELEVNWAPRINLITGDNGLGKSFLLDLAWWALTRTWANTPALPVNPGKSSIEYVVKGKSGVAQPVVSTYKREDSSWPLKQSRPTMPGIVVYVRIDGGFSVWDPARNYWRSDKDRPAAYHFTADAVWDGLDVNGQRVCEGLERDWVNWQDGRKPQFKALENALRDLSPATEPLCVGAPRRVYLGEGRERPTLTIGNQNVPVTLASAGVRRILGLAYFLVWAWYEHQAAAALLDKKPERRFVILFDEPETHLHPRWQRTLMPSLLQAIKTLRGNHGAAPPQLLIATHSPLVAASLEPIFDEEQDDQIQLSIQDHGVALTQGHWAAQGDASSWLVSDTFGLEQARSLEAEKAIEAAEAFMRGEKQLPEGLKTRAAIHKALQKLLPAHDEFWPRWLIESDLLTLNGEGNQ

SEQ ID NO: 83599 - protein, 189 aa, Pseudomonas fluorescens
MIPVTRPKEPADFDKNVRTPGTQWLKDNPGAPRPSPLWNKCSQALADHYANLCAYAAMLDPTGGTVDHYLSYKNFPGLTYEWSNYRFASGTLNSSKKTADDTVLDPYDVGPGWFEIILPSLQMRTTEAIPAAYREKAEYTLKRLKLRDGERVIRWRQSWYNMYKQKKLTLEGLREVAPLIADAVEKAAL

SEQ ID NO: 83600 - protein, 413 aa, Vibrio parahaemolyticus VP551; identical to SEQ ID NO: 81346

SEQ ID NO: 83601 - protein, 221 aa, Vibrio parahaemolyticus VP551; identical to SEQ ID NO: 81113

SEQ ID NO: 83602 - protein, 470 aa, Vibrio parahaemolyticus VP551; identical to SEQ ID NO: 81302

SEQ ID NO: 83603 - protein, 214 aa, Vibrio parahaemolyticus VP551; identical to SEQ ID NO: 81297

SEQ ID NO: 83604 - protein, 413 aa, Vibrio parahaemolyticus 930; identical to SEQ ID NO: 81346

SEQ ID NO: 83605 - protein, 221 aa, Vibrio parahaemolyticus 930; identical to SEQ ID NO: 81113

SEQ ID NO: 83606 - protein, 470 aa, Vibrio parahaemolyticus 930; identical to SEQ ID NO: 81302

SEQ ID NO: 83607 - protein, 214 aa, Vibrio parahaemolyticus 930; identical to SEQ ID NO: 81297

SEQ ID NO: 83608 - protein, 413 aa, Vibrio parahaemolyticus 863; identical to SEQ ID NO: 81346

SEQ ID NO: 83609 - protein, 221 aa, Vibrio parahaemolyticus 863; identical to SEQ ID NO: 81113

SEQ ID NO: 83610 - protein, 470 aa, Vibrio parahaemolyticus 863; identical to SEQ ID NO: 81302

SEQ ID NO: 83611 - protein, 214 aa, Vibrio parahaemolyticus 863; identical to SEQ ID NO: 81297

SEQ ID NO: 83612 - protein, 416 aa, Vibrio parahaemolyticus 49
MENDNSIKLIDTIIPNSDKHVTISLEGKNLIITGGNGCGKTRLLNQIYENISAQVEQMSHKTADQIRNDISNRERWMNDSSPTNANYHQYKEQIRELELKLADIDKVKVTLGDLVKYCTEFNEKKALLRLFPAVREQSLAHTGSYDSLARLKKEDERNSLSQDSSSQFERYLVAFYNYGSHLLARVDDKAQGAKVDAWFDNVTSQLQYLFEDETLKLDYNAEEQAFYIKQDGKDPYRFDKLSSGYQSILSIYADLLMKVELKEVSAQELSGVVFIDEIDAHLHVSLQRKIFSFFDQAFPKVQFIVTTHSPFVVQSVNNSVIYDLSANEQLEDLSMYSYESILKGLLGVESKSSILDGLIEELATQIQVKKPDWNTIIDLIRRIKPNERNLDTHSSNVLKQAEIQLMDERTKNGTEE

SEQ ID NO: 83613 - protein, 229 aa, Vibrio parahaemolyticus 49; identical to SEQ ID NO: 82363

SEQ ID NO: 83614 - protein, 587 aa, Vibrio parahaemolyticus 49
MRLASFTIGSDREGERQRFKNLKNVTIDFEEQEWITLVIGWNGTGKSNVLEALAVLFRDLIMGKNDKGEKDKPTFAYTLRYFCHHKEIEISADPDRAKDAYLVSYRDLGEKIENTTLQVDLFSELTDDATLLGLKFNEFKKRQDEFLPKYVFGYYSGHSDRLQSVFRPYLQQYDKKLRNSKSEDPGLRRLFYALPVHSQFVLLAFVLNQDDLVRHFLDTQLGLETDENAESIDSVLLELNEPSWNLNKSKDPKGTYGACKDKPDIFWGAEGVVRDFLNRVHKVATAPIKISRKDDATLWNKKGREYLYMFIKDVKRLTELVGDQEPREFFRDLESTYVSELISEVRIRVKLKKNDGSVTFRELSEGEQQLLTVLGLLRFTAEEESLFLLDEPDTHLNPKWSVDYIDYLNKFVTSGSKGENNSHIVLTTHNPIAIAELTRDQVQILSRDDETRTIESHKPNFDPRGMGYAGIITSDMFGLATSVDSYTEDLLERKRQITAKDEALTTTEKADLQSINLELENLGFRFSNRDRVFEEYLRARYEFDSRAESKQKIDQLPSDEKRAASKKLIQQVLAKLKQESGEEDEKN

SEQ ID NO: 83615 - protein, 260 aa, Vibrio parahaemolyticus 49
MRRIDLRKLNPSPDWRARAQSKQSEIDNGLIEAKAASSIWSELKPQLKDLSNGKCWYCESREDRSDNAVDHFRPKSLYPWFALDYENFRFACTYCNSIRKNPETGESGGKGDHFPLLSGTKASNRLQRNTEDYILIDPCEPADVGLLDFKEDGLPCAKYPSQTNRNRRAIDSIKYYHLDHPDLVEARRLLALDIRDWIESADAIYDANDQGDPKTEKAFKGYVSNIAKAISVDAPFSVFAKKMVKGYQDREWIEVLLECA

SEQ ID NO: 83616 - protein, 582 aa, Enterobacter aerogenes
MQLLRILIPTFRNLRDLDIAFATHLQPTASATDAAPKLIRSHALIGQNGAGKSNLIEALLTIFRDVDLDREAAFDYTLEYSIREYMVRIEADTSKQKRPYVWVDGKAESQGYLLKNRELLPAHIFAYYSGRNERIEALFQEHQRRFNQRQEIATDEVLSEQLLENFTGSESDIRAVEEAKRRHESRLKQAGDDRLRRLFYCRGGHSQLVLLACLLSDDPVFQKVLKNLHIESLESALFVLKEPYRLREKRRSGKFDQQELNEGDPRFWYARGNVVSEFLDKLWQVAWAPIEQEATKQIDFRGRTEKQKQLYLFVPNQEKLKQLGELVGSADSFFRYAEGAYIGDLIEEVRIMVKKRDEHGGQVSFTHLSEGELQMLTVLGLMRITREDQCLFLLDEPDTHLNPIWKLRYFDDIEGVMSSDTAAPLRSESQIIITTHDPMMVGSLKREQVYIMRRDGNRTLVDTPDEHPQGMGVTGLLKSDLFGLSSTLDIETERRLFRRNELFVLSPRTLEEDEELSRLSAELADLGFSTADFRDPDYAMFVRKMAQHRRFRKPVLTPEEQTEQDAIADSIIDEILREEDDQ

SEQ ID NO: 83617 - protein, 285 aa, Enterobacter aerogenes
MIWIDLEHKRPTDTNIPNWVPWTQARWDAWLAKSAQLVAALAALDAEDERNERNALIDANSAHWGVLKEWLLALSAGKCWFSEVRELYSHYDVEHFRPKKEAKALDASLRDGYWWLAFDYMNFRVCGNVGNRKKGGWFPLKDGSLCSTYSEPCEESETRYLLDPIDDDDVALIAFDEEGKVIPMPGSSAWEQERVNETVKRLKLNEHPPLAEARRKVWQQVDRLIDDYTKAKARCRTGNNPVAKAKLTEVRARVREMTSTTAELSAVARWCLLVRNDPQLSRLVG

SEQ ID NO: 83618 - protein, 465 aa, Salmonella enterica subsp. enterica; identical to SEQ ID NO: 82624

SEQ ID NO: 83619 - protein, 198 aa, Salmonella enterica subsp. enterica; identical to SEQ ID NO: 82641

SEQ ID NO: 83620 - protein, 465 aa, Salmonella enterica subsp. enterica; identical to SEQ ID NO: 82624

SEQ ID NO: 83621 - protein, 198 aa, Salmonella enterica subsp. enterica; identical to SEQ ID NO: 82641

SEQ ID NO: 83622 - protein, 553 aa, Aeromonas salmonicida subsp. salmonicida; identical to SEQ ID NO: 81450

SEQ ID NO: 83623 - protein, 287 aa, Aeromonas salmonicida subsp. salmonicida; identical to SEQ ID NO: 81353

SEQ ID NO: 83624 - protein, 452 aa, Pseudomonas amygdali pv. tabaci; identical to SEQ ID NO: 81086

SEQ ID NO: 83625 - protein, 216 aa, Pseudomonas amygdali pv. tabaci; identical to SEQ ID NO: 81151

SEQ ID NO: 83626 - protein, 430 aa, Pseudomonas sp. 10-1B
MLKNLTFEGVGPAERLAIDFTPRLNFLTGDNGLGKSFVLDIAWWSLTRTWPRDGIATPRKGASQSSIAYCYEGSTGEFAYKSNFDHESQQWSVKQSRPAIPGVVIYAGVDGSFSVWDPARNYWKGDRGEAAAPNRPRSFDFSPDAVWNGLLSSDGKTQLCNGLISDWVLWQEGSKPAFDDLVKVLDALSPSGVEKMKPGQPMRVGDSVRDIPSLRMPYGQDVPLTQASAGMRRIAALAYLLVWTWREHQLAYERYRVQPAREIIFLIDEIECHLHPEWQRRIVPALLNVMNALTGSREVPVQLLAATHSPLVLASVEPDFDGSRDCIWDFDLVGTEVQASLYPYSRKGDVNAWLSSEVFNLKEPSSVAAEEALGRARTFLREVSLQKEPLTAEQKSTLCDIDSALRGSLSDVDSFWIRWSHFREQRVGHG

SEQ ID NO: 83627 - protein, 219 aa, Pseudomonas sp. 10-1B
MIRVELVDEPESFDETVRKPGLRAIAELVGEEGLSARRGRPRKVVAPTREDIPADKFPAVWTNALPDLMEAYGRLCAYICIYIERVTGGGSVDHMLPKSCSWQDVYEWKNYRLACTLMNARKNNYQDVLDPFEVEDGWFRIELVSYQVIPGEGLDPMTKAQVLATIERLKLNDHDCLKVREEYATAFFDGDIKLDYLRRRAPFLAREIEGRADERILGA

SEQ ID NO: 83628 - protein, 465 aa, Escherichia coli; identical to SEQ ID NO: 81096

SEQ ID NO: 83629 - protein, 201 aa, Escherichia coli; identical to SEQ ID NO: 81537

SEQ ID NO: 83630 - protein, 438 aa, Skermanella aerolata KACC 11604
MAQSGTGFKTLRIEGWRQFDSIEIELHPRLTVLTGPNGAGKSSLLRIFTRHFGFDRQFLATPQHTATGGYSYSPGIFKRFLSKLLSSRQENLSPQIQEPNEIGTLSYTNGKETRLHVPQTSNVQYSVIINNQQAVNGIHIDSHQPIPTFQQVGQIPMTIISPSVAYQSYNSELMNRYQGGYSGHSPTYRMKEAIISMAMFGEGNSQVQGNTEVLGAYHGFVEALRKMLPETLGFIDISIRPPEVVIITRSGEFLIDASSGGLMTLIDLTWRLHLFSLTCEFFVVTIDEPENHLHPTMQRSLMPQIMNAFPQAQFIIATHSPFMVSSVRDSNVYVLRYAEHGNVALGGEQIMPTQSSRVISERLDTINKAGSASEILREVLGVRATIPQWVEEGLNIVVARYRQQPITQDTLKELRRELAKLGYGELYPDALATLTQGR

SEQ ID NO: 83631 - protein, 223 aa, Skermanella aerolata KACC 11604
MIKLNKGHAPPILQQKSAEWTRTVMDKLAGGEEPTKADKGRYAHPEIKAALVAETHGKCAYCESKVRHIAHGDIEHVVPKSVVPARWFDWDNLTLSCDICNGRKSDFHGDHDTFIDPYAVDPEQHFWIVGETVFPRPGCDAAALTERLLGLNRAELVERRSERLKGLMKLLEVIERTVDPNLKGILQADFAEEAAEDKEYAALAREVMRMAHAKLGHAAHQLA

SEQ ID NO: 83632 - protein, 465 aa, Streptomyces iranensis
MYVTRLRLDGVRGFHGPRTVDLDFTRPDGGYAGWTVLAGRNGSGKTTLLRAIALCLAGNRRASQLDDDLEGWLSDGREHAWLTAALRSDSGEDPGSAKAIGKGPRTAEFEVRLQWKPEDALFPESGDVMPTEVRFSGGREAGALWSSSPVGWFHAGYGPFRRLSGAGVYHERQTRAAHRGAASRAAAMRTLFHEQAALTEAVDWLVSAHLYRLEERSGAQDLLDTVIALLNHDLLPDDYRVVEVDSDGPWLCRNDGRGAMFPLHQMSDGFRTVVALVLDIVWRMYTAYGHLDLRWRRIESQGPEPYLPHSGVVLIDEVDAHLHVSWQKRIGEWLKAHFPAIQFIVTTHSPYICQAADERGLIRLPGPDEARPPEVVSEALWKRIVYGTGDDAALSDLFGLDTPYSGEAQELRKELVALEARVVTGQATDEEEDRHEALRQRLKSSPRTRVSEVEARLKRLGAFDE

SEQ ID NO: 83633 - protein, 247 aa, Streptomyces iranensis
MQRIELPRQLVAHAAELTERVTKAEPGERYDLARGLWNHTTQRRKLVTPLRRLLGQMAHGNRCCMYCCDDLSTDVDHFEPLAVNPLRTFDWLNHLLACTTCNSHHKGDRFPLDNSGEPLLIDPTREDPYEHLYLGLENGEYTGLTDKGRATLDVCGLNRDELPDARRGARDVVCMCVSTWQRGREKGNERNMAVAVRTIREQPFADVAQFMLRQAVLPKARVAFAFDLGDETLDLLRVPELRAALLV

SEQ ID NO: 83634 - protein, 396 aa, Bacillus thuringiensis serovar morrisoni
MLVIKELKIDGIGGINSLKLNFNEGLNLICGPNGVGKTTILESIGHMFSNGSRSKVKRNVKFDQGSCEISYSTFLDTIHTQSCILRNYEENDSLDWHGGNANLAKEVIVFKAQRSFTYTQLDSLRKDTETSDGKFLDDSMNGIQFFDFKNWFIHRFLFSHVDNELTTVQKENFKLATDCFGILDNSIRFSSVKSDTFDIIISTSNGEIYFEYLSSGFKSCIYIIHGLIKEIEYRFKNDGGIKVQDYEGLILIDELDLHLHPQWQAKMIYLIKHILPKAQIIATTHSPHMVQAAAINELIALGIDEDADVYVRQLPNVQYGFQGWTVEEILEDVMGLDETRSPMYIEAITEFEKSLDEENEEKIFEAYYKLDLMLHPSNPLRKLLKLQVAQFGRVIE

SEQ ID NO: 83635 - protein, 257 aa, Bacillus thuringiensis serovar morrisoni
MIHLKRPNSPSKLINEEAKLTQEFLQNGNSVWGKPYIKLALLEMSNNKCVYCECRLDEESKYMEVEHFLPKDTYPNLVVNWRNLLPSCKRCNGKKGTHDSKKEPIINPTVDTPSNHIKMFNYCLKGKDLKGKTTVDVLHLNQLDRLVYPRMLIGTKTIETVEKLLEMAENFNLNINATGRIKSRIIHGTTQLLIEAQPHSEYSATVASVLFNNEDFVKLKEIMIKCTIWNTEHQKLLSNAERNILVEPLYNCLNNKN

SEQ ID NO: 83636 - protein, 543 aa, Halomonas meridiana
MRIDWFWLDNYKNLSDLTINFSQDHLITVLIGRNGTGKSNVLEALTIIFRDLLMAERIPSFKYRIAYEIRDRWVFVDADPDRKSPYRAKTISKDDQPEPYPVGALFEDLKGELISRTKLVGEDSMYLPRFLFGYYSGESERMREVFRKYLKSYDDKLIKNLDPGLKRMFFAEPVHSNFVLLSFIVNNKAQTDEFLQKQLGLEEGGIESVLFVLKQPYWYNKNATGGDARFWNSKGIVRDFLAKLYDISLAPIRVKRRELYDVRRSRELEYLYLFAKDIDALRELAQGKSSAAFFRDLESTHVSGLIDEVRIRVKLKKNDGSVTFRELSEGEQQLLTVLGLLQFTSAEASLFLLDEPDTHLNPRWSVEYLQHIRDFLKDENDKNQSSHVLLATHNPIAVAELRKEQVQILKRDDETLSISAQEPDVDPIGMGYAGVITSEMFGLNAAVDTTTQKLLEIQRILSVKSQLSEREKADLEDATSKLETLGFRYQMRDPVYTEYLKARAEKSSLKKRESDESEEALDPDETRRLVLEALKNMEDEGES

SEQ ID NO: 83637 - protein, 259 aa, Halomonas meridiana
MRFIDVAFIVPPEGFADKVIAAQEDDDENIDKHSHIWRECKTSLKHASYDKCYYCEMKDIRSDGTVDHYRPKSKYKWAAYRFDNFRFACTFCNSRRTDQKTGEVGGKGADFPLFEGCVRATCPEESDDELPLLLDPCNAADPDALDYRTDGATVPKSEIETDPQRMRAVTSIEAYHLNHSDLQEARRQTAIEIQEKIIEAEASMKRFTNGDITARQAYSSAIRDLKRRLDQRAELSAFSKRVLQAYRNKPLVEQILAAA

SEQ ID NO: 83638 - protein, 473 aa, Thalassomonas viridans
MKIYELYISNFRKFTKARFRFNAQSNVTVLIGDNATGKSAILNSLSIMISSYLLDFKVPGAVRHIRKDEVHLKQVVHDGVASLEPQWSEGVALSCIGSLHELYQGDDSTFRNAISWSRELTSEASKTTRINAKLITGAGKNARMAVEQGEGVLLPVLAYYGTGRLWHSKKDIPLAEPDSRAIGYRDCLDPASNHNLFLKWFSRLELASIQKRKKYGVLEAVREAVRQCIPQCSNIYFDFEFNQLMTEFEDGRLLGFDNLSDGYRNMLAIVADISHRAARLNPHLGSDAAVNTPGIVLIDEIDLHLHPKWQRIIVNNLREAFPKVQFIVSTHSPFIIQSLKAGEVIDLNATSHLAVEGQLPQAGCLVDYDAEQPAEPSPAKGFSERSIEDIVEDVMGIGLPSRSARLERMYKVAEKYYELLDQGSKASGEEKEKLKAELDQLSAPFSENVAYHAFLERKRIKAGILSQEEKETQ

SEQ ID NO: 83639 - protein, 232 aa, Thalassomonas viridans
MRPVKRGEVPVDSQGQAKQYREYANARKDLISRLGEYCSYCEMELDASLAVEHIQPKKYHEDLELAWENFLLACTNCNSTKGDEDPALEDILWPHLDNTFRAFAYGEEGRVKPAEGLSSELKRKAEAMIALTGLAVTPDRQTASDRRWLNRQEAWREAVAAKEDLLESDTPAMRRQIIRTARAKGYWSIWMTIFHDDIDMLTRLIQQENFAGTAQGCFDASAEPIARPGGQI

SEQ ID NO: 83640 - protein, 391 aa, Paenibacillus sp. IHBB 10380
MLKIENLYIQNINSLDRVDIKFNKGFNIICGQNGTGKTTILNCILASFRRKKLGILNVNTMGNHGFWEIDYYNNDRLNSRVHYIHNDDDLNYSQHIKGDKLISSNYIISFSVNNRHMNAQNFGVNSLKQWLYKNYYRSDLTDSKENNFSLVKECFSMIDPNIVFHKIEEVIDERKLMKNQYRVDVSHSIELFVRNHRGIIKIDQMSSGYQSVLVILLSLVRKIESLDRFGVSVYNFEGILLIDEIDLYLHPEWQKKLIEIIRWLLPNAQIITTTHSPHVIQSAKPGEIIPLGIDKYGEVYIRDLPDSSEFGYQGWTIEEILMDVMGLKETRSDEYKKAIKEFDKAMDNEDSNRTVKSYRRLENMLHPNNPSLKILRLQIASIGGLENDTDK

SEQ ID NO: 83641 - protein, 250 aa, Paenibacillus sp. IHBB 10380
MIRINRLSCPPELTDDKKRELTQKFITEKHSVWAITYIKDALFKMSNGKCCFCECKLGEEGKYMHVEHFHHKDSYPTEVVEWKNLLPCCVRCNSNKGTHDTVIEPIINVTLTDPRDHLIIDNYRFRAKNNSQLGRTTIEVIFLNDSDQLVNPRFDIGNKAKESLELILDKAQEYKNGISTSTRRKNIIINGLKSLLKEAHPDSQFSAIVATVVLKDINYTELKEILNSLNLWDEELQRIEFEVLNTSFYS

SEQ ID NO: 83642 - protein, 478 aa, Agrobacterium arsenijevicii
MLIKTVKFVRNGTTSEEIELSRASENSANFFTVINGENGTGKSALLRIISDGALGLEASRQSKLYASEIVLGVSGTISRTIALSGTHNDRFPLNTGVELRMNSSRFDLMEFHYFGPKQSGYLASAARAANSIVHSLLTEETWSHAGNQNAAYLLDYLGFRPELRIGFSLNSKKMQKDYYNYLNHLQSHIAEIELELPSASKLSPTIRLSVQSAQRILEDRKVRLRASKRGALFTSLDLINGRQFLNESHEFLELVGVEPMVTPSQWLADLIALGVLTATLEVESAGGKTAKQDLGELSSGQWQLINTLLNLCLIVKDNTLVLIDEPENSLHPKWQSEFIGLVRKLISHRSGCHVVIATHSPLIAASLLPHEGELIGFKRSGIGNTIEVQREGIAYGWLPGDVLTDVFDMNSSRPPELTKAINRALELLKLDKTSSKELRGIARNVRILRRSLPNHDPLNPVLNAIDSIAFPQDKEHQV

SEQ ID NO: 83643 - protein, 258 aa, Agrobacterium arsenijevicii
MAYYRIPVDTYGEEIVELFNIATASGRDWGSSAHDKAKLALKTALFDAQGGRCAYCRRPIKWEIGHNEIDHILPKSPSGNENKFTLNDRDSRRSTAGYPGFTFTPKNLALACRRCNQRKGTFDARKHRNVDPEPAYSVDDNYYEWVHPHIHDYSDHIEILEGFIFHAKEASPNGECVISVCGLDDVATVERAAADLRIKNAEDYAVALGSMLHQLKDYGWAHIIEAVQERFPDIPPEEIAFTAAIFESGLKRGAATTR

SEQ ID NO: 83644 - protein, 277 aa, Morganella morganii
MRSERTPAEYRVEYLKNSFQNLANGYVPEVKQWMINRYFIIEKDWAIEERKNWEYIISHLDFIFGGDKRFSFGNIERDLEPSFILDGSLVYLEDLSSGFKSILSIVLSIVEWIEKTNDRTNMDIKTADGVVLIDELDAHLHPSWQTKIRKILKTIFPDIQFIVTSHSPHIISSAEAGEVIVLKRDGNDMSYDIIDKPLDAWKTDDIYSLVMGVNTVHQQTLSDIVNKIEDLINGELFDEALELIDEYSNKIPESDPTAMILRKQINSVQLKIERGIK

SEQ ID NO: 83645 - protein, 241 aa, Morganella morganii
MIKIIRGNEPDVLIAKKVTWTQGLLDEVEKYQSYDNIPDDIKKKITSRYRNEHIKSVLFSTSHDKCAFCECIPSEGGNYVQVEHFHPKSKYPSECFEWDNFLPCCGICNNNKGILDTKNVEILNPYDDEIEGAFSVSYLKLLPNAQNQKAINTEKEISLNSDRLIVSRVGILMKLQIQTEEIRQWIDVLLESDTDRKYQIRINKLKDKINTVEAFIKPECSHSFFCSEIIKDDIHYLKAKN

SEQ ID NO: 83646 - protein, 415 aa, Photobacterium leiognathi
MSGYLTKIKTKIPYSDKVVDIDVNGKTLILTGGNGCGKTQLLNYVYEKLIARVIKRNNSTIQKLQQSIVNLEQLINSEGPTNRSYDTWVRQIEDAKEQIEELENPPINLSDLEDFVLKYKDFRAVLLQFEAGRKSDILKPSSVAPIDSLKEKDRDTVSRPHQQKTTSSIFEEFLITSIANQAFSESKKINNNPEEAERIDKWFNKLEADLQKLFEDNELKLVFNSDSFSFKIHQPSKEPYTFQTLSSGFSSIMAVYADLIAKVSLRSIDPEELTGVVMIDEIDAHLHVSLQKKILSFLTRAFPKVQFIVTTHSPFVVSSVDDAVIYDLSKLEQVEDLSMYSYEAVLEGLFGVLPISNLLQQNIEALAKLLEKHPINLDEVQSLLDKLPQDEDSLDSESLYFVNSAKLAINKAKRQ

SEQ ID NO: 83647 - protein, 222 aa, Photobacterium leiognathi
MFNVVRNEPVPASLAEKRKYGSEDVWKALNKVFHKKCYICETSEPQDINVEHFVPHEGDEDLKFDWNNLYFSCGRCNNIKLAKYDDLLDCCDPDTDVVRAVKHLPPSTPYAKRLQIEAQHDDDKTKLTAELLDKVFNSEHTPNKAVSAAFLRKRVFEQYNLLLKQLNNYYDPIALPEEKASAVERIKLLLKATSPYSAFISWCIMEDEELGPMLQDFIGIPE

SEQ ID NO: 83648 - protein, 537 aa, Escherichia coli
MKVDKLHIRSRFKNLENVKVDFDEDHLMTVVVGRNGSGKSNVLEALVAIFRNLDLGEAPPFSYELVYRLGECHKPNQPSERWLEITIDADPKRGTLAKQYEVCMRDLLSNDTSKDMFDEQPSGIVIPFSKVKRDKSGKAPYLPNYVFAYYSGPSDRLESYFKKHRTDFYRHLLNDKPDKKLDLKGDIRPLFYAKPYHSQFVLLAFFLSDENSPQRKFIKEHLGIEDLDSIHFVMRQPGWAKQKGELFWGARGVVRRFLDELIKYALAPIKVTRQEDTSLTGNNVRNEFFHLFLPNIEVLHTFAKGLSDDELFKMLESTLLSEIISEVSIRVKVSGSKEPLTFRELSEGEQQLLTVLGLLKFTGGKDSLFLLDEPDTHLNPSWAVKYLKFLREFVPNQETSHLLMVTHHPLAIAELKKEQVQVMKRDNQSQISAKMPIESPRGMGINLILRSDMFGLQTTLDDDTNQRLTSRNELAAKEILSKEKIIREPGFHPEDEEQYLARLNTELEHLGFNLATDDPDYLEFLRQKYHTKNEENH

SEQ ID NO: 83649 - protein, 269 aa, Escherichia coli
MRWICKDEIEECLTQAWREMADRAKAELIAAPDEAARKAILKRAASSNIWREFYNLLPDSLKRKCWYCEAEEIRSDMPVDHFRPKNKVEDDRQHDGYWWLAFDWQNYRCACTFCNSRRVFDETKGGKACRFPLENPEERAFTPEDQAKLSNERPYFLDPFNPDDEKLLWFDNDGLPIAKPLATTEQQTKVRNSIEIFHLHESRIVRARNKVRLEVERQIRKIKDNDDVQAAKAKLRRMVRDTEKLSRAAVVYLRAHRELPEVKDILDLV

SEQ ID NO: 83650 - protein, 470 aa, Vibrio parahaemolyticus; identical to SEQ ID NO: 81302

SEQ ID NO: 83651 - protein, 214 aa, Vibrio parahaemolyticus; identical to SEQ ID NO: 81297

SEQ ID NO: 83652 - protein, 409 aa, Vibrio parahaemolyticus; identical to SEQ ID NO: 81298

SEQ ID NO: 83653 - protein, 221 aa, Vibrio parahaemolyticus; identical to SEQ ID NO: 81113

SEQ ID NO: 83654 - protein, 573 aa, Pseudomonas pseudoalcaligenes; identical to SEQ ID NO: 81696

SEQ ID NO: 83655 - protein, 270 aa, Pseudomonas pseudoalcaligenes; identical to SEQ ID NO: 81697

SEQ ID NO: 83656 - protein, 413 aa, Clostridium sordellii
MNTKYISSLHVKGFRLFETLNVRFNPRFNFIIGSNGCGKTSILRAIVISYSQYLLEDSRLQSNFEAWIDFIENDKKNRIGVLPSNYANIRNDYRSSQSIPADKPPTDEGCESYYNYEAEKLKFAPLVLGAFRKIDYRRIEGMRREENLTESIRKYIQNAPSSLNGGYLPDIKQWMINRYFQIEKEWAYIEKSNWDWLIKNIDTLAPKDSKFRFIKIEKDLEPVFTINDKECYLEELSTGFQSILSMVLAIFEWIEATNEKDDKLVKNAAGTVIIDELDVHLHPEWQLILRDSLEVMFPKLQFIVTTHSPHLIASAKEGEIIVVPEKNTNLDLYPRKDKYSGWNTDQILSELMGVKSLDNKEYFRMVEKGMEYINEANIEGLSHIIDKLEEIAHPSDTIISVLKIKQASLSLKD

SEQ ID NO: 83657 - protein, 255 aa, Clostridium sordellii; identical to SEQ ID NO: 82307

SEQ ID NO: 83658 - protein, 430 aa, Aliivibrio wodanis
MKLHTVSVKNFRCYKDETFRFHPQVNLIVGQNATGKTAVLDAVSVAIATWLLGFKKKNDKKRLEPSDAALSYVEKEDEAQFIEAWPVVVSASGMVKEKTISWERSKESPAGNTRYGNAGDLISLAKACDDNLADDISLPLISYYGTMRLWQDPKASKAKPSLTKSSAKPSRLDGYKHCVDPRIALKELVAWFARQEWQAFQLGKEPTMLTVVRKAVVSCIDNAEQLRYDPKREELLLTLKDAEPQPFNLLSDGQRCVLALVADIAQKAALLNPHLGEAVLEQTEGVVLIDELDLHLHPKWQRHVIEDLRTTFPNVQFICTTHSPFLIQSLRSSEELIMLDGQVPVQVANKTLEDIAVGIMNVNSPEVSERYSKMKGVATEYLKALSETDMVAEDKLEQYKERLANSLAPYADNPAFQAFLEMQRVAKLGE

SEQ ID NO: 83659 - protein, 245 aa, Aliivibrio wodanis
MRPIRKGVSPVAGDFNKYEDAKPELVSRLGLYCSYCERKIVTLLAVEHIEPKDGAYGQPHLEKQWSNFLLACTNCNSCKGSKKVDFKRLLFPDRDNTFYAYSYDFDGTVHYSPQLLPRQKVMARNTLRLVGLEKPVQVFTDSNNQQVALDRSAQRMEAFGVAQVALSLLENEPNSDSTKAAIVMMAKQAGFFSIWMKVFNAYPDMKVRFIQTFEGTAESGCFDMTTGTSIVPALNSDRLTQGGKV

SEQ ID NO: 83660 - protein, 540 aa, Vibrio cholerae; identical to SEQ ID NO: 80874

SEQ ID NO: 83661 - protein, 205 aa, Vibrio cholerae; identical to SEQ ID NO: 80875

SEQ ID NO: 83662 - protein, 358 aa, Saccharothrix sp. ST-888
MYVARLGIDSIGGFRGERALDLDLTRPDGSHAGWTVFAGPNGSGKTALLHAVAHALGCGPGDPSWLDEGEVRIVDSGAEELRWRLIRTDGVLAEHRSGARTAGAPVATRLYGSASLDGGPHWPAGRRGESLLALLGDGLLPDGHRIARLDRDGLWVARGGRALPADALGAGVRAVLALVLDLLGAARSADPDEELVIDGEPPTVPAPGVALIDEAEAHLHLARQQWLGEWLVAHFPNVQFLVSTHSPYICQAADPGGLIRLPGPTEQAPPRVLDEDLHQRIVYGSGDDTALTELFGLPSVHSPQAEAERRLLIALERKLYAGKASTADIAEYRALGARLNSSLTARVDEARTDRGGTR

SEQ ID NO: 83663 - protein, 245 aa, Saccharothrix sp. ST-888
MIPLQRPPLHDRLAADLARRTDALRTAGPSTATGRAAWRTAREPKARLRALLNRMAPGLVRCMYCGDNLGTDIDHFEPIARAPLRTFDWHNHLLACAYCNSNRKRDRFPCDPVTGAHLLIDPSREDPADHLQLYLESGAYRGLTPKGHATIDVFGLNSRGELVRGRRLAFTVVKSLLREWHRQRGAAPDLAGELTDALAVLWQADVLRAVLRLTRTPALAEVVLGAEAYAALSQLADEEPRFGTQ

SEQ ID NO: 83664 - protein, 469 aa, Enterobacter sp. 35699
MKIEQVSLKNFRCFEQLDVTFHPQLTVLTAPNGAGKTTILDAVRIALWPFVKGFDLGSQTGKSATIQIEDVRLERREQEMEPILPCQITAQATGIPIREKQPHLFEWQQVREQVKPRTQSKGDRSTQVLTRLAKNYQSVIYKGQQAEADTIELPLIVYLGTGRLWYQGRYTSEAEDKKLDVSVFSRLWGYQNCLTATSSYKQFESWYGWVFRSYRELQIGQLENQIKPQDQSSLAYFSAAIEVVQHAINTLTSSLTGWHDLQYRASMGQQLVMEHSQHGYMPLAMLSDGLRNMVATVSDIAFRCIKLNPHLKDEAAQKTAGIVLIDEVDMFLHPAWQQQVLGALQEAFPLLQFIVTTHSPQVLTTVAKENIRQLGSDEHGAYARIPPFSPLAHENSDALAKVMETHSQPSLPLQETISEYELLVRSGEETSERATTLLATLEQAGYQFHESDLATWRFLAQRKLAAKGS

SEQ ID NO: 83665 - protein, 197 aa, Enterobacter sp. 35699
MIELQHRAMPTPALTQYRTANPAATAADFDSTAFKAVKDAVKADLHQDQGVLCVYCEQHLKSTEGQVEHIKPKAGANAHPHLCFDYYNYAHSCINNQTCGQRKGNGLLPIEPGPSCNQQWAIASSSGWVEPLPTLTRRLRHPVVQTRDMLGLNKDPNLVSERKKWFTQAVTVLKTAPDDFDQFLRLAPFRALIAASI

SEQ ID NO: 83666 - protein, 391 aa, Enterobacter cloacae
MLSADLLLHSPNDYFILVGKNGSGKSILLHDLAESLHNEGYSTVAVSNTLFDKFEVHPNSFNYDYIGSKLGRNFPAQAIKRTLSTKSQNKVSRIFSVLNHIGYEQSIGIKVKFRKKFKDAIRYSRNTSGDIYPVFFDSSDQEIPDELKMAIDKAIHQVNYGYSTLIWLTNDDNVFYEGNFDSYLLLLSYERLLKKANIISGIEVLLTKDDVSFPLKHASSGELSFIALLVHLAFCVNDSSFILIDEPENSLHPKWQNEYFELLKGAIGYNRCKVIVATHSPLIIASASEDNQVSIYKRGINGFSQINSYDDNAEELYIDYFDTLTPKNRALSNRCVDIIDQFSSGQISLQTARERLQEFRKMANDLAQMKFLSGVDVLLDKVSNGKGKTHG

SEQ ID NO: 83667 - protein, 197 aa, Enterobacter cloacae
MDHAVAQGHQFWSDSSLEAIKRKIKDYLRENQKHCCCYCSRNIDDEFNMVLDIEHIIPKSKIVSEMFQMNNLAVSCKRCNMRIKGEDISFIDADFQSFKEAGDYYQSNSYKFIHPNLDTWDGNLNYIVAQVNRRKVVYYQVVDDSPKGTYAKKYFELDKIQANTFDEAQEATARKEPNDPEIAKEFSKLVTTMLGQE

SEQ ID NO: 83668 - protein, 391 aa, Enterobacter cloacae; identical to SEQ ID NO: 83666

SEQ ID NO: 83669 - protein, 197 aa, Enterobacter cloacae; identical to SEQ ID NO: 83667

SEQ ID NO: 83670 - protein, 391 aa, Enterobacter cloacae; identical to SEQ ID NO: 83666

SEQ ID NO: 83671 - protein, 197 aa, Enterobacter cloacae; identical to SEQ ID NO: 83667

SEQ ID NO: 83672 - protein, 552 aa, Enterobacter cloacae
MEKIIRTLKSKAQKNDILANYTLYDKYLEGEDTKSNINIAMQYLNKCYELLEMREEVHEKPLSRLKIEKLILKDFRKFRELEVTFHDKITVIIGDNGSGKTTITDALAKLLSWLSARIETAKKGAKTLTPSEININSEDFSEIISHLSFYNKNIFSSSLSRPTLGFKGRKVSDLEDFNNISELYRVVNASSKENYDRELNLPLFCYYSVDRASSYSTFNSNSNSQEPQSRFKAYNGALDGPGRFNEFFDWFLFINNYLGSSVVNTPEELSLIKEIEAFEELKLDVNSPLFSIYKEKKKSFEKIKKSKDNELNKHVMLQNDVVKKAIISSVTSVSDIFTDSSTGKHELKIINDGVLININQASQGQKTLIAMIADLSRRLVLLNPNLKNPLYGQGIVIIDEIELHLHPQWQQSIVHSLTSTFPNIQFIITTHSPQILSTVDKDCIRKIKETTEGNYEVYTPKFQTKGVQSTKILEYIMETNSIPDLEEARRVDLFSSLLQQGKKEKALEVLEILKEHFSEFEGQEHPVIQKCINQLKIYDMKHRILGNKDNDK

SEQ ID NO: 83673 - protein, 223 aa, Enterobacter cloacae
MKKLNRGLSTPPTLLENYSYLTNSWDDITSRKKRKIWREIKKFQEDFCVYCELPASYGNGHIEHFFHKGENDDGAKPFIHLTFEWNNLFGCCASSTHCGHYKDQILVGGLHRKYDPNKLLKPDDLDPQNFFVFTPSGDIIPNEEINDNDKEIAEETIKALNLKEPSLQSSRRSQINACTERLLELNSIEGIIPENQFNAEYTKIMNEFSIQKHRTAVKQTCFI

SEQ ID NO: 83674 - protein, 360 aa, Burkholderia pseudomallei 7894
MLLTYTSQAGRYEFVKDGQYSDSTANTFSIIVGKNGTGKSRLLRAVVLALFGGEIREELVDPRDRAELRQLAFELDTTRAPTQVICVATSPFDRFPLLRRSQNIPGYTYLGMRGLSSANQSLAYLSKIANTLVDSVLSDERQAGAIAGVLTYLGYEPSIRLSWQPLSQRLIDDLTQADDLHHATHELIRRGPPMFPNEVASNYQRIIDTPPHKLRQALELARNLRIEKFSRFVELRLSQDGFATDGYYGINLEEIFLLVNTGLLRLRQVELCKSGSNEGFLISHASSGEQAVVLSLLGIGSQIRDGSLVCIDEPEVCLHPEWQEKYIQLLYSTFQHFTGCHFVIATHSLTCPLQTGPAGV

SEQ ID NO: 83675 - protein, 217 aa, Burkholderia pseudomallei 7894
MPDIANPVAYTDDLSRLVQSKVNDPAFTHQQWGHDDLEPLRSHVRAHYRNEQRAICSFCRSPLGLRAAENCQVEHIVPKSIRPEFMFEPKNLCVVCADCNAIKRDQEVTASIPNTVAPRRAQQRYPRTTAAFLIVHPHFDTYSEHILIYHGFYVDRSPKGRFTIGACKLNRRLHEFGWDENIVNRPTLMEAAQQYVDSEPGVDRLSALQRLREEVLS

SEQ ID NO: 83676 - protein, 429 aa, Burkholderia multivorans ATCC BAA-247
MYIRRASIKNIRTIKEFTLVFEGAETAGWHVILGANGSGKSSVVRSIALALAGPKEAAALRQNWNTWQRNGSSHGRVEMEIEAGPKDIVTGKGRGYAMIEYALEFRPIESTIGGPRVELVAHKDGKTKAERSVWGTNSGWFSASFGPFRRFSGGDQAFERLYFTNPRLACHLTAFGEDVALTEGLRWLRDLRVQQLESSPDSGRLLDKLVDFLNASDLLPHGAKITAVRAEEVLLEDANGFSVGVEQMSDGYRSVLSMIFEILRQMTKSYGSDNVRGALDVESTTVKLPGVVVIDEIDAHLHPTWQRDIGPWFTKCFPEVQFIVTTHSPIICRSAKSVWYLPEPGTEEKSHRVEGVALQRLIHGSILDAYGTEFFGRDIARSDDSKDLLAELAILNRKALSSKLSDDERTRMQKLRAMLPTDATDTSTE

SEQ ID NO: 83677 - protein, 282 aa, Burkholderia multivorans ATCC BAA-247
MLRISDKDLAASANTVLNQMQSQVNREAAYPDQVTKALALWDAKRGSKPRREAFATIRDTLATMCIGPVRCAYCEDSAADEIEHVYPKSLFPERAFQWSNLLFACGPCNGPKSNKFGILALGKVVEFCRTKDKSDTPPPAGISALVDPRVEDPTELLELDLGGVTPDGHKISGTFMFVPRSGISESEEARAIFTIDTLGLNREVLRMARRNAFSGFRARLWEYVTKIKGNAPAEALDHLRAEIISTPHLSVFFEMRRQRSALPEVDQLLKDAPDAALWRLSP

SEQ ID NO: 83678 - protein, 470 aa, Vibrio parahaemolyticus; identical to SEQ ID NO: 81302

SEQ ID NO: 83679 - protein, 214 aa, Vibrio parahaemolyticus; identical to SEQ ID NO: 81297

SEQ ID NO: 83680 - protein, 409 aa, Vibrio parahaemolyticus; identical to SEQ ID NO: 81298

SEQ ID NO: 83681 - protein, 221 aa, Vibrio parahaemolyticus; identical to SEQ ID NO: 81113

SEQ ID NO: 83682 - protein, 411 aa, Candidatus Magnetoovum chiemensis
MRFKKLKITNWRQFEDVEIQFNERLTVLTGANASGKTTILNILAAHCGLGWDTTFLATPEMDKASRNWKWNDSSPSDSYDSSYNKIGEIEYSTGDKCDLSIGSNHGAEYKILFAGKEDVSGFFIPSHRAVFKYQQMLNIPREIIDKTQAFKKGYSGNKTRYFGTTNVQSISFNIKETLFSWNIFGRGNPEIEPNEVLLEYYLGFENILKKIIPHEVGFKKFVIRNFEIVLECESGDFILEAVSGGLSTIIELAWLIYCLVEKDEQFTVLIDEIENHLHPTMQRRLLSYFLDAFPHVSFIVSTHSPLIVGSVRESEAYVLTFNDKKKVVSQRLDLKNKAKTASEILDEALGVSFTMPIWAEEKLNEIVNKYVKLEITETTFYDMKAELSEVGLERLIPESIANLIKQKDDKN

SEQ ID NO: 83683 - protein, 191 aa, Candidatus Magnetoovum chiemensis
MIKINRPPCPNPAALRSNYKDPENKGALKDASCGKCMYCESKVTHIDFGDVEHIKPKFKYPELEFAWSNLGFVCSKCNNSKGKKYDETTPYINPYEEDPDDYVVAFGSVLWPYQQNERGQLTIDDIQLNRTDLIERRKERLASITKYIGAWQGTRNEFLKRIALQELKDECCEDKEYSLFVRAFLKLHDII

SEQ ID NO: 83684 - protein, 540 aa, Vibrio cholerae O1 biovar El Tor; identical to SEQ ID NO: 80874

SEQ ID NO: 83685 - protein, 205 aa, Vibrio cholerae O1 biovar El Tor; identical to SEQ ID NO: 80875

SEQ ID NO: 83686 - protein, 445 aa, Xanthomonas citri subsp. citri; identical to SEQ ID NO: 80878

SEQ ID NO: 83687 - protein, 127 aa, Xanthomonas citri subsp. citri; identical to SEQ ID NO: 83525

SEQ ID NO: 83688 - protein, 445 aa, Xanthomonas citri subsp. citri; identical to SEQ ID NO: 80878

SEQ ID NO: 83689 - protein, 127 aa, Xanthomonas citri subsp. citri; identical to SEQ ID NO: 83525

SEQ ID NO: 83690 - protein, 445 aa, Xanthomonas citri subsp. citri; identical to SEQ ID NO: 80878

SEQ ID NO: 83691 - protein, 127 aa, Xanthomonas citri subsp. citri; identical to SEQ ID NO: 83525

SEQ ID NO: 83692 - protein, 445 aa, Xanthomonas citri subsp. citri; identical to SEQ ID NO: 80878

SEQ ID NO: 83693 - protein, 127 aa, Xanthomonas citri subsp. citri; identical to SEQ ID NO: 83525

SEQ ID NO: 83694 - protein, 445 aa, Xanthomonas citri subsp. citri; identical to SEQ ID NO: 80878

SEQ ID NO: 83695 - protein, 127 aa, Xanthomonas citri subsp. citri; identical to SEQ ID NO: 83525

SEQ ID NO: 83696 - protein, 447 aa, Peptococcaceae bacterium BRH_c23; identical to SEQ ID NO: 83478

SEQ ID NO: 83697 - protein, 149 aa, Peptococcaceae bacterium BRH_c23; identical to SEQ ID NO: 83479

SEQ ID NO: 83698 - protein, 439 aa, Peptococcaceae bacterium BRH_c23; identical to SEQ ID NO: 83476

SEQ ID NO: 83699 - protein, 229 aa, Peptococcaceae bacterium BRH_c23; identical to SEQ ID NO: 83477

SEQ ID NO: 83700 - protein, 169 aa, Candidatus Magnetobacterium bavaricum
MVLELIMRMEPHRTNIYNIQGIVLIDEIETHLHVSLQKEILPLLTSFFPKIQFIVTTHSPFVLSSIDNAVICDLENRIIASDFSGYSYDGIVEVYFDNDTYAQDVKDKIREYELLVKKYTTLTKEEKSRIIRLRMYLQDIPAPLSRGLKLKFMQIESKRKENESRNFTG

SEQ ID NO: 83701 - protein, 193 aa, Candidatus Magnetobacterium bavaricum
MVNVKRSYPEPIALSKKRTKGRGKPSNIKLSKIKGVLGTLKRDFNNKCYICEQKEFTDMEIDHFIPHGDDKELMLCWDNLFFVCGHCNSVKSDIYNNIYTPIFDDKEILNCTDPHHDVVNWIKYEHDLLSEPMVILTTVVNDEAYRKIVDNTVELLVYVYSGKSIAQEHQAENLRKSLEKEMVYFYEILQQYY

SEQ ID NO: 83702 - protein, 381 aa, Candidatus Magnetobacterium bavaricum
MTDEDIYITRVNIHSVRHLKDIEIPLSEIERKHLIFTGINGSGKTSVLEAIKEYLDSHKERSVLTDNSRIELFFNLKIYYSSYYTLYHTGNHILAFFNAKRKAELIQPNGIKKVDLKKLYSFNDKASSEFIQHIVNLQVDRLFAEKGNEIETVNKIDNWFEMFEQSLKYLFEDNEVKLEFDIKNYDYNIVKKGREKFTFNQLSDGYSAIFDIVSELIMRMESYRTKSYDIQGIVLIDEIETHLHVSLQKKILPFLTSFFPKVQFIVTTHSPFVLSSIENAVICDLQNNIIASDFSGYSYDGIIESYFDIDKYSQDIKDKIEEYERLALAETLTEEEEGRMIELRIYLKEIPAFLSKGLKLKFMKIESKRREKHISAATQLV

SEQ ID NO: 83703 - protein, 237 aa, Candidatus Magnetobacterium bavaricum
MVNIERSYPEPEALAEEKKKVNGKPNETTILERLQTDFKNKCYICEQTSLASGITVEHFVPHRNNKELKFQWENLFFSCSHCNSVKSIKYNTNDDNEILNCTNPNHDVVRWIKYEYDISYKCSVKLTADGIDKEYKKVIDNTVKLLTEVYCGNLSTQKSKTANLKLEAANLRKSLENNLICFEMSLQEYEQSMYFDEKKQCIKKIITELKKDSAFTAFKRWIIMKSKYRLIFEDYFD

SEQ ID NO: 83704 - protein, 545 aa, Streptomyces albulus ZPM; identical to SEQ ID NO: 82098

SEQ ID NO: 83705 - protein, 369 aa, Streptomyces albulus ZPM; identical to SEQ ID NO: 82099

SEQ ID NO: 83706 - protein, 545 aa, Streptomyces albulus ZPM; identical to SEQ ID NO: 82098

SEQ ID NO: 83707 - protein, 369 aa, Streptomyces albulus ZPM; identical to SEQ ID NO: 82099

SEQ ID NO: 83708 - protein, 540 aa, Vibrio cholerae O1 biovar El Tor; identical to SEQ ID NO: 80874

SEQ ID NO: 83709 - protein, 205 aa, Vibrio cholerae O1 biovar El Tor; identical to SEQ ID NO: 80875

SEQ ID NO: 83710 - protein, 212 aa, Elstera litoralis
MGEVPVTLASAGIIKILSLAYMIVNFWQEHKFAAKIQGIEHSKALLLLIDEIETHLHPKWQRKILAAVLEVAKAITEDEGFQVQVICTTHSPIVLTGMEPHFDPKIDQIFNLKLPPAANGDTARVKLDPIDFEKHGSVGEWLIEVFGEGDIPKENAEALEKRAALFEQKKPTQAEIDEVDRLMRAHFAPDHPERTHWVWLAKQKGLTPRGQQ

SEQ ID NO: 83711 - protein, 202 aa, Elstera litoralis
MIPLILADEPHWFDAGVRQKGRAHLATVEAQRTEPLQSKHFQAFWARYTREIHAIYSGICAFTGLYIDFDEKIEDQKVSIDHFRPKVKYKSLAYEWANYRLCMKKINQRKGDSEEIIDPISIPDNFFYLNIDDGSVKLREFPGHETWVEACKTTIDTLGLNNKHLRRRRSQLIQSYRISGDKDELKFRAPFLYYALKYQGVI

SEQ ID NO: 83712 - protein, 535 aa, Pantoea sp. SM3
MKVDKLHIRSRFKNLENVLVDFDENHLMTVVVGRNGSGKSNVIEALVSIFRNLDLGEAPIFSYELDFQLGKEGGTKWYDVKVDADPSRGTLAKQYQVFVKDKHSSQTDYKLIPFSKVKRDKNTKQAEYLPNFLFAYYSGPSDRLEKYFRKHRDDYYRELLYNKLDLKDDIRTLFYAKSFHSQFVLMAFFLSPKFEKERIFLKRELGIESLDSIHFVLRRPAWERDKDDMFWGADGVVRKFIDLIYPHALAPLKINRNEGTSLTGKKQKNDFVHIFLPSVEALHEIAKQLTPSVFFKMLESTVLSEIISEVHVRVKVTYTQEPITFQELSEGEQQLLTVLGLLQFTGGKDSLFLLDEPDTHLNPSWAVKYLKFLREFVPNHETCHLLMVTHHPLAIAELKKQQVQVMWRDEKHCVHSQEPYLDPRGAGFMGTLTEIFGLNTTLDLETQKLLDDRNELSHIEARTTAQNTQLDILNDELNRLGFSFENRDPLYSDFLLAWKDLTYSDKPPLTPDDAAHRREAMKKVIQILQAKKVGE

SEQ ID NO: 83713 - protein, 280 aa, Pantoea sp. SM3
MIYIKRDASLIPEKVFDVAQRAQNELERLPVEQRKDFIKKKSHIWRGFAKYLAKMSYGKCWYSEAKDAGANFDVDHFRPKAEAKREENLIDAEGYAWLAFDWENFRLSAQNCNRLNTDLSGITVGKGNWFPLLTGSSKATWDNRCITDEKVMLLDPVVQTDLTYIDYDDSGRFTSSRHCIGQAALRIQQSAIIYGLNFERMREARFQIMKEAKELLETIHQSVADFYLMGDEAPMRTIERQIEQLKAKTRADAPFSRAIRAQLIKLGAEDYLIDRSLDVA

SEQ ID NO: 83714 - protein, 442 aa, Komagataeibacter intermedius TF2
MLRLKSIEICNFRAIKHGTIRLDRYLTVLVGENASGKTAILDAIGYALTPLFAGALRGRSVVEFDDFRVEGLADPAGEITRVPIITLVTETDDEEWTIDFKLDHDGRRQNISGVLSGPVRNLPKEVARNEPGGAPIVVSYMADRGMPSKRSASAAANAKRHAGATGRAGGYIGALDSRAVFEEAVEWFEAIENLELRNNREIAGSYHDPRLEAVRRAIKKLVPGLCNPRMVGLPPRLMVDAVLPERPPESLSVDQLSGGYRAMLAIVMDLARRMAELNPDLPEPLSTGGIVMIDEIDLHLHPKWQQLVVNGLRTAFPQVQFILTTHSPQILTTLDPKNIRNLKWRDGKLLQEDVPSTSGAEAGRLLAEVMGVSERPPATISRFVDLLDRYRNIVLQEKWDSPEANTLLSELREASPDDPILGALNLERRRLSAQKRRAADEA

SEQ ID NO: 83715 - protein, 271 aa, Komagataeibacter intermedius TF2
MKHSSPLPAAPHLFAEYLANAAPATWKGFRAEARDAYDELCEALSARQRGLCVFCEIDLITSQGFHAREIEHWRPKSLDQHGAMDWTFGINNLQLGCLGGSRRWPLADHDRTGDPKPGPNLSCGASKGNRDPALPMDGVLPYRPSDLPEGPTMFVVASNGEIRPVGNCAAHGLDAARLIATIAFLGLNCTRLKNAREAILRSLDEALLQYLENAEGNSEDERFDVAYQNLARDSAPDPVGNLPPFVSTIRSFFGPNLDPVLFPISGWSNGD

SEQ ID NO: 83716 - protein, 457 aa, Escherichia coli; identical to SEQ ID NO: 83044

SEQ ID NO: 83717 - protein, 211 aa, Escherichia coli; identical to SEQ ID NO: 81031

SEQ ID NO: 83718 - protein, 457 aa, Escherichia coli; identical to SEQ ID NO: 83044

SEQ ID NO: 83719 - protein, 211 aa, Escherichia coli; identical to SEQ ID NO: 81031

SEQ ID NO: 83720 - protein, 552 aa, Enterobacter cloacae
MTKQLERSARGGNLLAAFELYQRGTDNSPSDEIIEKAEEWFSICWNYLQNAVRDDEANYKPENAFCIRTLSLTDYRRFSHLDVNFEDDLTIIIGNNGRGKTSILSAIAKTLSWFSANILKEDSSGQRLSEYTDIKNDSVDKFTDVSTSFFFGKGLKHLSVRLSRSALGVAERRESIVKPAKSFGDIWRIINETRTVNLPTFAYYSVERSHPLSKPAKDGTDRRDDRFDAYNHALTGPGRFDHFVEWFIALHKRREASSSSQLDELQTLVRDLQRSVDGGMLSLRPLLDDARRKIQIAQLKDVTTAKNMHSVAAQMTIVASAITAVVPSISNIWVETASGADVIKVTNDQQDVSVDQISDGQRVFLALVADLARRLVMLNPVLVNPLAGRGIVLIDELELHLHPQWQQDVVTNLRAVFPNVQFIITTHSPIILSTAEKRCIRVFGENRESAESFLELPPIQTRGSENAEILEQVMKVFSLPPNVEEAQWLDDFELALTGEYKDLSETARTIYDKIKGHFGPDSPELKKADSLIRLRRMKARISEAKREKGSEG

SEQ ID NO: 83721 - protein, 215 aa, Enterobacter cloacae
MKQLIRREGPAQLARFTAGRDQWGYVDLVDIWSHLLLMQGGFCAYCECRLNRKHVEHFRPRKDFPALTFEWTNLFGSCGDTHKAGGWERCGIYKDDGAELYDANQLIKPDDDIPDDYLLFLTTGRVVPIPGLTGPALIKAQETIRVFNLNGDPALFGSRRAAITSIMAEVEELYAVQDEIEEELWSEMLHFEIQRLEDVEFSTALKHAWRYNNAY

SEQ ID NO: 83722 - protein, 391 aa, Enterobacter cloacae; identical to SEQ ID NO: 83666

SEQ ID NO: 83723 - protein, 197 aa, Enterobacter cloacae; identical to SEQ ID NO: 83667

SEQ ID NO: 83724 - protein, 391 aa, Enterobacter cloacae; identical to SEQ ID NO: 83666

SEQ ID NO: 83725 - protein, 197 aa, Enterobacter cloacae; identical to SEQ ID NO: 83667

SEQ ID NO: 83726 - protein, 578 aa, Enterobacter cloacae
MQLLRIRIPNFRNLRDLNIAFDTHLQPADAPPKPIRSHALIGQNGTGKSNLIEALITIFRDVDLDREAAFNYTLEYSIHGHVVRIEADSAKQKRPYVWVDDKAASQGFLLKNRELLPAHIFAYYSGRNERIEALFHEHERRFNQRQEITTNEVLSEQLLENFTGSDADIRAIEEAKRRREVRLKQVGDDRLRRLFYCRGGHSQLVLLACLLSDDPVFQKVLKNLHIESLESALFVLKEPHRLREKRRNGKFEVQELNEGDPRFWYARSNVVSEFLDKLWKVAWAPIEQETTKQIDFRGRTEKQKQLYLFVSSQEKLKQLGESIGSTDSFFRYAEGAYIGDLIDEIRIVVKKRDEHGGKVSFTHLSEGELQILTVLGLMRITRDDNCLFLLDEPDTHLNPIWKLRYFDDIEGVLSADDASLLQSESQIIITTHDPMMVGSLKREQVHILRRDGNITLVDSPEEHPQGMGVTGLLKSELFGLSSTLDIETERRLFRRNELFALDERTNDQDDELRRLSVELADLGFSNADFKDPFYAKFVRRMAKHTKFHKPILTPEEQAEQDKIADSIIDEILREDDGQ

SEQ ID NO: 83727 - protein, 283 aa, Enterobacter cloacae
MIFIDLENKLPTDMDLHPDVRWSEADWNAWQKESVRLIGELAKLNAAGQIKERNELIDKQSGHWGKLKPWLLVLSGGKCWFTEARDIASHLDVEHFRPKKATRNVKGPERDGYWWLAFDYMNFRIAGTVPNRKKGAWFPLRYGSPCSSYARRCEGDEIPHFLDPTNAYDVTLLAFDEEGKAVPAPGISRWDNIRVRRTVDRLKLSEHQALAEERRKVWQRTTKLINKYFQALASTRTSAAAREQVKDTARDILCLTKPETELSSVAKWCVRLRNDPQLSRLVG

SEQ ID NO: 83728 - protein, 391 aa, Enterobacter cloacae; identical to SEQ ID NO: 83666

SEQ ID NO: 83729 - protein, 197 aa, Enterobacter cloacae; identical to SEQ ID NO: 83667

SEQ ID NO: 83730 - protein, 391 aa, Enterobacter cloacae; identical to SEQ ID NO: 83666

SEQ ID NO: 83731 - protein, 197 aa, Enterobacter cloacae; identical to SEQ ID NO: 83667

SEQ ID NO: 83732 - protein, 391 aa, Enterobacter cloacae; identical to SEQ ID NO: 83666

SEQ ID NO: 83733 - protein, 197 aa, Enterobacter cloacae; identical to SEQ ID NO: 83667

SEQ ID NO: 83734 - protein, 391 aa, Enterobacter cloacae; identical to SEQ ID NO: 83666

SEQ ID NO: 83735 - protein, 197 aa, Enterobacter cloacae; identical to SEQ ID NO: 83667

SEQ ID NO: 83736 - protein, 391 aa, Enterobacter cloacae; identical to SEQ ID NO: 83666

SEQ ID NO: 83737 - protein, 197 aa, Enterobacter cloacae; identical to SEQ ID NO: 83667

SEQ ID NO: 83738 - protein, 582 aa, Enterobacter cloacae
MQLLRIRIPVFRNLRDLDISFDTHLQSSESAINVLPKPIRSHALIGQNGIGKSNLIEALITIFRDVDLDREAAFNYTLEYSIHGHVVRIEADSAKQKRPYVWVDDKAASQGFLLKNRELLPAHIFAYYSGRNERIEALFHEHERRFNQRQEITTNEVLSEQLLENFTGSDADIRAIEEAKRRREVRLKQVGDDRLRRLFYCRGGHSQLVLLACLLSDDPVFQKVLKNLHIESLESALFVLKEPHRLREKRRNGKFEVQELNEGDPRFWYARSNVVSEFLDKLWKVAWAPIEQETTKQIDFRGRTEKQKQLYLFVSSQEKLKQLGESIGSTDSFFRYAEGAYIGDLIDEIRIVVKKRDEHGGKVSFTHLSEGELQILTVLGLMRITRDDNCLFLLDEPDTHLNPIWKLRYFDDIEGVLSADDASLLQSESQIIITTHDPMMVGSLKREQVHILRRDGNITLVDSPEEHPQGMGVTGLLKSELFGLSSTLDIETERRLFRRNELFALDERTHEQDDELRRLSSELADLGFSNADFKDPFYAKFVRRMAKHTKFHKPTLTPEEQAEQDIIADSIIDEILREDDGQ

SEQ ID NO: 83739 - protein, 283 aa, Enterobacter cloacae
MIFIDLENKLPTDMDLHPDVRWSEADWNAWQKESVRLIGELAKLNAAGQIKERNELIDKQSGHWGKLKPWLLALSGGKCWFTEARDIASHLDVEHFRPKKATRNVKGPERDGYWWLAFDYMNFRIAGTVPNRKKGAWFPLRYGSPCSSYAHRCEGDEIPHFIDPTNAYDVTLLAFDEEGKAVPAPGISRWDNIRVRRTVDRLKLSEHQALSEERRKVWQKTTKLINKYFQALASTRTSAVAREQVKVAARDILCLTKPETELSSVAKWCVRLRNDPQLSRLVG

SEQ ID NO: 83740 - protein, 391 aa, Enterobacter cloacae; identical to SEQ ID NO: 83666

SEQ ID NO: 83741 - protein, 197 aa, Enterobacter cloacae; identical to SEQ ID NO: 83667

SEQ ID NO: 83742 - protein, 459 aa, Enterobacter cloacae; identical to SEQ ID NO: 82560

SEQ ID NO: 83743 - protein, 211 aa, Enterobacter cloacae; identical to SEQ ID NO: 82561

SEQ ID NO: 83744 - protein, 975 aa, Marinomonas sp. S3726
MRDFKTIQNLMGDLPEEVTKAYLIGSTGAGKSSLVQQILGTTEVNFPTTTQRRTTVAPTEYVINSLLPFKSTILLKKKEDLVFAIEDLIFEAIKKTLDKNSNLSDIIYEFEQSPDERFKLKHIVSDSIIEKQAETLINKLRPLNLDVNDDGFFDNLKVNNIVDDIKKNLIGEIEFNFSKTCPDSGNLFEQETIEIIGINDKDKFIIKNKDLLKNEFGSISALVEYVRIEGDLLSSKFHNSSNFVLIDGEGIGHSYSEKRDTLSTRHYDYFDFCNHIILIGDAEEAFATGGQGVIESICLNGYQDKFQLVFSKTDKLDNTDVNGYIRRNLHNLSSALSKQSIEFSVENKDTFKFGELNKKELSHHTSGQIIKLLKVINSKIERNIIDLEYDYSVFYSTINNNEFHEEFINRLDNEHWAVLKAFSKRLSWKDFEYRHLKPLSWVLTFIMRDINLFLTKNNLVSEICDSQNKIKRTFSKNLRDFIFKELIIEKSHLWKQAYEMRGRGSHQNRKNFIFDNIITTFLPKESSKAFLDFREKLKKLLINSGALEMKEPIRTTICKIKITNIFGNRDIEWNLQDDINLLVGKNGSGKSTVLNLLSACISNNKEILDYYNYPYVELTIKKEFENGQNSEQVLKANTPSLNLNPIIIPSLNDLSRFSNKNESLTLDLVIENLTNKFSKYQRNVKQIISNRSEELESKRNKILENITDSTPESLLEFKKLSVEINSIIDNESKVLLKFKKVMDKYFLDTEKTIIIDDDNDALVIELSSPEKKRIKLNQLSSGEKQLLIIFLNVILNSGKSSILIMDEPETSLHVEWQSSFIDNVKELNPKMQIVSTTHNPLILLNRNQNEIGIIDYKSTCIDTSKIGTKYLDISSVLLEHFNLSSLIGKDMRDKIKEYSSLQIINSPNDEEVERIEKIKLELDNSFSSEILYNRNYYKFLKFLRDNKEIDFNRFESIEPEDMEEFLEEFGEFFND

SEQ ID NO: 83745 - protein, 250 aa, Marinomonas sp. S3726
MISMKDLYEHSDYENTKKEFLASNNAKRWSIFKPVHLKVTKNKCPICECRLDGSLTRPSNNSQSISIEATIDHYRPKKNGLYPFLKYEDKNYIVMCSDCNNLYKGCEFPLFPPAIRGTCSESIKKEQPLIVNPLTDNLSELFNVRFVMSQTGRNLLELTPRNNNGYEYEKALKTIKMFGIGHYDEFLHSNNNAKLLRLEILSSHYQKFKNFIRALKTGDKEMALLEYKNNNLSEFGLINLIKKQQFSDFT

SEQ ID NO: 83746 - protein, 435 aa, Oleispira antarctica RB-8
MKIKRLKLNHFRRFSDLEIEFDEQLTVLVARNGAGKSSILDAIATLLGSFLTRVPKVAGINPKETDFQLLPNGKKPPYMRIACETFEGIKWDRTEKRDQTKKTAEAIPEAKGIKDLNNYVDQFIDADNEGETYELPIFIYYGTGRGVFEMPQRTKGFNKIFRRFDAFTGGLESRANFKSFVEYFYSLEKTESDRQQEVRSFDIDIPELRAIRKAITAMLPDFSNPKGAKPAGIQVDWKVGEQTKKLRIEQLSDGYRTTLAMVMDIAGRMAEANPEMDDPLLASGIVLIDEVDLHLHPGWQQTILLDLMRTFKNLQFIVSTHSPQVISSVKPKCLRVIDWMGEKPSIKSVSFSEGAESQQVLMEVLGLESPRVKDLPIVQNLIQYQELVSKDLWDTQEALSLRKKLDAWGSEYEPELARLDIDIRLKEMDRLDEEN

SEQ ID NO: 83747 - protein, 255 aa, Oleispira antarctica RB-8
MKKIDKTDAPTKLEAYRRLRPTAKWEKFVDKTNRRKQAQNHIKGDQGGLCAYCEINLKNADENGKADFRVEHFHPKSDYSTVHNWHLDWQNLLGCCHGGSQANVVEAGERHSSPDHSCDVPKGNENWDDVILNPLNIPHTPILFSFNRTDGAISLNNDNCDQVGVDKVKAQATIDNLRLDSDRLRRLRKAALDNVNDSLKELIAEGMKIEDARSRLARGLLRKNDQDHWPAFFSSLRDYLGSAAEHQLTDIGYIG

SEQ ID NO: 83748 - protein, 423 aa, Pseudomonas fluorescens
MRLDRLHIQNFRCYEDATFDFQPGFNLVVGVNGSGKTSLLQAVAASFVEFSNAMTSDRTFSINDDVRVVVDKFQGRTRYEKKFPLWIVSTGDVLGANEWKTFSLVEDSPAASNKQLKNKVDQVLALSEAKTIPDLPVLSFYRADRRWKSANISAEFAAQQKVSRFDSYSNWYDAVTDLKDFESWLIAKTLERMQTLLDEGMTSAPFDDELAWVNQAIQFALPQSTDLRYDLRMQCLLVDMNNGQTLPFNLLSDGQRGMVALFADIARRMCILNPHMGKDVLKKTSGVVIIDELDIHLHPAWQRSIVSALRQAFPKVQFITASHSPQIIGSLRPEEVIVLSDGDAHHPRVTYGLDSSSILEEVMDVSQREPKIEAMLSELFSTLEDNDLEKAKLLLQALKKKAPDLPEFLRAEALLRRKEIIGR

SEQ ID NO: 83749 - protein, 213 aa, Pseudomonas fluorescens
MKRVIKGTEPASFIRWKALASEEWSPSYSILRNPEKQELHESLIREQGFVCCYCGNKVTLQTSHIEHFRPQKPFDHLGLVYTNLHASCQGETEEPKPAHCGHNKGNRFSEDAHVSPLDENCESHFRYTLIGQIESAKTGTPAENMIDILALDISFLNNRRKEKLEGIFDDDFLADFSVKELEAIIQQYRQPQNGQHDAFDHIIARYAEQLLGR

SEQ ID NO: 83750 - protein, 423 aa, Pseudomonas fluorescens
MRLDRLHIQNFRCYEDATFDFQPGFNLVVGVNGSGKTSLLQAAAVSFIEYANSIKLQPIGLDLNDVRFVINKFESRSRFERKFPLLLAAQGDILGVNKWETTQASEHLPPLVDLELMLATDKELAKFDLGESVELPVLAFYRSNRQWKGANISAEFAAQQKISRLDGYTNWFDAVTDLKDFESWLIGKTLERMQSLLDSKTAIPTFDDELTLVNQAIGIALPNAKNLRYDLRLQSLLIDVEGGITIPFNNLSDGQRGMVALFADIARRMCILNPHMGKDVLKNTSGVVIIDELDIHLHPAWQRNIVPALKQVFPKVQFIAASHSPQIIGSLKPEEVIILHNGDPSHPRVTYGLDSSSVLEEVMGVTQREPEIEKMLSELFSTLEDNDLKKAKAQLKALKLRAPDLPEFAGAEALIRRKEILGK

SEQ ID NO: 83751 - protein, 214 aa, Pseudomonas fluorescens
MKRVLKGIEPASFTRWKSSANEEWSPTYPTLQNPQKRDLHNSLLQEQGFFCCYCGREIDTASSHIEHFRPQEHYEELALEYHNLHASCLRETTPGNPLHCGHRKGNWFDEAQHISPMDEHCEHRFRYLQTGEIQATERDDLPATKMIEVLALDIAYLNNRRQSTIRGLFDDEFITQASEEDLVRLVAAIRSNSILEQKAFDHVIARYAEQLIGH

SEQ ID NO: 83752 - protein, 527 aa, Pseudomonas fluorescens
MKVDKLHIRSQFKNLENVVVDFDEHNLMTVIVGRNGSGKSNVLEALVAIFRNLDLGEEAPFSYHLTYRLGQKESSRWQEIQIDADPSRGSLAKQYTSRYRNLIKNDETESSTDDTVWTSIPFSKLKRNKDSLAPFLPKYVFAYYSGPSDRLERYFRKHRTDFYRKLLKDELNLKGDIRPLFYAKPHHSQFVLLAFFLSEQDSVEKSFLREHLGIEGLDSIHFVMRQPEWAKQKGELFWGARGVVRRFLDDLIKFTIAPVKVTRQEDTSLTGSNIKNEFLHLFLPDLKALRDFAKDLSPGELFKMLESTLLSEIISGVSIRVKVSRSDTPLTFSELSEGEQQLLTVLGLLKFTGGEDSLFLLDEPDTHLNPSWAVKYLSFLRNFVPNHETSHLLMVTHHPLAIAELEKNQVQVMKSDDSGKVHAQEPEESPRGMGINLILRSDMFGLSTTLDDITQNKLDSRNRLASKDELSEERIQREPEQPAETELEYLARLNKELSNLGFNLSSDDPDFMDFLKKKYHGVSSEAS

SEQ ID NO: 83753 - protein, 269 aa, Pseudomonas fluorescens
MRWICKDDVEECLSQAWRDAANLAQQTLLTEQDPIKRKAILKKSASSDIWRSFYELLPENLKKKCWYCEVDDIRADMPVDHFRPKNKVEDEKEHSGYWWLAYNWDNYRCACTFCNSRRVFDETEGGKACKFPLSNPQSRAFTPNDIQLLTNEIPDLLDPFNPDDEKLLWFDRDGKPEPKPGATEEECRKVKNSIDIFHLHETRIVRSRNKIRLEVENFVTKIRQGQDVHQAKIALRKMVRNTERLSRAAIVYLRPHRDLPEVMEILQLD

SEQ ID NO: 83754 - protein, 731 aa, Pseudomonas fluorescens
MRKVLRPVSPPEFLTSPRVHEEKAKILAYLRRDQRDRLQRRDNLNEELFFDTSLINDLRRLFQNKCAFCETRTVSYGRVLHMRPLRSVYDSTKVNSDYYLWLAFEWRNLFYTCEYCAKAKLDQFPVVGVRAPYLASFEDVQKYEVPLLLDPTYDEPSKDLDFHSNGLVVGNSKKGLATIEVFGLNRDELVSARRLRIQEFFDSLVFEGKEAPLSVMLDPDSEHLGALLSVIKKISKAWSFNGPPIRGNGSSLSRGFIDAWTRASEQERMQLPGVLDELQREAQRVLTSPPKFDITEDDGLDDVYQPKMKEGEISTIKISNFKALENLTLTMASSRRASTGWPSLMILGENSTGKSSVLCAIALALIGRKEAAKLRKYIPDLVHSVDTSRHDQLENRLVDVSIGFHYSEHVASFSYAPELREIRGSDSPATVVIGYGPRRFFDYKKQHLPDGAAARVRTLFNPLATIPYPGAWLAEQTGSTFNTIAAALRIVLALDEKDELIRYGDDLAVRANGRTTTINSLSEGYRSVFVMTVDIIRELLDHWDDIEQAQAVVLIDELETHLHPRWKMQVMTALRRVFPRVQFIVTTHDPLCLRGMDDPEVIVLRRDSDSFIKPVEDLPSFKSMTAEQLFTSDYFGLNSTTDPSTSIEFARLAGDVVRRSPEGNLEVAPAKETEELINRLVLGDSVSEQVVQEALMKYLEQREAKKGDVLPELREEAVDAVIKALTEEWEG

SEQ ID NO: 83755 - protein, 295 aa, Pseudomonas fluorescens
MRYYTASARVAGEKLTSYTFTEYSAGDVTTTLRRLFNNKCAYCEGYLSDDVDIEHFRPKGGITEDGTHDGYWWLTHSWTNLLASCKHCNQSRYNHLVAQHATVADVLKLQATTARTAYGKANQFPIQGLRATYTASDLDAEQALLIDPTAENPAPYFEWSREGHYSVVLPRPTDDRTQARGLAAINVFALNRLYLVKDRTERLNELRTHAQSIVQSLEKDMRVGGSQECLDEALERVRILRTYHNPSKRHTAMVEAFVDEFVAALRDRVASNAQPVAMNSFMPHPSDEDEIDEDT

SEQ ID NO: 83756 - protein, 411 aa, Klebsiella pneumoniae
MSFNIVNDGVGNEIRLEGRKFIDGDSKYLLPSVLTCISTSPFDKFSSERRFYNSKHDINTFYHYFGLKDLGRKNAIHAFIEKILYSRINSSLKNDRESFEKILGFLNYQPKIKIEFRTRVRLKKLFELDDEELIRQIEKPIFTPTGIYKWSKNQSNYDVPRIRNSLFLINDYILASSDIRSNSGSEARYFDVEINALNENMINISEHVMHEMLYLMELNLLSIRDIYLYKKSGDEVILYEASSGEQCLLINTFGIANSIADNALILIDEPEVSLHPEWQEVYIELLMDVFSHKKGCHFIIATHSPQIISNLKKDNCFITTLENGKTYHAKDFINKSADFQLATLMETPGHENEYLKRLAVNILSKISANEELSDQDINDVLWLKDISKNLEPNDTVMFLIGLIVKSKVSLK

SEQ ID NO: 83757 - protein, 212 aa, Klebsiella pneumoniae
MISNAYLYNNDFQERINAKISSEGFCSDSWSDNDISDIKESIKQFYIPEQNHICPYCQQRFLTNNGRQWDIEHIIPRQTQVGFMFTPQNLCVCCPDCNSHKGYKKTTTSVAKKTLPTKSHLYLIVHPHFDKYDDHIEVIEPGYLYRAKSKKGENTMYVCSLNRFYQFSGYNSAVATDHRLMMLANGLSSAQSEEEKRQIRREMISISLRANI

SEQ ID NO: 83758 - protein, 735 aa, Pseudomonas kilonensis
MYHDDREINADKLIETLEAQVKRFTSLHEEARLLLMLVIVARIGKPSNILYTLSQKLMEPPVLASIKLSEFSSLLHEAENLIEPGEDADFLITHLAAKAISLALGIDYRHPKLVAALVGTIQSTLSTPLFEAIPSTAELSLGLLGDYPKDSFPMSDDVSQHQWDLISIRLAAMDIRPNFIAFKNHRRPVQSTVLLDAPYPDPTRMLYGLQNMLDDQVQGRLVLIHNWTRANMADTWSRLYALIENRAQVEAVIAFSSPPTASDYCTAIIINTSPTQRETLYIDVSLSNKSLPPLDAIERMLLAGCIYNLWQGRVAHSHFEYLSSDVRRFLNSYFSAGFRPISRLCNAIERRPGNVLRAVLTKRLLLKAASGESSRRTRSDNSKLIADVLEHRGRPCCVYIIGNNGEGKSFLLTDIVYQLVEAGKRSVGLPLSHADRFPVDDGTIKHLFEYKGARRTQIAKEVSAISSAPGKVELLRECLGLVGFRSLIYLILKSELSHDRFGVPRRETLDLSDADDRRYFNRDRSSIGEYEVNFIREGHRTIPFDNLSSGEQSIIGLLIKIIASDADRPTFLIDEPEISLHVSWQQRLPRILNLLSDRLNVSFVIATHSPILIANAADDDICYVSSIGILDEIPVIERHSVETLLMDGFETYTPHNREVHEQCAKLVASLISDANTPNAAIKFETAIEKLKTFRTTIQKNGQGEDDERQASDLDLIEKTLAAIVMLREESEPRHG

SEQ ID NO: 83759 - protein, 268 aa, Pseudomonas kilonensis
MVDLTQEAMDAARAQYEGDCHERETHRKKTLEHLATQNAAAIAEFKRRQKGLPASKQDLWSKLTKHRKSFKSGVTGPLIRKALRAFLEREQNGLCCYCQRPLVNIAYAKPIEHILPRATFVQYTFHFWNLAIACFDCNQIKLDHVWASVDKRDLEEYPAPAAFTEMYHPRFHRFAEHVRFIRVQTNDHLVSIYRGVSDQGRHLCLNLLKDLSAREIVLNSNPELKGALEVINAHASSNEGALAPELEAFHQALAKSTSQLIKNGAMPR

SEQ ID NO: 83760 - protein, 465 aa, Salmonella enterica subsp. salamae
MRIDKLSLLNFRCFRQLDITFDEHITILVAPNGAGKTTVLDAVRLALFPFIRGFDASLYVKDKSLAIRTKDVRLVFRTEALNMEMSSPAMITATGEWESGKTATWMLDKRGEQPPHEDKTAAQLTRWGEQLQTLVREEHSLQQVELPLMLYLGTARLWYQERYEAQPTEQRLDNSAFSRLSGYDDCLSATSNYKQFEQWYSWLWLSYREHQITQLESPSAKLKEGVRVQRMKEAIQAIQQAINCLTQEVTGWHDLEYSSSHNQQLVMNHPQHGKIPLSQLSDGLRNAVAMVADIAFRCVKLNPHLRDEAALKTQGIVLIDEVDMFLHPAWQQQIIQSLRSAFPLIQFIVTTHSPQVISTVKRESIRLLEQDENGNGKALMPLGATYGEPSNDVLQSVMDVDPQPPVKEKEDLKKLTELVDQGKYNKRETQQLMATLQDALGEHHPQLKRLQRSIARQELLKGKAQ

SEQ ID NO: 83761 - protein, 194 aa, Salmonella enterica subsp. salamae
MNEQYQLCCYAEVRADLRGLGYHIEHVENKSQHPERTFDYQNLAASALDSANGLRQYGKNAFGGHSQGKNKSVDMAKFIHCHIPDCSRYFAYLSDGRIVPADGLNAQEMENAQYTIDLLNLNSGFLQTERRNYWEELEQIFDENIGNRQNLQLLLQINLVPSSDHKLHEFFSITRQFFQQEAEQVLQSHAPALI

SEQ ID NO: 83762 - protein, 391 aa, Enterobacter cloacae; identical to SEQ ID NO: 83666

SEQ ID NO: 83763 - protein, 197 aa, Enterobacter cloacae; identical to SEQ ID NO: 83667

SEQ ID NO: 83764 - protein, 370 aa, Vibrio cholerae
MQNINIYVGENGAGKSRKLAEIAQEAIYAGRAVIAIATSLNDKYPKRRADKPYYYMGPRLGRSLAKQAIKSSIAKLNDKNGLLRLNTLLSILEYTNLKPQIGLKVKGFDENFDDSIDSIEFENVREKELVTTLCYQIRQFYDESREEVQWISNYSRFEYGLSGEVLSDLIKHEKLLIHYKLLRSTELYIHNQELTLPIEKMSSGQLSLISTTFFIAAHLEDNTIILIDEPENSLHPDWQRQYIGNLKNLFPYQDFECHIATHSPMLIAGAVDEKFVEVFRHDGNKFKQIISDTKNIEDAYLDQFGIVTPENNALSERCIDIINNVDFGVISKSEAFKKIEEYKRKSYDIKQQEFLDGVYVIIKELEVHSG

SEQ ID NO: 83765 - protein, 201 aa, Vibrio cholerae
MAKLTFTANEIKKMQAASAKGYNGWNDKKLDGIKRKIKDHKRIDTCDLCCYCQRDIRAEFNMSLDIEHIIPKSARVKHMFTMKNLSVSCKKCNMKIKNEDLSFLVDDIMNLPSNIFKSRYYKFIHPNLDNVFRHLQRNCIQQGRVRLVKYHFPTNSDKGKYTYEYFKLKEFEMEKANQAQGRRKNKINNQKIEEAFRKLTQ

SEQ ID NO: 83766 - protein, 418 aa, Bacillus thuringiensis serovar mexicanensis; identical to SEQ ID NO: 82064

SEQ ID NO: 83767 - protein, 215 aa, Bacillus thuringiensis serovar mexicanensis; identical to SEQ ID NO: 82065

SEQ ID NO: 83768 - protein, 409 aa, Vibrio parahaemolyticus; identical to SEQ ID NO: 81298

SEQ ID NO: 83769 - protein, 221 aa, Vibrio parahaemolyticus; identical to SEQ ID NO: 81113

SEQ ID NO: 83770 - protein, 470 aa, Vibrio parahaemolyticus; identical to SEQ ID NO: 81302

SEQ ID NO: 83771 - protein, 214 aa, Vibrio parahaemolyticus; identical to SEQ ID NO: 81297

SEQ ID NO: 83772 - protein, 440 aa, Photobacterium halotolerans
MKIKTLKLTNYRAFDELELDLDPQLTVLVARNGAGKSSILDAISSNLGAFLTRLPGVSGHNPKDSDFRVTDSGEKPPFMRIFTRSFDGVEWDRTERRDKAKKTQALIPDGVGIKALNEYVDQFIDAQNEGKDYELPVFIYYGTGRGVFDIPQRKRGFGKKFPRFEALSGALESRTNFKRFVEYFYYLENEENRLQKEHRSFDFEVPELRAIRLAVSRMMPQFSNPRSAAPAGLMIDWNHNCTTSQLRIEQLSDGYRTTLAMVMDIAARMAEANPDTKEPLETKGMILIDEVDLHLHPEWQREFLPKLLSTFPKIQFVVSTHSPFIIQSLSDGKLVDLDHIKTEFNKSLKKEQSIEDIVENIMGVSLPSRSARLQKMYDVAQKYYDLLDEADKTSPEEIEDLKHKLDELTSPFSENVAYHAFLERQRIKAGVISSEEREDD

SEQ ID NO: 83773 - protein, 232 aa, Photobacterium halotolerans
MRPVHRGDVPKDKAGNPKEYTEYANARKDLISRIGEYCSYCEMELDTSLAIEHIRPKAIHSELELKWDNFLLACTNCNSTKGDKDPNLKDILWPHLDNTFRAFEYTTEGRVKSASWLNEDLKKKAEYTIALIGLDATPNTQKASDRRWLNRQETWQEAKLSKADLAEADLPAMRRQIIRTAKAKGYWSIWMTVFSDDPDMLRRLIDISNFSGTAQECFDVNGLPIARVNGEL

SEQ ID NO: 83774 - protein, 403 aa, Arthrospira sp. PCC 8005; identical to SEQ ID NO: 81284

SEQ ID NO: 83775 - protein, 239 aa, Arthrospira sp. PCC 8005; identical to SEQ ID NO: 81261

SEQ ID NO: 83776 - protein, 548 aa, Xenorhabdus bovienii
MKKNRHIRALEMNAKKGDLLANFNLYQEYLSGEMNVEKNESLSEYYFEQCCVLIEENNFILESLKLIDFRRFKKLNIEKGLDRHLTVFIGTNGEGKTSIIEAISKTLSWLNANILKEDGQGSGITYDDIHNESEGYADIYTEFKYGVDTRINARLSRAIEAASKKRDSEVVGLKSIANMWRIINDKRRINLPLFASYLIERSYPLKINKRNFLIDIPEKRRLRFDAYTDALRGTGKFENFVDWFISLSKIKKYGTSIFNEELNQLKKQIEIKVMNEILSTIYDDSILKEMKNKYLESLEEKQDDGSHESIIVSKVIEAISHVVPSVEDIWVTDKSGVDEILVLIDGKAVKLTQLSDGQRVFIALVADLTRRLVLLNPEKENPLEGNGIVLIDEIELHLHPKWQQSIITTLQETFPNIQFIISTHSPQVLSTVNRKNIRYFSGEDDTGAVWLRVPDFQTKGVANSDVLEQLMNTFSIPDLPESKWVNDLIELVEKDNYENNSNAKELFNKIKEHFGDEHPEVKRCESHIRLQSLKVKARKKFDKKKDEN

SEQ ID NO: 83777 - protein, 168 aa, Xenorhabdus bovienii
MKKLERQEAPDCLSNFKHGVDSWGAVPKDEIWSKLEQMQGEFCAYCECRLKGKSKHIEHFRKRETFPDKAFNWGNLFGSCGDPQKTGGWGCCGIYKDNRKLNPPCDINKLIKPDEEDPGDYLLFLISGHVVPQRNLCDRERQKAEETIRVFNLNNDTSLFNSRKNTIE

SEQ ID NO: 83778 - protein, 460 aa, Spirosoma radiotolerans
MKITGIDIGEYRQFKNIKFDFTYPNDHPKAGQPLEKVCFIGQSGTGKTTLLRIIWDFFQVINDGYQISTNRFSIPTVSHYDTFRANVSVHAKISDQAIRFGSEFLRSPSDLYTNNDKDIAGSSLDWIQSQPSNIYDAIKSYSKLCLYIDESALSYAYSLTANRNEDNRAYLASTDELFLINEKRQESIDRLAQSKTLAFHSLDGRYLWSYLLNDIEKYDESLKKVAIDLIQKNGSFSPHRLSESLNKWQTENPNPKVDIATNCLNSVLKDFFLEVDTEGTEALIVIKTKGGKQLAFNGLSTGTKQLLVTAIPIYKSQINKGVILFDEPEHSLFPDIQRKLVDYYTSLAPEAQFFFATHSPIIASAFEPCERFVLYFDENGEVNYHTGVAPEGDDPNDILRQDFAMAELMLQKGLDEYEWYRQLAMQIRAETDEEKKNQLIAERLELGNRYNFAGQYAQSK

SEQ ID NO: 83779 - protein, 196 aa, Spirosoma radiotolerans
MRRVNKSDSSVILQEKLTYRVGGDNKKLANVLCDEQHNICAYTETYLGRSDKKDIEHFNPTLKDTPDDSYQNWFLVKAQWNGEKASKWEQYQPILNPTDEAFEERIIYFEGDYLAASLNDQEAINLIKLLKLDDEGLAFERRCYLENLKETLILSDKTAQQYIDDLLMTRPSLVYYTRAIEEELGVKVNFDLVKTK

SEQ ID NO: 83780 - protein, 470 aa, Vibrio parahaemolyticus; identical to SEQ ID NO: 81302

SEQ ID NO: 83781 - protein, 214 aa, Vibrio parahaemolyticus; identical to SEQ ID NO: 81297

SEQ ID NO: 83782 - protein, 409 aa, Vibrio parahaemolyticus; identical to SEQ ID NO: 81298

SEQ ID NO: 83783 - protein, 221 aa, Vibrio parahaemolyticus; identical to SEQ ID NO: 81113

SEQ ID NO: 83784 - protein, 416 aa, Methanosarcina mazei
MRIKSLQVTNLRAFEQAEFEFMPRVNLLVGVNGVGKTTVLDALRMCLSKILLDITASRSRKIPFVDEDIRVQSNFMTVNCTFELQDKDFTFIVHKNRESSVPLDSTNIREQVLETPDKESYHPFLPVSSHNSKKALSNQLGVFFSTRRSLVSDAFPSVYKSSGGPSGAYAEALISRELRLAEIAHWMHVQEELGRENPLSIKHFSALQEATERFLPKCKNLRAEVSAKPQLIVDKAGVTLNLRQLSDGERGMFSLVLDLAKRLSQANPQLDNPIKDGSAIVLIDEIDLHLHPKWQRTVIKQLTETFPKCQFIATTHSPQIVAAVEPEQVLLLTNSGVIHPDRTRGLDSNWILRHLMEADDRPSESSSAVREVESLISDAEFEGARAAIAKYRRTGLDLPEWSMLEARMARMELLGE

SEQ ID NO: 83785 - protein, 235 aa, Methanosarcina mazei
MKRISKTRAPHSYLKWCKLVRGTQDEDYRRLQNPEKADLHRKLLEEQGWLCAYTMKSINEENSHIEHIKPESLCRADLVGSDLDYNNMIACFPLIGMNRQFRYGAQKKADWWEKDGIEFISPLNPACENYFHFDLKGNITPVINSEAANTTINVLSLDHPSLTEEREMAINGFIYGSGDKPLSKPKTIQALQTICTKDREGRFYGFCIVVRDALQHHLKILEKIEQKKKFSCRRT

SEQ ID NO: 83786 - protein, 422 aa, Pseudomonas syringae pv. persicae; identical to SEQ ID NO: 80882

SEQ ID NO: 83787 - protein, 214 aa, Pseudomonas syringae pv. persicae; identical to SEQ ID NO: 80883

SEQ ID NO: 83788 - protein, 426 aa, Hafnia alvei
MRQQYRLESITLRDVGVFEHTHFDFPQIKSEEKDAEKAEIHIFTGPNGCGKSTLLYALAAVFDEEPVNNPLIAARFTQSESYIAFNFSGQGGNIKHGFNIGSIIPDSIREYSKFKSWPVKFSAFAYSGQCKLADLFVLSLTNGIEQAVHNPFENALSFNNTVRPKVLAQWIANNRTHAALARQDNDLEEATLYDVSLDRISKFIFDVCDLDIRFRLERKPLAISLNVNGTNVNFDVLPDGLKSIIGWVADLALRLESIPWQENRDIFSQPIILFLDEVDIHLHPKWQRRILPAIQKLLPNAQVFVSTHSPFVVGSVEDAFVYRLPDPQRTVCRDPASAEVITPTPSAAGKSYQLILDEVFGIEEQFDVETEALLEKFYQLKKAYLSNPQDDSQLVALAAELSSKGSEVATIVSMELRQITRLVKKG

SEQ ID NO: 83789 - protein, 199 aa, Hafnia alvei; identical to SEQ ID NO: 83253

SEQ ID NO: 83790 - protein, 426 aa, Microcystis aeruginosa NIES-2549
MRIKSIKLINYRGAVSLNIDFHRQLNVFIGVNGAGKSTILDSLAIMLSWLVNRLKNTNASGQQISETEINNGQGTAIIEITGVTEDSQEITWKIVKTRTGYIHAGERSNFSQLNEYSQEIQRQITEHQGQINLPLFVYYSVNRAVVDIPLKIKTKHQFDSLSAYENALTSGSDFRTFFEWFREREDLENENRKYQDYLIKPEGFCFPDPQLEAVRETIERFLPDFTNLSVRRNPLRMEVTKKNKIVTVNQLSDGEKCLIAMLGDLARRMAIANPQNPYPLTGNGVIIIDEIDLHLHPQWQRFVVPKLLEVFPNCQFFISTHSPNIITHVQPESLHFMEQTEMGIKFHPVQESYGKNVDRILEDLMGLETTRPKEIAEALKDIYEQISQNQLEAAKNKINDLRAKIQDDPELIKAEVIIRRKEIIGK

SEQ ID NO: 83791 - protein, 210 aa, Microcystis aeruginosa NIES-2549
MKYIRKRQEPPEFKNWKEQANSDWQPDFRNLAGKPKEILIKALMTEQGEICCYCENRLIDGKWHIEHFKPQSDPSVDPLDYANLLCSCQANLKPGEPRHCGNLKDNWFDENLLISPLNPDCESHFAFNYDGTIKPAQEDDQKAINTIEKLGLNLNKLKALRKAAIDPFLDEEIDNAQLKVFVNGYLCLDDQQRYNPFWTTIKYLFSDLIE

SEQ ID NO: 83792 - protein, 527 aa, Neorhizobium galegae bv. orientalis
MLIQVMSKLPVDTKPEQRILVALLPDNWNDWYKWKTMYSVFIFTNDGNRHDLGSVKLAERGAKGDEKSPYRPELPEQGFEQLAESFISVGQDENYYNTLKGLADSDREYYLNAMRDCAFRPELLVDFEDEEVLSESILRSVPRRSVSGRYHRLANGNAEATNYNFVFNLPFGEESFKELLPLTFDVIPESKPPTNVHVLIGRNSVGKTRALNLMVRALITDEAEDVIGSFEDLSGARSFSPFDTEESTFFAGVVSVSFSAFDRFGPQPATKDGLSYSYIGLKKPSPKERDGNTSEPQLKDLGELADEFALSAEACRVGRRKQAWFKALTTLESDPLFQEREISSLAQSYEGSRLAKDREFFKELSSGHGIVLLIVTRLVELVEEQTLVLIDEPETHLHPPLLSAFVRAVSSLLIDRNGVAIAATHSPVVLQEAPSSCVWKLTRSGYDLRAERPENETFGENVGTLTREVFGLEVTKSGFHDLLDKAVRQYPDYDAIISDFGDQLGAEARSILRSLIRNQNALGEDSL

SEQ ID NO: 83793 - protein, 282 aa, Neorhizobium galegae bv. orientalis
MRYLSRPPFDVEAVVQACTNKLENGDLKERLVATQATLTQQEKIYTDHSDSKNWSDFPRSISAGHLTNDEMKSLYKYEMTSEKGAAYRFYSKLKNSSPHGKCPLCGIGVVSSIDHYLPKSRYTDVAITPHNLVPACNDCNKFKHTRFPRLYSEQLLHPYFDDFTEHQWIQGEVYDNGSPVIAFKVDSNGNYSDADEARLHTHFRVLRLAVVYGSNAAEQLTTDRSDLLTTYADSGALGVKKHLDEEAKRYEKKNLNSWQSVYYRTLSASDWFANEGFLGIPE

SEQ ID NO: 83794 - protein, 188 aa, Pseudomonas syringae pv. syringae B301D; identical to SEQ ID NO: 82978

SEQ ID NO: 83795 - protein, 216 aa, Pseudomonas syringae pv. syringae B301D; identical to SEQ ID NO: 81085

SEQ ID NO: 83796 - protein, 734 aa, Pseudomonas syringae pv. syringae B301D; identical to SEQ ID NO: 82976

SEQ ID NO: 83797 - protein, 293 aa, Pseudomonas syringae pv. syringae B301D; identical to SEQ ID NO: 82977

SEQ ID NO: 83798 - protein, 437 aa, Myxococcus fulvus 124B02
MYLKKVVLENIRSIDALEWAPSSAPTLAGWHVIIGDNGAGKSSVLRAMALAMVGPSEAIALRQDWNEWLRWKTQSGSIHLTLHWDKVWDQFAKSGKLPKNVDLQARLRFQRPDIGQVQLSGEDVAVDPSRNIWGDGYGWFCASYGPFRRFTGGDKDQEKLFFSNPKLARHLSVFGESVALTESLEWLKLLQFKNLETKGLGKEGQLLEALKQFINQPDFLPHEARLHSIGSDGVRFVDGNGCEIPVENLSDGYRSVLSMTFELIRQLVKTYGAEHLFAVGDATTVQVPGVVLIDEIDVHLHPTWQRRVGHWFRKHFPHIQFIVTTHSPLICQAATVGSIFRLPRPGSDESGGMVTGIARDRLLYGNVLDAYGTGVFGDVPTRSAEAIAQLERLALLNQKELSEGLSAEERQEQERLRARTPTAASALPSPAVEDLLK

SEQ ID NO: 83799 - protein, 269 aa, Myxococcus fulvus 124B02
MIRLPQGQLSEAARQGLEGYQQSIDALSDYAERVAQAKKRFSSLNKIGNHTFDHVKATLTQMCSGARRCAYCEDSAADEVEHIRPKTLYPEVVFAWMNYLYACGPCNGRKNDHFAVFDGGSGALTKVARARSAPVTPPVPGRPVFIDPRVEEPMDFLELDLRDTFFFRPKAPPGTEAYVRAEYTIGILQLNQRELLPQARRAAYWDYMAHLNCYLRAKSQGLPQEHLDMLTRQVRTRQHPSVWLEMKRQHEKLPDLLPLFAQVPEALGW

SEQ ID NO: 83800 - protein, 465 aa, Salmonella enterica subsp. enterica serovar Typhimurium; identical to SEQ ID NO: 82624

SEQ ID NO: 83801 - protein, 241 aa, Salmonella enterica subsp. enterica serovar Typhimurium
MRHVIKTRRGTDALLTAHEQPPQNSDQSTRRWQRFGRENKAALMTLLLNEQYHLCCYSEIRADLRGLGYHIEHVENKSQQPGRTFDYQNLAASALDSENGLHLFSINAFGGHARGKQEAVDMAKFIHCHLPDCSRYFAYLSDGRIVPADELNAQEMERAEYTIDLLNLNSGFLQTERRNHWEELEQLFEEHIEKGWDLQQLLQLELVPSPDHKLHEFFSITRQFFQQEAEQVLQIHAPALI

SEQ ID NO: 83802 - protein, 414 aa, Candidatus Magasanikbacteria bacterium GW2011_GWA2_56_11
MDFKKLKITAEWQQFENIEIDFHDRLTILTGANASGKTTLLHLLARHCGWDAKSLATPKKDIKTKVWKWFSSFWVEDEEPKDTKGELNYSDGQKAILKVPKEQNEAQYNMQIEGQQGVKCFFIPSHRSIFRYQKVTQIPTANTINKKQAFDKVWNSNKSRYGGGNDVPSSFHIKEALICWSIFGQGNKDMDANETLLEYYNGFQEVLKKVLPKTLGFQKFAIRNSEVLLICTSGEFVIDASSGGISAIIDLAWQIYFYATEEKDNPNFTVLIDEVENHLHPTMQRQILPDFLGAFPNTRFIVSTHNPLIVGSVKESNVYALRYNENNKIVSERLDFINKAKTAAEILDEVLGVAFTMPIWVEDKLNEIVAKYSKESITKEKFTQMRNELKEMGLEKIMPEAVYSLIENSNDQTK

SEQ ID NO: 83803 - protein, 193 aa, Candidatus Magasanikbacteria bacterium GW2011_GWA2_56_11
MIKLSRPQCPNQEALRTNYKHPDNKAVLILASHDKCMYCESKVSHTYYGDIEHIKPKSKFPGLEFDWGNLGYVCARCNGYKSDKYDEANPILNPYDEDPETHIVVLGAFFAHKDNSTKGKITIEEQSGVHLNRPALIERRQDRINLLKKVIGACAKLEDSAKEAVLESIKPEAEEDKEYSLCVKALLKTEGID

SEQ ID NO: 83804 - protein, 477 aa, Acinetobacter sp. AG1
MQIQSFSLKNIGQFQDLSVSLAPTTQFTSNITVFIGNNGSGKTSLLKSITTVLTWYVARLKHDKSNGTPIPETVILNSANSAMVEITVNDLDLQLQTKAYTWRITKNRTARKAEFTTHLTELNQLASYYKQWLGEDDQSSLPLIAFYPVERSVIDIPLKIREKHQFLQIDGYDNALNNAVDFRRFFEWFRDREDVENELLLNEVHGFNKILSEQIEIIGLLKKLHNEDTKSQEIQVLTKRLTDLQNIIKFKDNKVTLVTDTQLLAVRNAIYAFIPEFSNLRVRRKPRLHMSVDKNNKTLNLTQLSQGEKSLMALVGDIARRLAMMNPKLNNPLHGKGIILIDEIDMHLHPQWQRSIIQRLQTTFPNCQFILSTHSPLVISDTQNILVYDLDGQEVNALPSLYGQDANTVLLQYMDTSYRNPEVAEQIIQAMDAIQNNDFELANQLIQTLKSELGESQLDVMRLVAMLKKRTLAKQGK

SEQ ID NO: 83805 - protein, 215 aa, Acinetobacter sp. AG1
MQLIIKGIEPTNLAEYKRKNPTHRYDDLGEDPEQIRPTIRQACLEEQLYLCAYCCRQIGSKDHDCMNEHILPRQRYPQYSFDFNNIVASCTTKGSCDDAKENQEITISPLSPRCETEFKFNISGTVAGLTNDAKQTIDVLKLGDSLQQNQKLVDIRKHAIANFLFSQSTTIDDLIEDDELLTLLVEDLQQTTEGKLQPFAPIITKALKNWIDGNK

SEQ ID NO: 83806 - protein, 582 aa, Serratia fonticola
MQLLRILIPTFRNLRDLDIAFATHLQPTASTTDAPLKPIRSHALIGQNGTGKSNLIEALITLFRDVDLDRESAFDYTLEYSIRGHVVRIEADTAKQKRPYVWVDGKAESQGYLLKNRELLPAHIFAYYSGRNERIETLFQEHQRRFNQRQEITTDEVLSEQLLEKFTGSEADIRAVEEAKHRRESRLKQAGDDRLRRLFYCRGGHSQLVLLACLLSDDPVFQKVLKNLHIESLESALFVLKEPHRLREKRRGGKFDEQELNEGDPRFWYARGNVVSEFLDKLWQVAWAPIEQEATKQIDFRGRTEKQKQLYLFVPSQEKLKLLGELVGSTDSFFRYAEGAYIGDLIEEVRITVKKRDEHGGKVSFTHLSEGELQMLTVLGLMRITRDDQCLFLLDEPDTHLNPIWKLRYFDDIEGVLSSDDAALVQSESQIIITTHDPMMVGSLKREQVHILRRDGNRTLVDTPDEHPQGMGVTGLLKSELFGLSSTLDIETERRLFRRNELFALDERIPEQDDELRRLSAELADLGFSNADFKDPFYAKFVRRMAKHTRFHKPILTPEEQIEQDIIADAIIDEILREEDNQ

SEQ ID NO: 83807 - protein, 283 aa, Serratia fonticola
MIFIDLENKLPTDADLPPDIRWKKADWEAWLIESERLISELAKLNTAGKLKERNELIDKHSGHWGKLKPWLLALSGGKCWFTEARDIASHLDVEHFRPKKAARNAKGPERDGYWWLAFDYMNFRIAGTVPNRKKGAWFPLRHGSPCSTYVSRCEGDEIPHFLDPTNAHDVTLLAFDEEGKAVPAPGIPRWDYVRVWRTVDRLKLSEHQALAEERRKVWQNTTKLINKYLQALTKARTSAAAREQVKTAARDILCLTKPETELSAVAKWCVRLRNDPQLSRLVG

SEQ ID NO: 83808 - protein, 470 aa, Vibrio parahaemolyticus; identical to SEQ ID NO: 81302

SEQ ID NO: 83809 - protein, 214 aa, Vibrio parahaemolyticus; identical to SEQ ID NO: 81297

SEQ ID NO: 83810 - protein, 409 aa, Vibrio parahaemolyticus; identical to SEQ ID NO: 81298

SEQ ID NO: 83811 - protein, 221 aa, Vibrio parahaemolyticus; identical to SEQ ID NO: 81113

SEQ ID NO: 83812 - protein, 421 aa, Pseudomonas amygdali pv. lachrymans; identical to SEQ ID NO: 81088

SEQ ID NO: 83813 - protein, 227 aa, Pseudomonas amygdali pv. lachrymans; identical to SEQ ID NO: 81089

SEQ ID NO: 83814 - protein, 452 aa, Pseudomonas amygdali pv. tabaci str. ATCC 11528; identical to SEQ ID NO: 81086

SEQ ID NO: 83815 - protein, 216 aa, Pseudomonas amygdali pv. tabaci str. ATCC 11528; identical to SEQ ID NO: 81151

SEQ ID NO: 83816 - protein, 540 aa, Morganella morganii
MKVDKLHIRSRFKNLENVTVDFAKNHLMTVIVGRNGSGKSNVLEALVDIFRNLDLGEAPTFSYELYFQLGEEDGMKWYDVKVDADPSRGTPAKQYQVSVKDKHNSQEGYKPIPFSRVKRDKKTQQAEYLPNFLFAYYSGPSDRLEKYFRKHRDDYYRDLLYNKLSLEADIRSLFYAKPFHSQFVLMAFFLSPELEKERIFLQKELGIESLDSIHFVLRRPAWERDKEDRFWGAEGVVRRFIDLLYPHALAPVKVTRNEDTSLTGKNKKNDFIHIFLPSVETLHEIAKQLTPSIFFKMLESTVLSEIISEVHIRVKVTHAKNPITFQELSEGEQQLLTILGLLKFTGGKDSLFLLDEPDTHLNPSWAVNYLKFLREFVPNHETCHLLMVTHHPLAIAELEKQQVQVMWRDSNFQVHAQEPEESPRGMGYGGILTSDMFGLRTTLDNSTERLLRLRRRFTEKPELSPIQAGRLKKIDKTIESLGFTTAHWDEEYAQYLRVRREIETEAEAANTTPELKRLRKERAKAIVQRILAAEQEENKK

SEQ ID NO: 83817 - protein, 287 aa, Morganella morganii
MRHLDIDFNKLTLPDGWKKKAQKLSELLVTAKDAKQRSEIIDKNQDHWKAVKPTLASLFNYKCWYTEAPQQGTDVDIDHFRPKKRVQETLSMTTPHDGYWWLTFCLENYRLSCIVANRRRADVETGVTGGKADHFPLCDESMRAMTPDCDLEEEQPLLLDPLKATDVQLLQFKPDGEAMPRFSKEEHARKFMRADQSILFYSLNHSDFVRCRIELRDQIEKDVKAAKRYFNKLETGDADNDLAYEHTICRLRKMRSKDAPFSSFCIAYLDGFRHRSEYDGVLDAVYL

SEQ ID NO: 83818 - protein, 424 aa, Candidatus Synechococcus spongiarum 142
MKLARVEIENYRAIEKLHLPLHPSLTVLHGDNGHGKTSVLTAIATGLGSIPEQLPDVSSIVFLKSDRRGSRPLRVGLTAVDGITWDRRVGGPRRRNVLQALKDAMNAIVNADREETEPLDLPIVAFYDTDRAVFKPPQRRTGFGTKFPRYGALEGALSPRTDFRDFFEWFYAKENEELREQKERQDFSSTLRDLEAVRQAIQNMVPGAINPRTKLSPLRFVVSIQLDDGKLEELSIDQLSGGYQIMLALAADLARRMAQGNPHRDDPLQAEAVVLIDEIELHLHPSWQQRILTDLTRTFPNAQFIVSTHSPQVLTTVKPEHVVELQREQGGIVAGSAAAPTYGAEAGDVLATVMGVDERPDPDGNKFVEKLADYTHLVADGKGESSEAISLRQELDELSPRDPALDRADIEIRRRKLFRSMGRS

SEQ ID NO: 83819 - protein, 240 aa, Candidatus Synechococcus spongiarum 142
MKRIRALDGPTPGLAHYLERDGEQATWEGFRSHQAGDAYRELVSGLEHIQHGLCGYCEVNIIDNDRQVEHVIPQSDSAQGRAHALDPTNMMVCCKGGTLETSGDQERRMEPVRKHRSCGEAKGKRNLRDREFIDPRDLPALPSLIRVDYNGRIEADADACQKASIAVDRVENTINILGLNVKRLQRAREKHWAALSEFYQEYLDDPQVIQEAARKELLPEEDGRLPRFFSTSRFILWAGG

SEQ ID NO: 83820 - protein, 431 aa, Candidatus Synechococcus spongiarum 142
MRIDRLTVLNFRRFEKRTFQLHHQFTLLVGDNGAGKTTILDALRVGAGAYLLGIPDSPAPAPPIIRDYMRLETRREGEFPTFEPVTPCVVRCEGQMHGRDLYWSRKRASVRGRTNRVGARALVQYINSYVQGDRLAMNYPLIAFYGTNRGSVEQRETQQALSAVRQPLGKASRFETYRGCLEPTVSSELLRKWIKKMELIALKEKQPLQSLDAVYGAIVGCVDGVERAVYDFEIDDIVLDFKNGECFPFGLLSAGQRSMTVLAADVAWRCVQLNPHLAGQALRETEGVVLIDELDLHLHPNWQRMIVRNLLSLFPKLQFIATTHSPFIIQSLDGQGLINLSNDNVLQERKEPYSIEDVSEETMGVDTPQRSKRFLEMETAARRYYELLDQCRDEHHPDVAQAKKELDRIEAHFSDNPAYAAFLKLHRYAAE

SEQ ID NO: 83821 - protein, 209 aa, Candidatus Synechococcus spongiarum 142
MRPGQRGPWPISNDGSRIFFRQYQQAEKCLICRIGEYCSYCERCGDLHVEHMIPKSVAKDLETEWSNLLLGCSNCNSRKSNKNDSRDGYLWPDRDDTFSAFVYQLSGHVSVNGTLARGEYCKASALFNLVGLGAEESLTDKRHRKRRQAWNMALKARCHICDDNSRNVVDLVITLALEIGFFSIWMAVFHDDEDMRCRLTEAFPGTRLG

SEQ ID NO: 83822 - protein, 507 aa, Acinetobacter baumannii; identical to SEQ ID NO: 82010

SEQ ID NO: 83823 - protein, 223 aa, Acinetobacter baumannii; identical to SEQ ID NO: 82011

SEQ ID NO: 83824 - protein, 763 aa, Escherichia coli; identical to SEQ ID NO: 81340

SEQ ID NO: 83825 - protein, 308 aa, Escherichia coli; identical to SEQ ID NO: 81951

SEQ ID NO: 83826 - protein, 525 aa, Haemophilus haemolyticus
MKNKDILELYKNWDGETLPPDELMELVSQNPFSLLDVQIVNYKAFSDRVSVKFEDNKKPILFVGVNASGKTTIADAIAIALSKINSAIYNKNTDSGDVIEERDINKKNDPYQPALIELNLGYTKTKLTEVIVARSPNGSPKTISSTLIQAKKLGALYSYILAKDNLDLPLYLFYGVERSSLKTKDKFDKADFISKVERLNAIPQKLKSTLNFNDFLLWFKYLDDANNQDLVNALESVKSELANIEGKVNELDSYDNDMLTGLNAANELLKKMNSIASIYSKLENVKNNNEVDTEKGKQLQKIKETIINFIPDIIDIKIDRNLSYPFIVKKQDGSQFPLSELSQGEKSIISLVGDLVRRMLILNPHKENPLDTPAIVIIDELELHLHPQWQEEVISRLERTFKNTKFILTTHTPTIVSSIINENLYLITDNQIIAGKHLDFGTYGAEYASIYTLLYNINSRSDNEIKEKLERYLYLVNENQYTSEEAIMLRKELEKNFKGNEPSLEEAKLIIENKEWEKSLYEEGQ

SEQ ID NO: 83827 - protein, 262 aa, Haemophilus haemolyticus
MKKVNKSSIPNVLLNYRSTSESYTWTAFRENKKSYKRVKKQIFKDQGGICAYCEQDFSCSQGDDDYITQMIEHFHPKRDIGSNKNWALDWNNLLGCCTGGKESNKITFPTPENLSCDQYKEIALPQINNVEGYLINPIDMPAFPCLFKINQVTGYILANEKNCEKVNFNINNFKTTVELVENTIRVLNLNCVRLLQKRKAHIKNYNNLINIAKKNENSAIFQELCSRFLAKKNNKYHSFFTTYRILLSSHAENYLQKNNFSG

SEQ ID NO: 83828 - protein, 416 aa, Bacillus cereus
MFKVRTLDIQRINSIQDLFIGFNPGLNFICGPNGIGKTTILNCITSAFNGVPLSGIFPHNNAKYGEFSIDVEDHLFSKRAFFYIGEHPEDMFSLEYRKTRHRAINVYKGNCINFNIRTRAFEYSLQMVGERFNHIKSWLYTNYYKDEMDTYKFYNLQLVQQCFNLLDPNISFGRITETIITDRHPLSRHTRYREKIGVNVNSILKHGGGYTPRRKSLDMFVNTPHGEVLVECLSSGYKSSLTVLLGIIRGIESSSTTNLVNEFNGIIIIDEIDLHLHPQWQAKLVDAIRKLVPKAQVICTTHSPHIIQAAKPEEVIALGEDVNGNISVKEIPSPSEYGFQGWTIEEILTDVMGLGQTMSPLFIESLEKFNVALRKKDREMLMCEYKKLRKMVHPQNPLATLLSVQAGELMIWEDLK

SEQ ID NO: 83829 - protein, 255 aa, Bacillus cereus
MIYVERPSKPLNLTDEHVQALTDKFKKTKSAVWKKDYIAESLMKMTNNKCVFCECRLGEEGKYMEVEHFYPKSLYPSKVIFWGNLFPICSRCNKAKGDHDTQLYPIINPCLNNPKAHLYFENYSIFGKDSSHLGILTEKVLNLNDTRQLATPRFLVGASVMKKLQEIAQTVNRYDRQSAVIGDDYDIINRTKALLQHATPEMEYSATVATVIISSSFYEPMKEQMITKGLWNVDLNQLDGIARGISLEVRIPAAT

SEQ ID NO: 83830 - protein, 443 aa, Arcobacter butzleri L348
MKLKKLYIESFKNLKKINFDFIANNNINVLIGNNGCGKSNVIEAISSIFSTLYLNKKEFEFEFELVYDLQVSEDIFDTIRINFFENKLEIKSLLNEELLDSSKFLPSQIITIYSGEESRLWEKYYNNFYEKYKSEYIKNLSPYLFPKQELLYINKYYWDIAFLTLASSFIDTDDISPNKVIKSISFEFNQDTIKALYEKSPSLVTTFTNTLSEGKEQIDLSLEEFRDRAVDSHKTLFQKLATAYLPKNEKEKLINDITITFEDDTNLNDLSEGEKKRLLLKTVLNILAEDNTLVLFDEPDVFLHPKWQSELIKNFIDNKKSSVSILLTTHSPNILKNISSNNVFVLKKNIEGNIYQERPVSSLLGRDVNSILDETMDVSERNKEVEQLFKKYFEYISKKDFDQVKLIEKEILEITKDEEYFYDDEPKFAKAKAVIQRMKMFDK

SEQ ID NO: 83831 - protein, 243 aa, Arcobacter butzleri L348
MKKIIKIATNEPESFINWKSTQPVEGWEPCWDTLGGQEKKDLRKALVQEQGYICCYCQQRITLCEKTEIEHIYPREKCIREKKYKAIEYSNLIASCEGNQPKYYNKTKQKYEKRHEDLGNKIVHCNNFRKSEELPISPLFANCEKYFTYTYEGDILAVKDNSDAQITIDNLNLKVLNKKRKEYIEGTLFKLDDNFEITGEFVDGFDKNEYLDKFMNMNDIDNDGELKYYEYSGVIVNLLNQLD

SEQ ID NO: 83832 - protein, 658 aa, Arcobacter butzleri L355
MFPLNFFLNKFKSGFLSDEISEYLKIAPGVDKFKYEIQASEYYNKIVNLSINNFEKNVFNIEDSYGESSYCFYCGQKAEVIIPAYMHNGSGINLWMYKDWRFTTLLCSSCDKHAGKRKVSYKKKFSEISPNHPKQILKLEPDILLPSLEPAFKHFKYLKNGTLEPLTIRGKSTIKCFSLNRQDLVERRMDYMIQYEREKEFNQNMTSLDVLFCIAQEKDFDLDNDEYMEDLAKFLHEKSNLYADRNEIHNLLKIEFPITTYKQISENRIRTRYYYPNFSGLKNIKLTGIRGFEENQILNFDGRKSLILIGENGVGKSTLLELIKRIINPHTKLTLTDLINMGSDDAKIEVEYNDFSISKLDFSVTQGYINGKKQLCNLIEISELRILNRQIARLINWISLIHNEESNSEFNSLFDWIERQLKILLSLPTEAILKVEGGHVFWLRNNNATQREYLENFSSGYKSIMIIFYSIVSKFINSYSVNAFNIVKEALSNTVVSIDEIELHLHPVFKKTIIEKLKKVFPEVLFIITTHDPLVLKSAGVDTKVILLEKIDNKTIINEELPDHKYMSTGQILTSPIFGLSTIESSKEIQNNLDAYYKALEQKNWEIVDKYREKLADSGLFGNTYRELIAMSAVDAYLVKKEIPSVDVIAKILENLDA

SEQ ID NO: 83833 - protein, 385 aa, Arcobacter butzleri L355
MRKLSILNPIPPNMDRNSTVTQTNNLENLNKINAYVSGNKPELIFRGYNSNKEKIRLLADGCCAYCGIRVDEHYTTVVEHYKPKAELHFRVNEIRLDGLLLPEASRSGKHDKITDKCLFGYFQDGNYVENLLPSCGACNSGLGNNGIYVENKKGKGNIEYNIPYGKNNFFPILYTNRNSSGKLSDHRVNKLYIPDTATDKSLLFNPYFDDPDELFSFEFDKYIVAADGVGHIVKIKPNKSASKFNRLKAQVSINLLGLNRANLCIARYNKYKALEDIRLEIDEAAYKRDFNLNLWAKFSLNFTKEFHKNHAQMFGYGKKLAKEMGFYLRKVLIEKFPNESRGILNYVITFDELINKLSIFAKTYYDPRQINRQVNNVQRDILNHR

SEQ ID NO: 83834 - protein, 547 aa, Enterobacter aerogenes
MKDITEGKVETKGDGIADEIVTLVKEKIYSKRLRVSQVGVYGVRGIEDITLSIEDDLTVIIGNNGSGKSTILDSLSLTLSWLKASILKEEGVGTYLRELDINNSRDVSYGSVTCRLCLEEENFNFLSTKSKPGRSLSRRSALQEIKALGGLYRHVNSQFADSNLPLVAHYSVARSNEGTKDDFAKVGSQIGIKDKWGKFDAYEDVLKDRHDFNEFIVWLGRIDSIARQGGGINEEISKLQSEINSTINLLKMFKDKGNDQSFILPLEEIIKKKNKEISNIYNENFNRDEVLASKVFKHIKQAITIFIPDINDVRLVYEQEGVKLVLYKNNKEISAQQLSQGEKSLLSLIGDLTRRLVLLNPSLDNPLEGEGIVLIDEIDLHLHPSWQQTVILNLQNTFPNLQLIVTTHSPQVLSTVYSRSIRSLHEVNDVLNTIPSLDVNNKIIASETPEFQTRGVMSTDILSKIMGIDPVPLVKEAKWVQEYLAAIEYDKNTEGYYADLWADIVEHFGENHPVVISCKNAVRLKGMRGKIREMKKNKNEDIKKGKE

SEQ ID NO: 83835 - protein, 212 aa, Enterobacter aerogenes
MHKLSRCASPVTLSDYDYKVHKWDDYIQDVNNKNDVWDGLFLMQGHRCAYCECELLTYYKGHVEHFVQKGRFPQYTFEWGNLFGSCRRSDGCGFYKDNQPYLQGDILKVDEDDPDDYFDFLDDGSIVIKPNLTPQNAHRARETLRVFNLDAEHGALRQQRATARKLYCNLIDELSEYYDKYGADENFEELLDENLAAIEGVPFQTAIRHGFY

SEQ ID NO: 83836 - protein, 287 aa, Escherichia coli
RYFGAVRENNISHSGTIDSLKTLKDEEISVSLSQDTSNKFERYLVSFYNYGSHLIARENDKVKGDKVDSWFYFLQKQFQYLFEDDSLKLNYDAEEQTFYILQDNKSPYRFNQLSSGYQSILSIYADLLMKVELKGITSDELSGVVFIDEIDAHLHVSLQRKIFSFFVNAFPNIQFIVTTHSPFVVQSVNDAIIYDLSTNEQLEDLSMYSYEAIVKGLLGVDTQSDILNKQLDKLALLINEDVINTDALQDVINKIQPYENQLDMRSRTFLLMGKNALLDAKDATEGE

SEQ ID NO: 83837 - protein, 221 aa, Escherichia coli; identical to SEQ ID NO: 81587

SEQ ID NO: 83838 - protein, 763 aa, Escherichia coli; identical to SEQ ID NO: 81340

SEQ ID NO: 83839 - protein, 308 aa, Escherichia coli; identical to SEQ ID NO: 81951

SEQ ID NO: 83840 - protein, 540 aa, Escherichia coli
MNLETCYVDFLELESHVINEDYLKESVELQKLISTLNESKFHLNKIGIHDFKRIRELQISLEDDLTVFVGDNGFGKSTILDAIAIVLSWLRSNIEKESKPGTYIKSHEVNNSVDVEYASIDANIKLKDFNTSILITKAKEGAYYSRNNELLEVKKLASIYRLVNKYVDNASLPLMAYYSIARSYIGGGVDRKRKNAKTKTVWSKFDVYDEIEFDRNDFTDFFQWLVFLHNRASQEKLSESQTTINALFSDIQSLKATLTQLSAIDNIDSTVIKGLELSLKEKLNYMKSLQSGEHKFNNAVSLYDSVINTILKFLPEFQWIKLVYGDDDYKIILKKGEVELDIQQLSQGEKTIFTLVGDLARRLILLNPNLSNPLLGYGIVLIDEIDLHLHPQWQQTIIERLTSTFPNVQFVITTHSPQVLSTVSSRSVRILQEVEVDGVNDLIVSHPDYQIKGVSNQDALLYGMRTDPIPSTKENGWLEEYKKLVELNRYSSDEALLLREKVIKHFGLDHPLVQECDDLISVLEFKNKINQHFSGSKDVK

SEQ ID NO: 83841 - protein, 227 aa, Escherichia coli; identical to SEQ ID NO: 82595

SEQ ID NO: 83842 - protein, 416 aa, Escherichia coli
MLNKSNVIKHIHVLLPDTNKNININVDGKNVIITGGNGCGKTRFLKLLYEQVSAQIEQYEYKTYDQIKQEISNRQNWMQHTPPTDRNYFSWKQEISDYEKQLKKMRDIRIELADLNKYCIDFNERKSLLRYFGAVRENNISHSGTIDSLKTLKDEEISVSLSQDTSNKFERYLVSFYNYGSHLIARENDKVKGDKVDSWFYFLQKQFQYLFEDDSLKLNYDAEEQTFYILQDNKSPYRFNQLSSGYQSILSIYADLLMKVELKGITSDELSGVVFIDEIDAHLHVSLQRKIFSFFVNAFPNIQFIVTTHSPFVVQSVNDAIIYDLSTNEQLEDLSMYSYEAIVKGLLGVDTQSDILNKQLDKLALLINEDVINTDALQDVINKIQPYENQLDMRSRTFLLMGKNALLDAKDATEGE

SEQ ID NO: 83843 - protein, 221 aa, Escherichia coli; identical to SEQ ID NO: 81587

SEQ ID NO: 83844 - protein, 417 aa, Bacillus thuringiensis
MLKNLQIKDWNQFERVDIDFHPRLTVLTGANGAGKSTILRMFSTQLGWGYNETAIPSKESTTSLKYKSGGRRKIQPREQQDKINIGSLECFNGKTANLFVPDLTPSANYCINYETPGLNYYTNNSLDLKGINIPSHRIAYSYKPVGNIPVRPASREEAFSLFNHSLMNKLFESYGDSPSFQMKSTLISLALFGEGNSHVNENKEALDLFLGFIEILKVLLPPTLGFKKISIRDGEVVLETNSGDFLLDAVSGGIGAILDLAWQIYMYDGDKYEPYIVLIDEAENHLHASMQRRLMPSLLQAFPNAQFIISTHSPLMVNSVRDSSIFVLKYNENHLVVSELLDFENKASNASEILRDVLGVPITMPLWVENKLEEILKSFKGYEITPESYSRLKDELATVGLRDHLPQALGILQGGIY

SEQ ID NO: 83845 - protein, 215 aa, Bacillus thuringiensis; identical to SEQ ID NO: 82065

SEQ ID NO: 83846 - protein, 468 aa, Bifidobacterium bifidum
MTNYRKFGGRFSADANSNGGHSDSMVPGLTVDFDRQMTVLVGENGAGKTAVLDAAAVALGTFLKAFPEVSGLRIQGSDARRKYYSQYGETDIQEQFPVSIYAQADIAQPVQWRTVQERGNPIAVPIEWRRELNSANGSTTFSKASEICSLSEMYQKLVQMDPDAVLPLLAYYGTDRLGLHGRMTGKARASAFKNRFRGYDRCLQSSLNYRQMDAWWRKQYDRSLKGYDVPTYRAVCKTVERCLETLLRENGHATEARLEYDFDDGLRLSYTDSDGVRLESMPLWTLSDGYRGVVGLVSDIAWRIAALNPFMGDSVIDWTPGVVLIDEVDLHLHPKWQSCILGVLMKSFPQIQFIVTTHAPMVISSVASDRLRVITLDDKNDGIYQAVSPKNETYGSSASLVLRHVMGSLDKPRKVQDLFDRFSRQMDADEFPEAKQTLGELERTIGADNPDLSGARSSYFFYAGEVRD

SEQ ID NO: 83847 - protein, 289 aa, Bifidobacterium bifidum
MLYVDKDNAHPPSIEIAKAKRVLKNTDGVEVCYDSLGQLQEASQLIPHLWDSLGADQGWLCVYCMRCIAVQPVSGVSRKLHNEHYIPRHQDYEGYEEARRHGKEAELPYPQFTQADLDRYSLDYRNLFAVCDGKYQKDEKAPARDGHRAPHRKEDEESSGPKVTCDTLRGNSKLTVDPRRKDHIDSLSYGKFDATLSSSIPEVNDDINVRLNLNYHWLKEERAMALVGLYQWFEKNASERDFPRKCRERLQELQQGKDGKLQPFAPMLIWALTKRMRRLPHPPQRLPSQ

SEQ ID NO: 83848 - protein, 468 aa, Bifidobacterium bifidum; identical to SEQ ID NO: 83846

SEQ ID NO: 83849 - protein, 289 aa, Bifidobacterium bifidum; identical to SEQ ID NO: 83847

SEQ ID NO: 83850 - protein, 468 aa, Bifidobacterium bifidum; identical to SEQ ID NO: 81198

SEQ ID NO: 83851 - protein, 288 aa, Bifidobacterium bifidum
MLYVDKDNAHPPSIEIAKAKRVLKNTDGVEVCYDSLGQLQEASQLIPHLWDSLGADQGWLCVYCMRCIAVQPVSGVSRKMHNEHYIPRHQDYEGYEEARRHGKEAELPYPQYTQADLDRHSLDYRNLFAVCDGKYQKDEKASARDGHRAPHRKEDEESSGPKVTCDTLRGNSKLTVDPRRKDHIDSLSYGKFDATLSSSIPEVNDDINVRLNLNYHWLKEERAMALVGLYQWFEKNASERDFPRKCRERLQELQQGKDGKLQPFAPMLIWALKKRMRRLPPPQRLPSQ

SEQ ID NO: 83852 - protein, 438 aa, Corynebacterium epidermidicanis
MIRLTRMELTNFRKYETLRITFDPKVTVIVGGNGAGKSSVLDAAAIALGSFFLPFPTISQGRNIQQDDAFAFSKRTGEDSVDVRRRYPVSVHAYGEYDGREIEWVRSKLSERGNMTTRDARELSDIARGLYENISSDGTDAPPVELPLISYYGTGRLWAQRRGRTSDLRKPGNREDGYSSALEPRADEKSLTSWLKRSTMLGLQKGRVPATLRAVQAAVERAIRAVTGSERANVYYDLELDTIAVEYTESTGRLIALPMAQLSDGYRTTLSMIADIAYRMAELNPHFENEVIERTGGVVLIDEVDLHLHPTWQERIIGDLTDIFPRVQFIVTTHAPSVVSSVQSTQVRILDSKDGTHLEAKTPGNQTYGRDVPSIFREVMDAPERPQEVSESLRKVQQAIDLEDFEEASRLLEQLKSKVGSNDPEVTGLETTLYLEQI

SEQ ID NO: 83853 - protein, 253 aa, Corynebacterium epidermidicanis
MLYIEKNSNSRGANALRNACHALDSTPDTEASYDKLDSSVRREVLESLLQEQGHVCAYCMRRICLSGHPKAKVGNTAAIEHYIVQNPSEEYRERLPDELKSYDERAYSIDYKNLLAVCPGGSEGATAQCCDKSRTLKSNVNQPLRIDPTNETHIKRIEYYTDGRIYSNNPDHNVDLDQLLNLNEPAFSFAQNRLATLQSLQRKIQDTFSGEISLEQWTKYRNSLVAAEATEKPPYLGILLWWLDKKIRKASRR

SEQ ID NO: 83854 - protein, 469 aa, Klebsiella oxytoca; identical to SEQ ID NO: 81634

SEQ ID NO: 83855 - protein, 197 aa, Klebsiella oxytoca; identical to SEQ ID NO: 81635

SEQ ID NO: 83856 - protein, 459 aa, Enterobacter cloacae; identical to SEQ ID NO: 82560

SEQ ID NO: 83857 - protein, 211 aa, Enterobacter cloacae; identical to SEQ ID NO: 82561

SEQ ID NO: 83858 - protein, 618 aa, Enterobacter sp. GN02730
MQLLRILIPTFRNLRDLDIAFATHLQPTASATDAPTKPIRSHALIGQNGTGKSNLIEALITIFRDVDLDREAAFDFTLEYSIRGHVIRIGADTSRQKRPYVWVDGKAESQGYLLKNRELLPAHIFAYYSGRNERIEALFQEHQRRFNQRQEITTAEVLSDTYEAPDRMIELEEALRKFSGKEQNNLSEAERNELRGIQDELKPFNEQRAQFLAKAENRHRERIKHLGDDRLRRLFYCRGGHSQLVLLACLLSDDPVFQKVLKNLHIESLESALFVLKEPYRLREKRRSGKFDEQELNEGDPRFWYARGNVVSEFLDKLWQVAWAPIEQEATKQIDFRGRNEKQKQLYLFVPSQEKLKLLGELIGSTDSFFRYAEGAYIGDLIEEVRITVKKRDEHGGKVSFTHLSEGELQMLTVLGLMRITREDQCLFLLDEPDTHLNPIWKLRYFDDIEGVLSSDNATMVKSESQIIITTHDPMMVGSLKREQVYILRRDGNRTLVEIPDEHPQGMGVTGLLKSELFGLSSTLDIETERRLFRRNELFVLSPRSPEEDEELSRLSAELADLGFSTADFRDPDYAMFVRKMAQHRRFRKPVLTPEEQAEQDAIADSIIDEILREEDGE

SEQ ID NO: 83859 - protein, 285 aa, Enterobacter sp. GN02730
MIFIDLENKLPTDADLPADIRWSPADWDAWLKESDRLVDELAKLDAAETIKERNELIDKHSSHWGKLKPWLLALSGGKCWFSEVRELYSHYDVEHFRPKKEAKALDTSLRDGYWWLAFDYMNFRVCGNVGNRKKGGWFPLKDGSLCSTYSEPCEESETRYLLDPIDDDDVALIAFDEEGKVIPMPGSSAWEQERVNETVKRLKLNEHPPLAEARRKVWQQVDRLIDDFTQAKSRCTTGNNPAAKAKLIEVRARVRAMTTTTAELSAVARWCLLVRNDPQLSRLVG

SEQ ID NO: 83860 - protein, 408 aa, Enterobacter sp. GN02825; identical to SEQ ID NO: 82686

SEQ ID NO: 83861 - protein, 217 aa, Enterobacter sp. GN02825; identical to SEQ ID NO: 82687

SEQ ID NO: 83862 - protein, 553 aa, Enterobacter cloacae
MKVDKLHIRSRFKNLEDVKVDFDEDHLMTVVVGRNGSGKSNVLEALVAIFRNLDLGETPPFSYELIYRLGEPHKSNQPSERWLEITIDADPERGTLAKQYEVLVRDLLSNNISEDMFDKPPLGLAVPFSKVKRGKNGKAPYLPNYVFAYYSGPSDRLERHFKKHRTDFYRRLLEDKLELKGDIRPLFYAKPHHSQFVLLAFFLSEKDSAEKDFLRQHLGIEGLDSIHFVMRQPGWAKQKGELFWGARGVVRRFLDELIQHTLSPIKVTRQEDTSLTGSNIRNEFLHLFLPDVDALREFAKDLSADELFKMLESTLLSEIISEVSIRVKVSSSKVPLTFSELSEGEQQLLTVLGLLKFTGGKDSLFLLDEPDTHLNPSWAVKYLKFLREFVPNHETSHLLMVTHHPLAIAELEKQQVQVMWRDSNFQVHAHEPEESPRGMGYGGILTSDMFGLRTTLDNSTERLLRLRRSFTEKQELTSIQAGRLRKIDRAIEGLGFTTAHWDEEYAQYLRVRREVEMESEAITVTPELKRIRKERAKEIVTRILAAERDEHKK

SEQ ID NO: 83863 - protein, 287 aa, Enterobacter cloacae
MRHLNIDFNQLTLPEGWQDKAQNLSKLLLQAENAKQRSEIIEKNQDHWKSVKPVLAALFNYKCWYTEAPQQGTDVDVDHFRPKKRVQETLSTTTPHDGYWWLAFSLQNYRFSCIVANRRRTDVGTGVTGGKADHFPLCDESVRAKTPDCDLEEEQPILLDPLKATDVLLLQFKPDGEAMPRFSEENHARKFMRADRSIIFYNLNHSDFVRCRIELRDQIEKDVKAAKRYFNKLETGDADNDLAYEQTICRLRKMRGIEAPFSSFCIAYLDGFRHKPEYDGVLDAVYL

SEQ ID NO: 83864 - protein, 434 aa, Archangium gephyra
MRIQRIELENFRSFASRTFDLAPSFNLLIGDNGAGKTAILDALAIGAGAIFLGLDGASPPGIHRDDVRRVTHGLGDVPSLEAIYPSRITCSGTVGDTSMDWTRTLEGPKKHTTHGGAGDLARLAENWSEQVRAGAELTLPLVSYYGTGRLWLQRRTRHSTASDGARVLRPGSRLRGYAGCLDPSSDHKGFVSWFKTMELIQLQKGQKLGTLDAVKHSIRKCLRGWDEVLYDVRLGTLVARSQDRQLPFEMLSDGVRNMLAMVGDIAYRTATLNPHLREQAPSKTPGIVLIDELDLHLHPHWQREVVDDLRSVFPAIQFVATTHSPFIIQSLRKNELINLDDPARETLPSRSIEDIAEEVMGVEVPQRSHRHKEMMAAARAYYEALEEAKGTSGERLEELKRRLDELSAPFSDDVAYHAFLEMQRRAAKLPGDAG

SEQ ID NO: 83865 - protein, 232 aa, Archangium gephyra
MRPVVRGSWPLDAEGKPRSFPEYSEARGELIARMGEYCSFCESQLNASLAVEHVLPKERHPEYELDWNNFLLACVNCNSTKGDKPIKLASYYWPDRDNTARAFSYGADGVVRPAPGLTDEQQQIAQRTIGLTGLDKTPKTHAKASDRRWMHRRDAWGRAERARVCLATHDTEAMRQSIVEQATALGFWSIWMTVFAADLDMRRRLITAFVGTPVDCFDARTLEPAHRPGGAL

SEQ ID NO: 83866 - protein, 414 aa, Archangium gephyra
MLEGLKLEGVGPSPRMSFSFAPRLNLLTGDNGLGKTFVLDLAWWALTAHEREPLPALPRKDWPGRARVEASIVRNDGKRHTVVQTIPPHLVDSSGFAINPGLTLYARVDGSFSVWDPIRNDLRWQHGMHTPLPEYEFSREELWDGLARNGRAVCNGLIRDWVSWQLKRSEPFERLRRVLRVLSAHEQEPLTPGEPTRIGIDDVRDIPTLEMPYGTIPLTHASAAVRRIVGLAYLLVWAWEEHQRAAELLREETSKSLVLLVDEVEAHLHPRWQRLILPSLMSVASELRPDVKVQILAVTHAPMLLASVEPHFDPEQDALFMFDLVGGDVKVTRADWRPRGDANAWLTSEVFDLKEPRSVEAEEAITRAKAALKDPQLPIEKVREIHNELYRLLKDTDPFWPRWLARAEAAGIEP

SEQ ID NO: 83867 - protein, 193 aa, Archangium gephyra
MIHVEPQPEPSDFDSKVRQPGQSDLPSPEGELRPHWQHCALQLWHAYRGICAYSSLYIPRGTGARSVDHLLPKSKHRDLTYEWSNYRLACVRMNARKNALESVLDPFEVQDGWFALELSTLQVIPAEGLPADLRQRVEETIELLDLNDGEFIQARTEYYEVFRSGEMPFSLIRKYFPFLAKELIRQGVVREST

SEQ ID NO: 83868 - protein, 576 aa, Pseudomonas aeruginosa; identical to SEQ ID NO: 82792

SEQ ID NO: 83869 - protein, 270 aa, Pseudomonas aeruginosa; identical to SEQ ID NO: 82793

SEQ ID NO: 83870 - protein, 440 aa, Robinsoniella sp. RHS
MVLNTLHIRNYRCFEDTDINLDNHLTLFVGKNGAGKSTILDAIAIAISSFLCGIEGTVSRNIHKEDARYNFYELDGIIDSQHQFPVEITGYGICNGKKNVIWTRSLNSAGGKTTLKDAHEIINIAEQMQKQIMLGDAHIVLPILSYYGTGRLYAQKKEKRNLKALQKFSRQVGYLDCMAAESNEKMMLNWFEKMTLKSLQNQQKTGSVEKITQLKVVEEAVCKCFREISGAKDPTISFDLDSHRIIMEYTNDAGEKCRFALNEMSDGYKNTLSMISDIAYRMAVLNPQLGEQVLAETPGIILIDEIDLHLHPEWQQTILKDLQSVFPKVQFIITSHAPAVINSVEKERIRILDNSKVYMPVEQTYGRDANSILREVMGVGERPADVQQLLSDFYQAIDREEVIKAEELLNRLEEIIGNSDPEISGARVTLDFEKMQEESQ

SEQ ID NO: 83871 - protein, 223 aa, Robinsoniella sp. RHS
MILIRKEKEPNSLLQYRKSNQEACYEDLPSKPREDIRRQMWWEQKGLCAYCMCKLKAPEDVRIEHYSARHPKSGTYDATNTLDYKSMLGVCYGNSLHPGVKEEDKTCDAHRGNIPLTVDPRDIYSIRKIRYTSDGYITSLDAEIRKDVEKTLNLNCKARSLPENRKNVLIQAKREIRNMCGNRSHDTYLAVLESVYKRYAEQKMLTPYCGIVISWLEKQLSIN

SEQ ID NO: 83872 - protein, 470 aa, Aliivibrio fischeri; identical to SEQ ID NO: 80898

SEQ ID NO: 83873 - protein, 211 aa, Aliivibrio fischeri; identical to SEQ ID NO: 80899

SEQ ID NO: 83874 - protein, 487 aa, Photobacterium aphoticum
MRFQILKVTLDNTEYEISKFKESKNNLISVMTGKNGAGKSRILEFITNSFYVSDDFLLEYPENWSFHFNNPNSDYSHNQVMYRAGTEVCEMQRINSKLASIFKTSKFIENRYDLFPSRLICLSTSPFDRFPLNTKKASKQSIYSYIGMKNSKRSSSLVSLVSNVIDSMFKEPEKIETNLEVIKKTLSYLGYGNRILVSYRSNFKLNETELSRQVVSDILSSVDGPVFNERRIGSYQWDQAVEEVYRSIQTLISANGWKWKSSFSIPINLSKGNFLEDDYIKSIQVLSMYELFSIKSLKLSISGDNRKFVDFTHASSGEQCLSLMLLGIASQIEDGSLICIDEPEISLHPEWQEEFVPLIDNLFSNYKGCHFVIATHSPLIISKLVGDHCSVLDLDRNEQIELSNNRGYSSDYQLATLFKSPGFKNEYLVNESLDILTSLSKEVNVDEDVLQRAEVLINLLEKLDEIDPVYSLISTIKKVIEVVVNDR

SEQ ID NO: 83875 - protein, 209 aa, Photobacterium aphoticum
MIDNEVEYSEEQIQLITQYLERENISGDDWGNEEFNEIRGVIKNHYKIEQGYKCPYCTVVYPVNHGMAWDIEHIVAKDKKVQFMFEPRNLCVACKDCNAAKSSKEVLTNPTRVRFPKNSRDYKIVHPHFDEYSEHISAVVPGEFYRPLTEKGEFTIITCRLLRFYGVVQREQPEQEINDLAKVLINSEGAARRVIEDELVRRITAKRKP

SEQ ID NO: 83876 - protein, 443 aa, Aeromonas hydrophila
MAVIPQFRFKTHNGQEKAVDLILPIATVPNSLYTTTIVTGQNGSQKSTLLRELAYSLISSPDAWSPVKNEIRYSNVLCISGSTADRFPQKEESGGRRSKFDVPHYTYVGQRIYSNLLSKRAPLETILGFALAPDKRNRFQWRFFSEAHDIAGVNSNVQCTLSFKHTTNGKHIDVLGDIQAITKDDNHRSSKRPLVSYAMAQWLLDNFTYEEFNTLTAILKKQIPIKRQSISLELSAEGPTCSQVDLNVLRLGLLIGLFSLRDFLVHSRVTDKKFSVLELSSGEFSMYSTILAVGFGIEKTGVILIDEPENNLHPQWQRDLMEAIFNVCSEVLENSHIIISTHSPLIVGAARPGSFIVDMTNEHPSTQVVSYGASADELLLAQFGVGSSRNKVVVDTVQKAVAMVESGNFESAEFRQQIPQLERIRDSLSADDPMINVIEALLE

SEQ ID NO: 83877 - protein, 241 aa, Aeromonas hydrophila
MNTGFEKIIPTPIVLAQTLVALNSYTWNSGANEVINFKGNLKVALRKAQCGRCCFCRRQLYDDYATHLEHFLDKESFNEYRFEVFNLALSCGTCNGKKNGAFSTWSKNNRRAAANFIGPTTPSRLSPFLNGPLSPNAQYPNQPAAFSWVHPHFHLYSEHISISRGWVFKYLTNVGKNTIDGVKLNDVGEIERRALAEKLENRGSRLSKLVCAMSELEFHRASDVGTALAKAIRRKRASIGQ

SEQ ID NO: 83878 - protein, 480 aa, Enterobacter cloacae
MFTLLSFNITHKENEIYDCIFTDNQRHIRNLPLSSIVIGENGSGKSYLLSQVADFFRFIQRIISKEKKPYYKYEFASVKYLIDSDLIVIKKDRNKVFCFVNDVPSDISHVRLPTKVIAMSFMVNDKFSFSRFEEDDFYDYRGVRATSNASYTSTIKRMITNALILSIGYRDKLKAIKDTLHFLGMSEKLAITYNLNRKTLLKRQPPLNAILRKIDAILRRKQYVNENEFYKIKDNPEVILHDIAILSEECREKNGRIHLTLDLSDEGEGSKTSLFQSLSRLEKLEFISNPDVEFYKKDNFSFEETSSGEKNIIFTILNLIASIKKNSLILIDEPELSLHPTWQMKYINFIKKSIAYNFDCHLIFASHSHFMVSDLESKSSSLTSINQCNGKRICEHIEYSTYAWSVENILYKVFHLRTIRNAQVEMDLYELSGLISQKSSDIKRVEKILTHLERIVLDVNDPLNVIIEQGRIYIGDFHDK

SEQ ID NO: 83879 - protein, 190 aa, Enterobacter cloacae
MNKINSLKPFEGGSWDRKDIAIIIFKRLLRKQLLTAQNDCCAYCGLPLGETGKTEIEHLVAKGGPKRPKHVEFTFEVENLYLSCNLCNSPLKKGTKETLIYKDPISYSNCTFSIVHPRYDTPGMHYSWVVSAVEVLIQGISDKGRESIKMFKLDSTPHNEARARIEMSRRYKMLIDPPQIALINAILQYN

SEQ ID NO: 83880 - protein, 480 aa, Enterobacter cloacae; identical to SEQ ID NO: 83878

SEQ ID NO: 83881 - protein, 190 aa, Enterobacter cloacae; identical to SEQ ID NO: 83879

SEQ ID NO: 83882 - protein, 465 aa, Escherichia coli; identical to SEQ ID NO: 81190

SEQ ID NO: 83883 - protein, 243 aa, Escherichia coli
MRHVIKTQLGSVALLTAHENPPQDADQSTRRWRNFRRDKAAVMVQLINEQYHLCCYSEIRSDLRGLGYHIEHVENKSQHPERTFDYQNLAASALDSGENGGLSSLKGKNAFGGHAQGKQDVVDMAKFIHCHIRDCSRYFAYLSDGRIVPADELNAQETENAQYTIDLLNLNSGFLQTERRNHWEELEQLFDEHIEKDWDLQQLLQLDLVSTPDHKLHEFFSITRQFFQQEAEQVLQSHAPALI

SEQ ID NO: 83884 - protein, 465 aa, Escherichia coli; identical to SEQ ID NO: 81190

SEQ ID NO: 83885 - protein, 243 aa, Escherichia coli; identical to SEQ ID NO: 81097

SEQ ID NO: 83886 - protein, 465 aa, Escherichia coli; identical to SEQ ID NO: 81190

SEQ ID NO: 83887 - protein, 243 aa, Escherichia coli; identical to SEQ ID NO: 81097

SEQ ID NO: 83888 - protein, 552 aa, Klebsiella pneumoniae; identical to SEQ ID NO: 82534

SEQ ID NO: 83889 - protein, 280 aa, Klebsiella pneumoniae; identical to SEQ ID NO: 82535

SEQ ID NO: 83890 - protein, 552 aa, Klebsiella pneumoniae; identical to SEQ ID NO: 82534

SEQ ID NO: 83891 - protein, 280 aa, Klebsiella pneumoniae; identical to SEQ ID NO: 82535

SEQ ID NO: 83892 - protein, 552 aa, Klebsiella pneumoniae
MKVDKLYIRSRFKNLENVKVDFDENHLMTVVVGRNGSGKSNVLEALVSIFRNLDLGEAPAFSYELTYRLGEPHKPNRPSNRWLEITIDADPNRGTLAKQYEVRMRNLLNDSLPEDIFDEKTLGIVIPFSKVKRNKEGKAPYLPNYVFAYYSGPSDRLESYFKKHRTDFYRHLLNDKPDKKLNLKGDIRPLFYAKPYHSQFVLLAFFLSDENSPQRTFIKEHLGIEDLDSIHFVMRQPGWAKQKGELFWGARGVVRRFLDELIKYTLAPIKVTRQEDTSLTGSHVRNEFFHLFLPDVEVLHTFAKGLSDDELFKMLESTLLSEIISEVSIRVKVSSSKVPLTFRELSEGEQQLLTVLGLLKFTGGKDSLFLLDEPDTHLNPSWAIKYLKFLREFVPNHETSHLLMVTHHPLAIAELKKQQVQVMWRDDEYNVHSQEPYIDPRGAGFMATLTEVFGLNTTLDLETQKLLDDRNELAHIESRTEAQSNQLDLLNDELNRLGFSFENRDPLYSEFLLAWQDLKYSERPPLTPDKAAQRRVAMKKVIEVLQAKKASE

SEQ ID NO: 83893 - protein, 280 aa, Klebsiella pneumoniae; identical to SEQ ID NO: 82535

SEQ ID NO: 83894 - protein, 845 aa, Klebsiella pneumoniae
MTNDHEELELAKAQAKEIWKILDYVRGASPISNYRSLAYSIFFVRYLQSNTGQHFEAGRLDSFNVITLYSYDLINYAVQLGLIHSDVSQFLIDYLENTLHSFVNIDESFVRYAIRDDLLNKTTTIASLSLSELDLLFAENEGKSGGEFYTPIDVNLLVKTLGLSYQPKSICDPFAGAGNTAFPFASTGIEKVRIDTQEINRDAYFKLVISRTIRKIEGRDYFGDSLSQPLYQENKYDLIVSFPPFGMKIPKATRNNIYYKTSNKWLDIAEILPESRSDWFITLSMLPALTEGGKILVGMSLGALTRTGSEAKVREYLVSRGIIEQVILLPKNIHYSTAISTVLLVLNSGASNINARSIKFVDASLFYEPARGRNTLTTQNINEIVEACHKDGRFSISSSYTQIANRDFNLDPSLYVRKDLKISEISLKNFRGYSDFKVSIHPSLNVLVGENGVGKTSILEALACGLGPFLTAMPDAKGKLIKKSDIHISTKGIANYARISIETTSSLSWDLVAKGIDVYEPPKIGTSALTSYATHLVDSQSEYPLIAYYGTNRALTSTSSKVAINPFEKENRGEGYDFALDAKVNYGILKNWFSKIEVDELRKRDELKDHKFIHPAKRLVSEAVYQIVDRATCLEFDKNSNDVMVHWKNEQGECVKLTLEQLSEGYRNVVSLTIDLVRRAYLLNPTKPKPLTVNGIVLIDEIELHLHPRWQQKILNDLTKLFKNIQFIVTTHSPQVLTTISADCIRIVSVNANEAKLVTGTTTYGSESSRMLEDVLGGNNRAQHLDIVKKLNRYTELVEADQWDTDEALELKKELYKWGGQTEDELLKLETDIRIREFERGNEKN

SEQ ID NO: 83895 - protein, 262 aa, Klebsiella pneumoniae
MKKINKLDEPNRLGVFKATHPNALWERDKNSIEEAFRCCTARYQETLQQLRTDQGNLCAYCEQDLMSGTNGALDDCRIEHFHPKSKRAQGEPNWALEWSNLLVVCCGGNQSKVVNPEQRFDADPKNYSCDVPKSDKILDSIILNPVNLPELNIWKFHRSSGQMSVNEGSCLEFGINVEMAHRTIKELNLNSPRLIRFRKTILDNLNILITERLKKGQTIEQAVRFIAISLFRKNGAGDWPSFFSATRYYLGQQAELVLTQPI

SEQ ID NO: 83896 - protein, 550 aa, Klebsiella pneumoniae; identical to SEQ ID NO: 82676

SEQ ID NO: 83897 - protein, 307 aa, Klebsiella pneumoniae; identical to SEQ ID NO: 82677

SEQ ID NO: 83898 - protein, 845 aa, Klebsiella pneumoniae
MTNDHEELEFAKAQAKEIWKILDYVRGASPISNYRSLAYSIFFVRYLQSNTGQHFEAGRFDSFNVITLYSYDLINYAVQLGLIHSDVSQFLIDYLENTLHSFVNIDESFVRYAIRDDLLNKTTTIASLSLSELDLLFAENEGKSGGEFYTPIDVNLLVKTLGLSYQPKSICDPFAGAGNTAFPFANTGIEKVRIDTQEINRDAYFKLVISRTIRKIEGRDYFGDSLSQPLYQENKYDLIVSFPPFGMKIPKATRNNIYYKTSNKWLDIAEILPESRSDWFITLSMLPALTEGGKILVGMSLGALTRTGSEAKVREYLVSRGIIEQVILLPKNIHYSTAISTVLLVLNSGTSNINARSIKFVDASLFYEPARGRNTLTTQNINEIVEACHKDGRFSISSSHTQIANRDFNLDPSLYVRKDLKISEISLKNFSGYSDFKVSIHPSLNVLVGENGVGKTSILEALACGLGPFLTAMPDAKGKLIKKSDIHISTKGIANYARISIETTSSLSWDLVAKGIDVYEPPKIGTSALTSYATHLVDSQSEYPLIAYYGTNRALTSTSSKVAINPFEKENRGEGYDFALDAKVNYGILKNWFSKIEVDELRKRDELKDHKFIHPAKRLVSEAVYQIVDRATCLEFDKNSNDVIVHWKNEQGECVKLTLEQLSEGYRNVVSLTIDLVRRAYLLNPTKPKPLTVNGIVLIDEIELHLHPRWQQKILNDLTKLFKNIQFIVTTHSPQVLTTISADCIRIVSVNANEAKLVTGTTTYGSESSRMLEDVLGGNNRAQHLDIVKKLNRYTELVEADQWDTDEALELKKELYKWGGQTEDELLKLETDIRIREFERGNEKN

SEQ ID NO: 83899 - protein, 262 aa, Klebsiella pneumoniae
MKKINKLDEPNRLGVFKATHPNALWERDKNSIEEAFRCCTARYQETLQQLRTDQGNLCAYCEQDLMSGTNGALDDCRIEHFHPKSKRALGEPNWALEWSNLLVVCCGGNQSKVVNPEQRFDADPKNYSCDVPKSDKILDSIILNPVNLPELNIWKFHRSSGQMSVNEDSCLEFGINVEMAHRTIKELNLNSPRLIRFRKTILDNLNILITERLKKGQTIEQAVRFIAISLFRKNGAGDWPSFFSATRYYLGQQAELVLTQPI

SEQ ID NO: 83900 - protein, 530 aa, Klebsiella pneumoniae; identical to SEQ ID NO: 82680

SEQ ID NO: 83901 - protein, 209 aa, Klebsiella pneumoniae; identical to SEQ ID NO: 82681

SEQ ID NO: 83902 - protein, 573 aa, Klebsiella pneumoniae; identical to SEQ ID NO: 82678

SEQ ID NO: 83903 - protein, 269 aa, Klebsiella pneumoniae; identical to SEQ ID NO: 82679

SEQ ID NO: 83904 - protein, 507 aa, Klebsiella pneumoniae
MFRINSIMNDSRDKVRVHDFSEDSHNNYYTILTGDNASGKSSLLSKAINFFLFSNVNNNDRNPAVELECLSERNPSKIIAICNSKFDRFTSNKILNDKLNNKEATQITMSYIHPEVNDNTRRGISGIVDQCIKNSLRHKNIRGLQDANRVREAFMMFGLQSDLHLKCTLNTQNIKYVLSILSSLVNGGVILSDEGITHTKKIDYSKNEELKNKNFKLDKSIEIILRESEYKNHLDGLYDTLLMLDAGKFTQGNFSSIYFSVAEGTISTESKYLFDDLNEAEIINILFVLDVINVSDIQVMHLNSKKEVNIVSLSSGQRTLFGNAIVLSGYVEKNCMICIDEPENSLHPEWQLNFMRFISLLCPDTLEAHILIATHSPQIISGMQFDNGCVLSLENRDNFDSIIRKEKKYEEDGFYELQPLKAYREQSAGKQLTGVFKSPGYKNDFIIKKLLLILSKISKKIALTKDDNEFMDEISILIDKKRIPEGDPVQLIFKQILSFEYARSSDD

SEQ ID NO: 83905 - protein, 224 aa, Klebsiella pneumoniae
MINRPIVYSATAQEFVDTFNGDASHWDGTCAVRKAFRKEVRDYYRDEQEFTCPYCGRLREEFHGGQWDIDHIIPKSSYPQYLYTPRNLAVTCKDCNTHKSKKKPLLITLDSGAPYPENTVSYKIIHPHFDSYNEHITLRKDKKGRSYHEVITDKGRETFLMCNLIRFSEVICGTSEFIPELGTEIGITNSFSESVQVWLADYDDLNPVDAEIALQALMQKISLR

SEQ ID NO: 83906 - protein, 527 aa, Citrobacter sp. MGH104
MLNQHPKIQKIIRLAQQGDVVAAFQIHDYFKKGKFVDIDLQIAEQYLNIALDNFKKQEVHLSSLSLLNFRGIERLTYQIKKNQVIIGNNGAGKTTILDAIYLCLSWLVQRIVHVGGKGKEIDMSDITVGNQDGYSSIIAELTLNDKFKPKIELCEAISGSAVGKKSYYLEFNRLGALYKLACEKDISFELPVFAYYGVMRSVDVSSKDFTEFDDTANIDSSNRFDGYNGCLSGKADFKSFFRWYKRLDDQVKHQKSNSIDLDLKIVSELKSIDFSGDNSKQNLLDIINRVQEQQNQVSKSWALKAQEMVNNIIPSFMDGFSDLKVELNPYLHISIIKNGNKLNILQLSQGEKSLIALVFDISRRMMILNPHLDDPFKAHGIILIDELELHLHPKWQRNVLNSLNSIFPNCQFIISTHSPQVISEVKNDNILILEKNNRGKLSYFSPKQSYGLTSNQILNELMDSEDIKLDRAPEIQERIDHIFKLIADHNLEDAKSEIEELEHDINGEIPELVSAKFDIDMFGWDEK

SEQ ID NO: 83907 - protein, 216 aa, Citrobacter sp. MGH104
MKSIVKGREPRTLTEYRLQNSEYDGPGFSPVKNDIKSSLLAEQGYLCAYCMARISADNMKVEHWACQDRYGNLQLVYSNMLGCCKGGEDADNERGYDKLTCDSRKGNLDIKFNPSNPQDHIGRVISYDGNGVVFSNDEEFNYQINNVLNLNKSRLKDNRKELLQNIRHRLDEKPGNRTKAELGKLLSAVNSVDALGKLREYCGFLAFYLEEKIKKV

SEQ ID NO: 83908 - protein, 410 aa, Citrobacter sp. MGH104
MGNFINKIMQNIPAIQREITLNGKNLIIVGNNGAGKTKFLHALNDYLSKVFNKDYMVTLKQLEEYKKEQENQLKHYENVNSRYHTVKQNIGYYDVRIKERLCFDVIFEKPDLLFGDIKDNRVITRFFPAHRRYLSNGQNLLTSVDTLFNDFKAVSPQQLVTCDYFERYLVSMSNYALIEKGAESIDEYERVIKVISKIENDLKVLFEDETLSIHYNRKKLRIEILQEGKEPSGFDNLPSGFASVLAIYAELIMLAELSEGTKDDIRGIVLVDEIDAHLHVTVQKKVFNFFSESFPNVQFIITTHSPFVVQSVSDAVIFNLNTGEQMENLSVYSYTSIIKGLLGESGNSSELEDLLSEIDKMSKDNDFGSRFIELSALLEQNFSVLDARAKAVFMGAKAKMVDWEEAQDNV

SEQ ID NO: 83909 - protein, 224 aa, Citrobacter sp. MGH104
MFNVIRTMPAPASLALQRDYKGKDVIDALREIFHDKCYLCEQDLISAPEVEHFVPHNKTPALLYGWNNLFYSCRRCNSIKSNNHTNLLDGSDPNLDVFSEIVHYAGNAATGNVLIKASSPYPSQETINTVNLIHKCFNDDNTSLKGISKESLLELLLEDYALFIGYRIKLVHRSSTPREIQEAKEKLSVMCQVQHRFSVFWKWHVIDDAMLNRKHPNIRRELAF

SEQ ID NO: 83910 - protein, 717 aa, Citrobacter sp. MGH105
MRKIKRLNADIPDDLKPARIVQEESELRKYFLQSPKLRSHSRPPINKEIFYSESVWSALQKTFHSRCAWCETHVASHDGEIVHFRPLSNAKGLKEEESLDSYGWLAYVWDNLFLSCSGCNRVRRNYFPVGSARAPVLSTWRGANILETVLLINPCLDDPIRHLSLSRDGTLVALTDKGQHTLMLFDLNRTDLIFSRQKQINHVHSFFPGREGSVDEFQKFYLSDDCPQGIVNLIIAMFMKEHVGGRPCRSTNKVESFINDSVKLGYFAFDNNADTLVEIFEEIEQLSYRDVEYDKFASILDYESQASRHLKKIDIHHFKGLGHFTLNLKHSESKSLAPCMMLLGENATGKSSILQSIALAMMTAAQRKKLNLVYDDFIARDNGEWTVDHIQPAEISLTFNDGTSSMFRIDENFNAIGEGVSNIVFLAYGARRFVKPLKQGGLRNSIISNTLFNPVALLSNPTGWLQECDDDVFLSVARAMKEILALKQDDIIFRNDQRHIMVRAHKRNTPLENMSDGYKALFYVAIDIMRHMLKRWDNLEYASGIVIIDEIETHLHPRWKMQVVSAFRRAMPGIQFIFTTHDPLCLRGMFDGEVHVLKRDEMHSITEEDDLPRFQGLRTEQLLTSEYFGLLTPNDPDLERRLEDIAGQEGDHQAEYIRQVEQELSEMTVLGTTLSQRVVHEALARYLISVTRKQPEAKDIKEDAIRAILNVLVQKGY

SEQ ID NO: 83911 - protein, 302 aa, Citrobacter sp. MGH105
MIKIDRSAEPVPTSLTMAGNVVDNERTAAQSYYTAVPAPSKTYKFKRYKEDDIVEALERLFHGKCAYCESKYIGTQKMDVEHYRPKGKVNESQTHPGYWWLALDWDNLLPSCTDCNRRRGQKIAVLEADGTIVFTDTMENAGKECAFPVSGPYRAWNSQDNLALEVPLLINPCQHDPDDHLSWHISNTKAPILLAKLLGAQPDQKGVSSIEIMGLNRFGLVNERAAVLQQIEVQVKNIYQLIDITAIMPACEARDRCLIKIGQDIDELHACYKPNRQYASMVKSYIEPHMKTLKRYLVGLLP

SEQ ID NO: 83912 - protein, 459 aa, Enterobacter sp. MGH85; identical to SEQ ID NO: 82560

SEQ ID NO: 83913 - protein, 211 aa, Enterobacter sp. MGH85; identical to SEQ ID NO: 82561

SEQ ID NO: 83914 - protein, 408 aa, Enterobacter sp. BIDMC93
MKFTIDTINGIDAFNSKSFKIDVGGKNLIITGNNGAGKTRFLGKIKEKIDNLIQSYDMPTLENFKKTLKDNHEAMLNTPPGAGVYDQFKFTITEMEKRIDEFNHFNIEFNDAYGFKTQIKKRDAFVYFFPAMRSANIYNDGRITSRETLLSEYNNNIQDANFDAGQLLERYVVTLWNYSLLKKANGDVSDYERVFGTITSIQNDLRELFEDSSLRLDFNLEELKIFIVQDNKEPFGMNQLSSGFSSILSVYAHLIMRAELDKVGKKDMLGIVIIDEIDAHLHVTLQKKVFSFFSTSFPNVQFIISTHSPFVLQSVSNSVIFNLSSYEQMEDLSLYSYTSIVKGLLGESEESDRLKRLVDELLKLVDDNNFTIRFDSLVNLLDKNVEHLDSRSRASLALAKSKRLDSEE

SEQ ID NO: 83915 - protein, 223 aa, Enterobacter sp. BIDMC93
MFNVIRNYPEPLDLSRKIYNSPEIVGRLRQIFHDKCYLCEQGDLSDPEVEHFKPHGGSDELLYGWDNLFYSCSRCNSIKSHTHRDLLDCTSSDVDVFEEIIHLAGNSVNGFIDVRPSSNAPTQETLNTVRLLQKCYNSENTAFRGITKENLMEKIQDDFAYYTELRMVLANLRSTDNEIAQALERMKVICKPSYPFSVFWRWHVITDVRLNRIHNNLRESLDF

SEQ ID NO: 83916 - protein, 220 aa, Enterobacter sp. BIDMC100
RDRQLTAVRSAIYKFMPEFSNLRVRRKPRLHMSIDKNGEPFDVAQLSQGEKSLMALIGDIARRLSVMNPELKNPLEGDGIVVIDEVDMHLHPKWQRSLIKQLTTTFPKCQFVLSTHSPLVISDCKNVLAYLIGDEELIQLPSLYGQDANTVLLEIMDTDIRNAEINESLSMALDAIHDSNLSQAKEIIQQLEEELPSGNLELSKAKLLLRKKELKDAQNN

SEQ ID NO: 83917 - protein, 211 aa, Enterobacter sp. BIDMC100; identical to SEQ ID NO: 82561

SEQ ID NO: 83918 - protein, 553 aa, Pluralibacter gergoviae
MNSKYTKAPNDIRTLLQSYVIKTEDGLEFSKENVPEEVSLLYKELEDASFIINKVAISDYKRVRDLFVSLDKKLTVFVGDNGYGKTTILEALFIALSWFRANVQKEDKSGFHIKDGDINNHNDVNYAAITAHFKLKNITSNILVTRVKDGVSQKRNNELLSIKEMASFFRVVNSYYDDVSLPVLAYYSVSRSSNGAGIDNKRNINNSVRRWTKLDAYEDIEFDRRDFGEFLNWFIFVNNKALSEESLIPKQERDQLVIDISKLKVSLEVLKSFRDVDRRTIIDIETQIANKELNLNTLPSALNVDGVSRSKDIVANVKKAIINFLPEISSVDLQYTENEVRLVLAKDDLLLDAQQLSQGEKTILTLVGDLTRRLVLLNPGLNNPLQGKGIVLIDEIDLHLHPSWQQNIIEKLQHTFPNIQFIITTHSPQIVSTVPSKCLRILEEIKNPSTGEKELRVLLPSSQTKGTKNSYALLYGMKTDPIPSVKEVAWLSTYKKLIENRLQDSDEAIMIRKKLDKHYGVDHPLLLECDGIIRVLKLKDKVQGGPRNKGSEQ

SEQ ID NO: 83919 - protein, 222 aa, Pluralibacter gergoviae
MKFLTRDPVGPEVLAEFDYNIHDWNAFKRRHKQLVWVDLVKMQGKRCAYCERKIDIHNSDDKHIEHFLRRCRHRHLTFEWSNLFGSCAESKHCGFYKDEQNYQEQDLIKADSDDPTYFFHFGINGNMDIRSGLSRNDQRRAEVTIRVFNLNGEKGGVKTERINAISETWSLIEKFISIAEEFIEEGLYDDSVRNDLRDEYYKEIDPRPFSTALRDVFDTMLP

SEQ ID NO: 83920 - protein, 576 aa, Pectobacterium carotovorum subsp. carotovorum ICMP 5702; identical to SEQ ID NO: 83322

SEQ ID NO: 83921 - protein, 267 aa, Pectobacterium carotovorum subsp. carotovorum ICMP 5702; identical to SEQ ID NO: 83323

SEQ ID NO: 83922 - protein, 455 aa, Pseudomonas sp. DSM 28140
MKLNQLSLRDYRCFDALEIDFHPELTVLVASNGAGKTSILDAIAVAFGPYVGAFDEAVGKHFEPSDIRQVRARTTLTHEMEYSAKGVRLEARGVIPGSVAEQLDDLPSIWRRSLTGPTKTKTSVKDAKELRDCGKRMQEAVRTPGSDVVLPLLAYYGTGRLWQQKNQKKQSWSNKIVRTSRTVGYTDCLDPASKYKAFVEWFRYWNFNAKELRIKALELRETAVVSEFDGYIESVSAAVNACLEPAGWKNIEYSFSRDALVAHHDDFGELPVELLSDGIRNMIGMVADIGFRATKLNGQLGAHAAKSTPGIVLIDEVDMHLHPRWQQTILSQLRNAFPRLQFIVTTHSPQVLTTVPSESIRILRGNKVYSAPPGTEGSEPERMLKQVLGLEEVRPPGNPATQELKEYLALVDRDQWSSERAKTLRERLDRRYQGQEPALLDADLQIDNRKWELGD

SEQ ID NO: 83923 - protein, 272 aa, Pseudomonas sp. DSM 28140
MGVGRLKRVVRTAEPDELKAYREANPMFGWDEMRQDAEGRAVYDVIRPRLIEGQGGICAFCEIEIISLDPTRCRVEHFHPKSDRATPHNWALDWQNMIAVCMGGSQRHHALPYTKEPLPENLSCDAHKDKMIQSHRLEECCEGWIINPVALPAFPRLFFLEKSTGELLPDGQCCSEVSVEGNKHPTTQALVEHTINMLNLNCDRLCEARKSVLWNIERNKKRLRDAAKTPQQGMDELAGRFLQQRWPGFFTTIRFCLGAAAERYLQNNEYRG

SEQ ID NO: 83924 - protein, 423 aa, Mycobacterium obuense
MKPESATVPSGNGFDTLRLHRWRQFEDVDIDFHPRLTVLTGANASGKTTILNLLGRHFNWQSQFLAVPRRTRSGPLEWLATYDEPDETISVENMIKYVGELRYWDGSEAQIAISKRADAEIDLSLPGSATVRGIYVSSHRTVGRYQKLATIPSEFSQVSLIHDQYWNEAIARYSNSYTAKSPITSMKESLIAAATWGASTADNEANVTAQRVWTEFQEALRLVLPDSFRFQRLVIRSPELLIYTDSGEFLIDSASGGIASIIELTWQVYLRSWDSDNFTVCIDEPENHLHPSLQRSLIPGLLKAFPRITFIAATHSPFIVTSVADSNVYVLAPSAEHDGKIISTLLDTANKSGTADEILRRVLGVPTTIPIWAENQLQQLIDSLEGSSFADKLRQIQDALTGLGFQDQFPAALDALEDRETGA

SEQ ID NO: 83925 - protein, 216 aa, Mycobacterium obuense
MRWRIAKQVRKLDKSDIPASLAANGAQWTAKFMAVPDPSKPVVWRDDELVASLKTETHAKCAYCEGKILDVSYAHVEHILPKSERPELVVTWTNLTIACQVCNTEKREYHDVSLPLVNPFTDDPTEFLEFNGPFISEKDGNARGERTVDRLNLGRTPLLLARAEKIDFIRRLLSRWQTATGTEKDTFELVITRELEDDREFVQSLRAFASAKGFPT

SEQ ID NO: 83926 - protein, 730 aa, Bacillus cereus
MIFINRGSAPPFLYSNKIKTEIEKMNYYYSLDISARDKSRYETKNPFPLELKRALEDLFQGKCAYCESIINSANSYGQINHYRPAKGVYFNDHYSPDHYWWLKYEWSNLYYVCQLCGNRKHKKFPILGKPAPIGAIGAELLSEEPLILDPCSDIPENHLIYNENGEVHSKTQKGKYTISLLGLNREQLVAGRRRSLHLFQNSCERFIQLFQSNFNDTEIFRDTYESLLKEVDSSAEYCGIKRQFLLDWIEKDSNYKRIFSDEIYGYLAKTSLITKENQINSNLSFIEHEDEIEDYNLKEKDKLINYFVKQRLITRIVISNFKSIEQLDLKLNIEDEQAPWLMLLGENGCGKSSILQGIALCLMDNSQRKNLKLDATGYLKKNAKSGFVQIFISGSSKPIEIQFNEESSEFISNQKSQKVLVLGYGDTRLLPSDKHKSPEVSISRTENLFDPYSPLIDPSIFLYNLSSEEFHYVRSSLESLLVLKEGESIKKGNELNQILVTTNGTTVELDRLSTGFRSVIALTTDIMMTMKEFWKDSKDAQGIVLLDEIDAHLHPRWKLQIVNKLRDTFPRIQFFTTSHDPLCLRGLKKHEVAVLRRANNNKITVKLHLPNADNFEIDQILTSEYFGLHSTASPEYDKLMKRYYELLSIPNSNRTDDIEKEIEKVKDALGEFEILGQTPRDQILYQILDEYIAKNQDFENEDINKMDDNTKDNVLNLLQKYQLDESEGER

SEQ ID NO: 83927 - protein, 289 aa, Bacillus cereus
MIYVNRSNVSMPAVLDTSNSSSLGSIETQDCIAYYFNSPSDPFDFKIYRDPEVVRKLNDLFYGKCAYCESSVQTVNNIEVEHYRPKGRIRVKKEGKWTWTQTGYYWLGAVWENLLPSCTFCNQLRKHETEDGQMITAGKWSYFPLENENQRVFLPTGNLGEESPLLLNPCVDDPSKHLDFQTDGTVTHRTERGRISLGIYGLWRRDLKRRRHEKVKEIEFLIIRVRQNLKMLSICKEIDMRVHLLQELDELLAHLKTFTEPEKLYAGVAKQLISSFFNEISQDLTRVSV

SEQ ID NO: 83928 - protein, 470 aa, Vibrio sp. J2-1
MRLGKLRLNKHSIFGDVEVNLSHESSSSNYRTIILGPNGTGKSSFLGGIADILSIEFSKDKNKSLKSYKEDYDLEIVIDSEKYNIRPDFEKVELDIEKVIAVTSTMQDRFPFIAKNSVRRSDKYIYLGMKTASNNIFFSNLKENILLSLFPIYYDAKRTKTAINVLSKLGFGDNFKFQINKGRNYSKVLKALINNEAISYNDNYDAKNLKEFIDSKYAKENRLKISNLFDEINEKDKGYLINVKLEDRNRFNDKVSYLELIKKLLSNNVISIGDLSLFSTSGYDMNQASSGEFNVLRTFLSVIANVSDNTVVLIDEPEVSLHPNWQMEFISILDLALSHYKGCHSIIATHSHFILSNISNEDSSIISLLPSSESRNVYVSDLNLELYGWSPENVLYRAFGVTGYRNKYFEIDLRIIIDFLSESKADHTEFIEAVCRVEPFKLEVNDPLYKIIENARNKRDKILLGLSNNG

SEQ ID NO: 83929 - protein, 221 aa, Vibrio sp. J2-1
MANYRYIEKLSREILYSEEEQQWIDTLINSDLEPTRIWSGEVNSIGVRRKDRDSIIKKIKKELEEIQEGYCYYCGFKFNFRVGERGVKNIHREHIAPKSLYKAFTFTSKNLVLACNICNGDDYKGDLNTISSLDSDYDNCNFNIIHPYLDNKSDHLSLEEDGTLANVNGSQKGKNTREMFGLDEIFHIENRRQYIICKSYNVGSIYELNLEELLLRNRAVF

SEQ ID NO: 83930 - protein, 541 aa, Proteus vulgaris
MRDRKRNAKSGNLLASFALYLECAQSPSDEKREQAEQWFNDCWHYLQDSNENKSVGFTPKNKFYLRSITLDDFRCFSYLDIQFESDLTVIIGNNGQGKSSILLAIAKTLSWFSANILKEDSPGQRFSEITDIKNDSNKKYTDVITQFYFGQGLKNISARLSRSALGKAERREGEVKAIKAVADIWRVINDKKTVNLPNFQFFSVERSQPLGRLPKDSSGQREARFDAYNHALAGGGRIDHFIEWFITLHKKTADHSASSIDELTQHVTDLRLSIESGLSSLRPLLEKAEEQLQYLLLQSRDEIKKLNITQKEMVVKAICNTVPSISNLWVETLSGSDLIKITNDNEDVTIEQLSDGQRIFLVLVADIARRMVMLNPLLANPLEGQGIILIDEIELHLHPKWQQSVIQNLRSTFPNIQFIITTHSPVVLSTVDKRCIRMFSGNKTLIKPEFQTQGVINSDILEQIMGVFATPPQIPQSHWVSEFDELIEKNGFEDNKFAKDLYEKIKDHFGENSVELKKCDSLIRIRKMKQRVLNKNLGKGN

SEQ ID NO: 83931 - protein, 216 aa, Proteus vulgaris
MKFLRRNETTLECLENFVGGRDNWNEVNKETIWASLDVMQKGFCAYCECSLKRKHIEHFRTRDLHTNLTFVWSNLFGSCGDSSQKGGWNRCGIYKDNGAGSYDVESLIKPDEDNPNDFFLFLTTGKVRPKDNLKDKDLVKAEESIRVFNLNDDSVLFNSRRRSIESEQNEIDMMYSLFDEFSESEWEELLTTALERVSQLEFSTALTHAWRYNYQY

SEQ ID NO: 83932 - protein, 410 aa, Proteus vulgaris
MIIKSINGTIPFTEKNISIDLDDKKSVVIIGNNGSGKTSLLQEINKYFESIFSNNTGNFIEEIKTNIDNYTLWMNEAESKNDYTSYYRYKKNIDQENLKLKEFQFKINVEIDNIDEMVKESYYKKFIYFYFRASRQISINESHGTKPISEIKESWLSVDQSSMLNKYTNQDLESYLITLYTQEALYNKNNEPAKANKLSLWIRELEEKISILMECRINFEFDYENYKLYIVRDQYYRSSFRELSSGYSAILDIFTEILFRASLYSIEPSEIKGIVLIDEIDAHLHLSIQRKVLPMLISTFPKIQFIITTHSPFVLGSSDDFIIFDITKNINIPSLTMYSYENIVKNILDVDVIPNTVREKIQKLKEQIEAGGKDKDLLNSIFSELESSLSILDSESKAIYYTALNMYIGE

SEQ ID NO: 83933 - protein, 224 aa, Proteus vulgaris
MFNTKRDNVIPQGCRDKTNYKSPEIIEALNKMFHGKCYICETKNLQSPRVEHRVPHRGDDNIKYDWNNLFLSCERCNSIKSDDFESTIDCCSDDFIISDNIFIKLEYCPHWKIIASEKQQNPSEELLETIRLINMCCNQDNTPTRKLSKQTLENDINENYSLFMYHKMKIIRGNDHPDEINRSKKFIINMRNPSYPFSAVWDGMIQCDNILSNKLDEINENSDN

SEQ ID NO: 83934 - protein, 413 aa, Pseudomonas sp. KG01
MKKYIERIYGTIENKNIKIDINTKNKNLIITGPNGSGKTHFLTNLHQTIKNHILMSEQDTYEYKIKRIPVIEQLLKNIKVKTDNFYNLTSELRALKINLRYHDSKLNICTPDFRELRSKTEDLSAVNLLFSAHRQAGITTSDAARGLENEKTIYRSEMKHNRVGGSLEKHLVNLKTRSAYAIAHERDSSVAQLIERWFSDLEQNLKFLMEDETTTLNYNPDTLKFTIRRKNKLDTDLQSLSSGYASILDIYSELLMRAAYLEIPPNTLSGTVLIDELEVHLHVSLQRLILPFLENSFPNIQFIITTHSPFILTSISNSVVYDMGTNVTTDKDLSLYSYSAVMEGLLGTRTTSKILDEIISEIAAITQSKNGNTEKLRQYIKKVSASENSLDNRSKAFYLMGVNSILDEDQKDV

SEQ ID NO: 83935 - protein, 222 aa, Pseudomonas sp. KG01
MFKVSRPTTPPSCTKSSGYNTAEIVKTLSQIFQGKCYLCEQINLSDPEIEHLVPHEGDDEKKFDWNNLYYSCSRCNSIKGSKHKNILDCCDSNTEIFKSLQFSMPGHPDHNIRVNVVESYKNEATHNTAALLERCYNEAATGLRGITRSNLIDKIFDHFCDLLILRQIIVNIKSTSSEIQFAKDRLAVMLESSFPFSAIWKWHLLQDEKLLDKTRDLIQPHL

SEQ ID NO: 83936 - protein, 542 aa, Vibrio nigripulchritudo AM115; identical to SEQ ID NO: 83230

SEQ ID NO: 83937 - protein, 262 aa, Vibrio nigripulchritudo AM115; identical to SEQ ID NO: 83231

SEQ ID NO: 83938 - protein, 542 aa, Vibrio nigripulchritudo FTn2; identical to SEQ ID NO: 83230

SEQ ID NO: 83939 - protein, 262 aa, Vibrio nigripulchritudo FTn2; identical to SEQ ID NO: 83231

SEQ ID NO: 83940 - protein, 542 aa, Vibrio nigripulchritudo Pon4; identical to SEQ ID NO: 83230

SEQ ID NO: 83941 - protein, 262 aa, Vibrio nigripulchritudo Pon4; identical to SEQ ID NO: 83231

SEQ ID NO: 83942 - protein, 412 aa, Yersinia enterocolitica (type O:3) str. YE12/03; identical to SEQ ID NO: 81440

SEQ ID NO: 83943 - protein, 218 aa, Yersinia enterocolitica (type O:3) str. YE12/03; identical to SEQ ID NO: 81441

SEQ ID NO: 83944 - protein, 410 aa, Salmonella enterica subsp. enterica serovar Newport str. 36807; identical to SEQ ID NO: 81604

SEQ ID NO: 83945 - protein, 224 aa, Salmonella enterica subsp. enterica serovar Newport str. 36807; identical to SEQ ID NO: 81605

SEQ ID NO: 83946 - protein, 410 aa, Salmonella enterica subsp. enterica serovar Newport str. 36805; identical to SEQ ID NO: 81604

SEQ ID NO: 83947 - protein, 224 aa, Salmonella enterica subsp. enterica serovar Newport str. 36805; identical to SEQ ID NO: 81605

SEQ ID NO: 83948 - protein, 410 aa, Salmonella enterica subsp. enterica serovar Newport str. 36802; identical to SEQ ID NO: 81604

SEQ ID NO: 83949 - protein, 224 aa, Salmonella enterica subsp. enterica serovar Newport str. 36802; identical to SEQ ID NO: 81605

SEQ ID NO: 83950 - protein, 410 aa, Salmonella enterica subsp. enterica serovar Newport str. 36799; identical to SEQ ID NO: 81604

SEQ ID NO: 83951 - protein, 224 aa, Salmonella enterica subsp. enterica serovar Newport str. 36799; identical to SEQ ID NO: 81605

SEQ ID NO: 83952 - protein, 410 aa, Salmonella enterica; identical to SEQ ID NO: 81604
  subsp. enterica serovar Newport str. DC_10-449

SEQ ID NO: 83953 - protein, 224 aa, Salmonella enterica; identical to SEQ ID NO: 81605
  subsp. enterica serovar Newport str. DC_10-449

SEQ ID NO: 83954 - protein, 410 aa, Salmonella enterica; identical to SEQ ID NO: 81604
  subsp. enterica serovar Newport str. DC_10-446

SEQ ID NO: 83955 - protein, 224 aa, Salmonella enterica; identical to SEQ ID NO: 81605
  subsp. enterica serovar Newport str. DC_10-446

SEQ ID NO: 83956 - protein, 410 aa, Salmonella enterica subsp. enterica serovar Newport str. 36803; identical to SEQ ID NO: 81604

SEQ ID NO: 83957 - protein, 224 aa, Salmonella enterica subsp. enterica serovar Newport str. 36803; identical to SEQ ID NO: 81605

SEQ ID NO: 83958 - protein, 553 aa, Serratia marcescens subsp. marcescens
MNDNKGLNAVSRNASKGDVQSLYQLYINEYNDNKENKTYTYPILNEISSKANDGEFILKEVVFNNFRGLSNLTLRLDDQITVIIGNNGVGKSSILDGISITLSWLKSNILREDRPGRDIKELDINNNANLSSITSRISFANSAFPFMIANSKQGSKEKITNDLLHVKTLAGIYRHSNEFNQQINLPLLSYYSIHRADEASTGFDGKNKKNKKRVSTNWTKLGAYEETGFNRQDFDGFIEWLKFIYVSSRENSIDNKVSMINRLQSEINGALDVIRHLPEGFEHIVEPLKLEISIKEKRIVDIKSDLGLNNQEYAQRLINGVVDSFLKFLPNLDKINFKFVKDSLVVSFIKNGIELSPSQLSQGEKSLLTLIGDIAKRLVLLNPSLDNPLCGKGIVLIDEIDLHLHPGWQQIIIENLIETFPNIQFVISTHSPQVLSTVPKKCIRILKEECNEFSGMKELVAVSPKFQTKGVMSADVLSIIMGIDPTPSVDEADWLYEYKELIELGKYQTLRGLELKTMLLNHFGEDHPLIMECNNIIALQEIKNKIAERKGKI

SEQ ID NO: 83959 - protein, 227 aa, Serratia marcescens subsp. marcescens
MHKLTRCDAPLVLNEFDHNIHNWDDHFKSRHKALVWEKIFEMQGHYCAYCECKLDSSDPEKTHLEHFRQKGKAEYRHLTFEWTNIFGSCCNGERCGRHKDKSNISSENIVKMDEEDPEDYFIFLSTGAVGIRDGLSPVEAERAENTLRAFNLNPRRGGVKNERERVIKTHDYMIKEMIGLMNELKDDGGLEFLIEIRDSYIERVTTEKGPFVTAIKHVLISNWERAV

SEQ ID NO: 83960 - protein, 465 aa, Salmonella enterica subsp. enterica serovar Ouakam
MRIDKLSLLNFRCFRQLDITFDEHITILVAPNGAGKTTVLDAIRLALFPFIRGFDASLYVKDKSLAIRTEDVRLVFRPEALNMEMSSPAMITATGEWESGKTATWMLDKRGEQPPHEDKTAAQLTRWGEQLQTLVREEHNLQQVELPLMLYLGTARLWYQERYEAQPTEQRLDNSAFSRLSGYDDCLSATSNYKQFEQWYSWLWLSYREHQITQLESPSAKLKEGVRVQRMKEAIQAIQQAINCLTQEVTGWHDLEYSSSHNQQLVMNHPQHGKIPLSQLSDGLRNAVAMVADIAFRCVKLNPHLRDEAALKTQGIVLIDEVDMFLHPAWQQQIIQSLRSAFPLIQFIVTTHSPQVISTVKRESIRLLEQDENGNGKALMPLGATYGEPSNDVLQSVMGVDPQPPVKEKADLQKLTAWVDQGKYDEPEAQQLMAALQAALGDQHPQLQRLQRSIARQNMLKGKAQ

SEQ ID NO: 83961 - protein, 198 aa, Salmonella enterica subsp. enterica serovar Ouakam
MTLLLNEQYHLCCYSEIRADLRGLGYHIEHVENKSQQPGRTFDYQNLAASALDSENGLHLFGINAFGGHARGKQEAVDMAKFIHCHLPDCSRYFAYLSDGRIVPADELNAQEMERAEYTIDLLNLNSGFLQTERRNHWEELEQLFEEHIEKGWDLQQLLQLELVPSLDHKLHEFFSITRQFFQQEAEQVLQNHAPALI

SEQ ID NO: 83962 - protein, 465 aa, Escherichia coli; identical to SEQ ID NO: 81096

SEQ ID NO: 83963 - protein, 201 aa, Escherichia coli; identical to SEQ ID NO: 81537

SEQ ID NO: 83964 - protein, 427 aa, Acinetobacter baumannii; identical to SEQ ID NO: 81756

SEQ ID NO: 83965 - protein, 222 aa, Acinetobacter baumannii; identical to SEQ ID NO: 81757

SEQ ID NO: 83966 - protein, 445 aa, bacteria symbiont BFo1 of Frankliniella occidentalis
MGQPYRLESITLKDIGIFEHTHFDFPPIISEQKDAEKAEIHIFTGPNGCGKSTILYALAAIFELAPDDALICKRFRSSHSVVEFKFYDEAGYYARRKNDEDPFSGLKFGGINEFISTKEAQSLFNHRTAGFDKNDSVSRSTFPFAAFAYSGNRSPQGVFSVQAIQNIKNSPFEDALSFERTVRPGVLAQWIANNRTKAALARDDGDNAEALQYDAALKAISDFIYEICQLKLNFRLKRSPLDVVIEVDGLAVTFDVLPEGLKSIISWVADLALRLEDIPFTERREIFSQPIILFLDEVDIHLHPKWQRRILPAVQKLLPNAQVFVSTHSPFVVGSVEDAWVYRLPDAQRKVLRDPSIAETIIPVASAAGKSYQLILEEVFNVSEQFDVETEALLDDFYCQRDAYLKNPANDRALMMLADSIRERSDELELIIEMELRQIARRVKG

SEQ ID NO: 83967 - protein, 193 aa, bacteria symbiont BFo1 of Frankliniella occidentalis
MNKLIRGAQPLCLAAGCQEWTDRYLTAHFSDPAASFSWYSRNCYQHIRMALLEMTQDHCAFCDGFLGTEARETVEHFRPKSRYPQQAFQWINLFPCCDKCQSAKQEKYDELLLKPDDADYQFARYFICNYASGELHPAPDISVFDRQRAEKTIELYGLNLTLRKQARARELIKFRGSREELQLDDFPYRYFLS

SEQ ID NO: 83968 - protein, 507 aa, Klebsiella oxytoca 10-5248
MFRINSIMNDSRDKVRVHDFSEDSHNNYYTILTGDNASGKSSLLSKAINFFLFSNVNNNDRNPAVELECLSERNPSKIIAICNSKFDRFTSNKILNDKLNNKEATQITMSYIHPEVNDNTRRGISGIVDQCIKNSLRHKNIRGLQDANRVKEAFMMFGLQSDLHLKCTLNTQNIKYVLSILSSLVNGGVILSDEGITHTKKIDYSKNEELKNKNFKLDKSIEIILRESECKNHLDGLYDTLLMLDAGKFTQGNFSSIYFSVAEGTISTESKYLFDDLNEAEIINILFILDVINVSDIQVMHLNSKKEVNIVSLSSGQRTLFGNAIVLSGYVEKNCMICIDEPENSLHPEWQLNFMRFISLLCPDTLEAHILIATHSPQIISGMQFDNGCVLSLENRDNFDSIIRKENKYEEDGFYELQPLKAYREQSAGKQLTGVFKSPGYKNDFIIKKLLLILSKISKKIALTKDDNEFMDEISILIDKKRIPEGDPVQLIFKQILSFEYARNSDD

SEQ ID NO: 83969 - protein, 224 aa, Klebsiella oxytoca 10-5248
MINRPIVYSATAQEFVDTFNGDASHWDGTCAVRKAFRKEVRDYHRDEQEFTCPYCGRLREEFHGGQWDIDHIIPKSSYPQYLYTPRNLAVTCKDCNTHKSKKNPLLITLDSGAPYPENTVSYKIIHPHFDSYNEHITLRKDKKGRSYHEVITDKGRETFLMCNLIRFSEVICGTSEFIPELGTEIGITNSFSESVQVWLADYDDLNPVDAEIALQALMQKISLR

SEQ ID NO: 83970 - protein, 416 aa, Parabacteroides sp. D26
MIIESIKIENFRGIEYLEIPTLDEHINLFVGVNGAGKTSVLDSFSLVMSWLLARIRNPKSSGTLISESDIKNNSKGGCSISIKVRNSGEWILYRSKSYAKSKVDNGKTELRDMMEYINEIHHCVTQGGNIPVIMYYPVNRAINNAPAHLKRGGKEPEIWDTYENALKGNTEFRSFFEWYRKQEDNENEHIRDNRSYQDKKLSAIREAIKRFFPDFSDLRVRRNPQRYVIQKDSEIIEFNQLSQGEKCYLALVCDLARRFAMANPNSDYPLQGEGIVFIDEVDLHLHPKWQMEIIDKLRTIFPNCQFFLSSHSPHVLSDLTPRQIFLLDNGNLNHTSFNPYGKLVNEVLANYFSISMARNLKVKEQINKAYKALKENDSTTFQEIFEELAKQLGKLDPDMVNLKLESVRKENDEKNK

SEQ ID NO: 83971 - protein, 208 aa, Parabacteroides sp. D26
MKKINKSGEPSSLTKFKRKNSSNKWEDIHTEQNRSIYEDCLFQCMDDQNYLCGYTEIKLDDNYHIDHFIKRDIDPRQTFDWQNMIASVHDSKFGADFKDKAVNNNDYNKRLKKYNCILNPVTENMENRFIFSTNGVIEPADRNDREATETIRVFNLQEDSLNSRRKQAMENTRKLLEQMDKEAVIGYLQGEEFPSAIAYEISKSQQFH

SEQ ID NO: 83972 - protein, 552 aa, Photorhabdus luminescens subsp. luminescens
MTRQLERKAKGGNLLSAFELYQRSLQVERELDEKQADEWLELCWDYLQGGYIDSSETFRPTNPLFLRQLDLSDFRRFSHLKVNLEKDLTVIIGNNGKGKTSILSAIAKSLSWFSANILKEDGSGQRLSEFTDIRNDSVNKYADITTNFFFGKGLKSLALRLSRSALGVSERRDSRIKPAKDLADVWRVVNEARTINLPTFALYTVERSHPFTKFQKDSNERREDRFDAYNHSLTGAGRFDHFIEWYVYLHKRTAGDVSSSIETLRQQVCDLQKSVDNGMVSVAPLLEDMKSKLESATAKYNLALSKRLLAESLQKKIVEQAITLVVPSISHIWVETESGIDVVKVTNDGQDVTIEQLSDGQRVFLGLIADLARRMVMLNPLLKNPLEGSGIVLIDEIELHLHPKWQQDVITDLQKVFPNIQFIITTHSPIVLSTIERRCIREFADIDESGMQFLQLPQMQTKGSENVHILEQVMGVFSTPPRIKESHWVGNFEQSLIADGEEISVQTRTLYDNIKKHFGNDSPELKKADSLIRVHQMKNKINKLKSEKDKQG

SEQ ID NO: 83973 - protein, 216 aa, Photorhabdus luminescens subsp. luminescens
MKALTRPPKPHVLNQFKAGQNTWMEIDQTEIWPHLEEMQGAFCAYCECRLNRKHIEHFRPRGKFSALTFDWENLFGSCGDSSKSGGWERCGIYKDHGAGAYDVNQLIKPDVENPDDFLLFLTTGRVIPASGLQGQALKKAEETIRVFNLNGDAKLFGRRRTALQNVIKEVEYFYLTFEELEEEEWTLLLHEQLEELKTEEFSTALRHAWLYNKQFI

SEQ ID NO: 83974 - protein, 407 aa, Yersinia enterocolitica; identical to SEQ ID NO: 81698

SEQ ID NO: 83975 - protein, 217 aa, Yersinia enterocolitica; identical to SEQ ID NO: 81699

SEQ ID NO: 83976 - protein, 412 aa, Yersinia enterocolitica; identical to SEQ ID NO: 81440

SEQ ID NO: 83977 - protein, 218 aa, Yersinia enterocolitica
MFPVNKSQEAPASLAARRSYSEKDVIEALSRDFHNKCYICEVKDPLVLNVEHFRPHGDNLDKMYDWRNLFFACGRCNNIKRAKFDDMLDCTNQGINILISVKHVFPTLAYSNHVDIIPMNDSEETKQTAELIYSVFNDDHTGNKDLTRIFLLKRLMKIYRKLLELTLDYDDEDTLEEEKEHIAKKIKNMLKVEYEFSAFIRWSIIDATKLHHLKEGIF

SEQ ID NO: 83978 - protein, 412 aa, Yersinia enterocolitica; identical to SEQ ID NO: 81440

SEQ ID NO: 83979 - protein, 218 aa, Yersinia enterocolitica; identical to SEQ ID NO: 83977

SEQ ID NO: 83980 - protein, 408 aa, Yersinia frederiksenii
MLCSISKINILIPYSRKKADIQLDGMSLIITGGNGCGKTSFITAIYNYLKKGIDDPQNNNRQYLTQQIDYLESQLKSIGRDGGNYNFFSSQSENHKKRLKELNDFNIEIKSIDNKDIRSLLRFHSATRQSAISSPNQAPKHSVLIEENKHFANDIDGSQFFESYLLSLKKNQSYAIAFDKNETEANRIEEWFDKIQTDLRSLFEDSNLILEFDTKDEKFYLHQEGKDRYTFQTLSAGYSSILSIYTDLIMRVEMWGVSPDNIQGIIFIDEIDAHLHVSLQKQILRFFIKSFPKIQFIVTTHSPFVVTSVSNTIIYDLTKNEQIIDVSSYSYGVVMEEIFGVIPESHVLMDKITHIENLTNNITPENIDELEAMISSLASDQENMSNDTQAFLDAARLKLIKTKKTIEK

SEQ ID NO: 83981 - protein, 217 aa, Yersinia frederiksenii
MFNVIRSMPAPESLQSKKKYDNEDVHIALQDCFHEKCYLCETKKPLDINIEHFQPHKGDENKKFSWENLYLVCSRCNNIKLAKYDNLLDCCSISVWDKIKLIPGFSPKARKFIITPLSTDDKTLETAKLLDDIYNNDNTINKRLTARSLRSQVVQTTHKLTQHMIEYYNEDSTDEEKKVAISKMKIMIKKSYPYSAFCRWMIKDDEELDKLLSNLMN

SEQ ID NO: 83982 - protein, 412 aa, Yersinia enterocolitica; identical to SEQ ID NO: 81440

SEQ ID NO: 83983 - protein, 218 aa, Yersinia enterocolitica; identical to SEQ ID NO: 83977

SEQ ID NO: 83984 - protein, 412 aa, Yersinia enterocolitica; identical to SEQ ID NO: 81440

SEQ ID NO: 83985 - protein, 218 aa, Yersinia enterocolitica; identical to SEQ ID NO: 83977

SEQ ID NO: 83986 - protein, 457 aa, Yersinia frederiksenii
MRIERLKLYEHKMFIDTEVIVSNSEQKGNFKTVVIGPNGAGKSSFLSCICDIFLCELSANAAKKKKIISTMGFKYELKLTNGRIVSESSDNDYFKKNKILAVTNSYKDKFYFPTKNGIRNSPNYIYLGLRSASNNIFFSNVNDDMLKYLITILFDEKKKDSAVKVLSELNFKRSVGIVIKKGKNYNKFFEKDNVRSSLSDGSLNRFLSSEYYISNESDIFSILADFNKSKYADLHFNLGYDDDNSDINTLDIVLKLVDARILSVERLSLFSHDGYDINEASSGEFNILRVMLSIIANIDDNSLILIDEPEISLHPNWQIEFCRLLDLAIENFTGCHTIIATHSHFILSNLSQLSSTIISMQLSTLNRKVYLQNTYPESFGMSPENTLYTFFGITGYNNKYFEQDLRILFDYMTNNNVENYSLFEKAFYRLNRFDFDESNPIRNTLKAAEKIVKKEDL

SEQ ID NO: 83987 - protein, 222 aa, Yersinia frederiksenii
MRGDFKEIESFNFKIYLSRKERKLINALIRSDLEHSQIWDGSIRSLGLIRKERDDLKIKIKQHLLKLQDGFCPYCGFKFSYRVGEAGDRNIQREHIAPKSEYKIYTFTTRNLVLACSICNGSDYKSNSDTINQLGDTYRNCDFKLIHPYLDKRSEHLKLNHNTGAYDLIDGKPKGKFTVDLFGLNERFHRENRLIHLNYEKYNVNSFEDLICLLSSQNHSVK

SEQ ID NO: 83988 - protein, 565 aa, Yersinia aldovae
MSDNNKISSTLRLLARNADKGDLRAIYQLFLNFLHGNYSEPNKKSSDRYLTQLIEKIDGKTLILDEMVLNDFRGINNLKIQFDTRLTVLVGNNGYGKSTVLDALAMTLSWLKSNILREDRPGLSIKESDINNNKIVQYASITSKFSLNKTPFTIMLSKAKEGSPEKRNNELVEIKSLASIYRHVSELSSSINLPLLAYYSVSRSTEGGGIDSKKINQTNKNEWSKFDAYEDVFTDRHDFGEFFKWFIFINNIAQQNSKSEIKNKINKLVAEINGAELVLKQIQSVQDIQLEYLKPIQEEINFKTLQIKNLNIEYYKNDDKTASKLIESIILSFEKFLPELKNIRIQYDKNSVKLLVEKNGLQIDAQQLSQGEKSLLTLVGDLTRRLVILNSSRENPLEGYGIVLIDEIDLHLHPLWQQTIVGNLLSTFPNIQLIISTHSPQVLSTVAAKSIKILSAKYNKITDQDEMSIHPPEFQTKGVKSTDVLSEVMNTDPLPPIIEADWIEEYIELIETGNSDSNKATLLKDKIVSHYGTEHPIVKKCENIILLQEMKIELAKRRLSNKGDV

SEQ ID NO: 83989 - protein, 227 aa, Yersinia aldovae
MHKLNRSPDAPAILDMFDHTIHTWDDFSTENKKAVWVKLYEMQGNRCAYCEKTINPEDKDDKHIEHFRRKGVEQYQHLTFEWTNLFGSCCVRDRCGIFKDKQKYEEHNLIKMDDEDPEKFFTFLSTGKISINDNLSAADREKAQVTLRVFNLNPDRNGIKTERLRMIASHEYLVREMIKLINELTSERDMDLLNYALDEYLEKISGQPFETAIKHILIANFKSSIYK

SEQ ID NO: 83990 - protein, 551 aa, Yersinia pseudotuberculosis
MKVDKLHVRSRFKNLENVKVDFDEDHLMTVVVGRNGSGKSNVLEALVAIFRNLDLGEAPPFSYELIYRLGERHKPDQTSERWLEITIDADPSRGSLAKQYDVRVHDLLNDATKELFFDQTSGMPIPFSKVKRDKEGKAPYLPNYVFAYYSGPSDRLESYFKKHRTDFYRHLLNDKPDKKLDLKGDIRPLFYAKPYHSQFVLLAFFLSDENSPQRKFIKEHLGIEGLDSIHFVMRQPGWAKQKGELFWGARGVVRRFLDELIKYTLAPIKVTRQEDTSLTGSNVRNEFFHLFLPNVEVLHAFAEGLSDDELFKMLESTLLSEIISEVSIRVKVSSSEEPLTFRELSEGEQQLLTVLGLLKFTGGKDSLFLLDEPDTHLNPSWSIKYLKFLREFVPNHETSHLLMVTHHPLAIAELKRQQIQVMWRDDEHNIHSQEPYIDPRGAGFMSTLTEIFGLNTTLDLETQKLLDDRNELAGIENRTEDQNNQLDLLNDELNRLGFSLENRDPLYSEFLLAWQDLRYSDRPLLTPDKAAQRRAAMKKVIEALQAKKDRE

SEQ ID NO: 83991 - protein, 280 aa, Yersinia pseudotuberculosis
MIFIKRDATLIPAKVFAVAQRAQDALELLPAEQRKDFIKKKSHIWRGFSKYLAKMSYGKCWYSEAKDAGANFDVDHFRPKAEAKRTENLVDAEGYAWLAFDWENFRLSAQNCNRLNTDESGNTVGKGSWFPLLSGSPKANWDNRCINDEKITLLDPVVQADLTYIDYDDNGRFTWSKHCVGLAALRIRESGVIYGLNLEKMREARFQVMREAKELLVTIQQIAEDLDPLGDEAPMRAIERQIEQIKNKTRADAPFCRAVRTQLIKLGAEDYLIDRSLDVA

SEQ ID NO: 83992 - protein, 411 aa, Yersinia pseudotuberculosis
MLCSISKIEIPIPYSRKRVDIRLDGRSLIITGGNGCGKTSFITAIYNHLKNGIDDPKNNNQVELTQQINWYQTQLDNIGRDGGNYDSFTNSLKKLQARKNELNKFKIEVNSIDNKEIRSLLRFHSATRQSAILSPSQAPKHSVLVEENKHFANDKDGSQFFESYLLSLKKNQSYAIAFDKNETEANRIKKWFDKIQTDLRLLFEDSNLILEFDTKDEKFYLHQDEKDRYTFQTLSAGYSSILSIYTDLIMRVEMWGVSPDNIQGVIFIDEIDAHLHVSLQKQILRFFIKSFPKIQFIVTTHSPFVVTSVSSTIIYDLTTNEQIIDVSSYSYGVVMEEIFGVIPESHVLMDKITHIESLTNNITPENIDELEAMISSLASDQENMSNDTQAFLDAARLKLIKTKKTKKTIEK

SEQ ID NO: 83993 - protein, 217 aa, Yersinia pseudotuberculosis; identical to SEQ ID NO: 83981

SEQ ID NO: 83994 - protein, 251 aa, Yersinia enterocolitica; identical to SEQ ID NO: 82080

SEQ ID NO: 83995 - protein, 218 aa, Yersinia enterocolitica; identical to SEQ ID NO: 81441

SEQ ID NO: 83996 - protein, 412 aa, Yersinia enterocolitica; identical to SEQ ID NO: 81440

SEQ ID NO: 83997 - protein, 218 aa, Yersinia enterocolitica; identical to SEQ ID NO: 83977

SEQ ID NO: 83998 - protein, 472 aa, Yersinia intermedia
MKLKSLGLTAFRGFDRLDINFDERLTVVAGVNGVGKSTILQAIAMAYSHSLPEFTVSREKALPVLDADIQQGKSTCIIEMESSGLGAAQLITFLSKESLDKDEKLALGHKQAQMKKNLARLERGAPDYKNLKNEITWVDKRLEGNFEKRLRWLFTDTNETEARLKRHLKSSPTQALVVYYSTHRLLSRLPPKLQGTLPFKQGAAFSKSLTQLEISLNEFAKWQRAIFSTRVLRKETVQYGERILKLLQEAISSLMPQVKEFWFHEGNPPRYSVMKDATMAEQVNDKKAGKQLFLEQLSDGERGLIALVFDLTRRLAIANPNLKNPIAEGEALVLIDEIELHLHPKWQREVLQRLSDTFKACQFVVTTHSPLVLGEVPARCVRFLEIVDGKVSVAVPTEAYGMDANRILQELMGAPVRNREVEGTLNALFELIDQERFDDARAAIRALEQKLGEDEPELIRASSLIRFLEGDE

SEQ ID NO: 83999 - protein, 196 aa, Yersinia intermedia
MTLHRQKLHADYDNYADKATLRQVLVAEQRGLCCYCQSRIRATPEGMKIEHWQCQANHPERQLDFGNLHGACLGGHGRPELEQYCDTRKGNNRLCFSVCDPAHPIERQIKFLGNGRIESDDVAINNALNGVLNLNYSRLVDNRKAVLEAFKQRLGKGALNAEQELRKWDGTQAGDLPEFAQVMVFWLQKKISRGAA

SEQ ID NO: 84000 - protein, 456 aa, Yersinia massiliensis
MREPYRLEGIVLQDVGVFEHTRFDFPPIECAERDEEKAEIHLFTGGNGCGKSTLLYALAAIFQPSDAGTLIRRRFKSQRSAIDFCFAGLAGTYRASPSENAANNVFGETQLTYGDPLNYNIKNSSSSLLISNIGDHYNLSVPYNSKAFDFAAFAYSGQRSPQSNFTLSAIQQITNSPFENALSFDQTIRPGVLTQWIANNRTQAALALAEGMVDEAKRYDLALSRISQFIKVICELDIVFRLQRSPLAVALNIDGQDVNFEVLPDGLKSIICWVADLALRLEAIPWQQQRDIFAQPIILFLDEVDIHLHPKWQRRILPAIQKLLPNAQVFVSTHSPFVVGSVEDAWVYRLPNPQRSICLDNSVAETISPTHSAAGKSYQLILEEVFGIEEQFDIETESLLSEFYQARDTYLQNPQGDTDVMELADKLRVKSEELDTIIEMELRQIARRIQKRPAGV

SEQ ID NO: 84001 - protein, 194 aa, Yersinia massiliensis
MYKITRISPPKSLNANYKAWNRRYQADKASTPVKAFRWYNIACYQETRDLLISMTQNHCAFCDGPLGAESRETIEHFKPKSVFPELAFTWENLFPCCDRCQGQKLEKYDDALLKPDDIAYEFERFFIANYATGEITPSPQASAAEQYQAKVTIEHYGLNLPQRKIARRKELRCYLAMKHEMLLDEFSYRYFLME

SEQ ID NO: 84002 - protein, 412 aa, Yersinia enterocolitica; identical to SEQ ID NO: 81440

SEQ ID NO: 84003 - protein, 218 aa, Yersinia enterocolitica; identical to SEQ ID NO: 83977

SEQ ID NO: 84004 - protein, 501 aa, Yersinia pekkanenii
MSYNIKHIYLDHKSIRVLPHDWENNENVYTILIGKNGTGKSRLLSGLANSLCSIRANNKLLKRDIGIVSRHLVENNKLTISLFSNYKNHTINISGRSIDLSGFDINRDGEFFCPKALIAVSTSPFDKFPEEHDYFSPFKGNKNDGFYSYYGLNGFGKNKAIHSLMEKVLFSSATGALDKDRVAVSKVLNFLGYNPRLRVIFRLRHSINTYMDNLSSFSPNEFMEYVAASAKLNLSYLKEKYNISYTKIRDAFVKLGDHAYKNDSVREFDFTIDYEKSIVSDYHSDFFDKIRVLSTIGIFSIKDIILYPIIIDENEYYGDDVYDYGISVSDASSGQQCILLNTLGIASSIKNNSLILIDEPEISLHPEWQEAYISLLMEVFESYSGCHFIIATHSPQIISNLRSKNCFITQIDNGDVISSESYTNKSADFQLATLFAAPGSDNEYLKRIVVNLLTVLSSGKYIKDKYIEELVLLKKSKDLLDESDPVKYLIDLAIEVEGRLQ

SEQ ID NO: 84005 - protein, 215 aa, Yersinia pekkanenii
MINQPFLYTDEYSKKIIEKISADDFCGKSWGDEDLADIWAAIKLYYILEQNYTCVYCQQITKSTNGRHWDIEHIISRESAAKFMFESRNLCVTCPDCNIKKGVSKVTNSKAIRKLPLNSNDYFIIHPHIDNYEEHIEVIRVGEFYFAKSEKGEKTISLCGLNRFYKFVGYDSAVSLDSRIMLLASMISDAKNQAERNDIMREITTLTLTALIKEK

SEQ ID NO: 84006 - protein, 408 aa, Yersinia aldovae
MLCSISKINIPIPYSRKNVDIQLDGMSLIITGGNGCGKTSFITAIYNYLKKGIDDPNNNNVQFLTNQINSHEHQLNNIGRDAGNYNYYSSELEKNKARLKEINDFKIDINSIDNKDTRSLLRFHSATRQSAISSPNQAPKHSVLVEENRHFANDKDGSQFFESYLLSLKKNQSYAIAFDKNEAEANRIKDWFDKIQTDLQSLFEDSNLILEFDTKDEKFYLHQEGKDKYTFQTLSAGYSSILSIYTDLIMRVEMWGVSPDNIQGIIFIDEIDAHLHVSLQKQILRFFIKSFPKIQFIVTTHSPFVVTSVSSTIIYDLTTNEQIIDVSSYSYGVVMEEIFGVIPESHVLMDKITHIESLTNNITPENIDELEAMISSLASDQENMSNDTQAFLDAARLKLIKTKKTIEK

SEQ ID NO: 84007 - protein, 217 aa, Yersinia aldovae
MFNVIRSMPAPESLQSKKKYDNEDVHNALQDCFHEKCYLCETKKPLDINIEHFQPHKGDENKKFSWENLYLVCSRCNNIKLAKYDNLLDCCSISVWDKIKLIPGFSPKARKFIITPLSTDDKTLETAKLLDDIYNNDNTINKRLTARSLRSQVVQTTHKLTQHMIEYYNEDSTDEEKKVAISKMKIMIKKSYPYSAFCRWMIKDDEELDKLLSNLMN

SEQ ID NO: 84008 - protein, 472 aa, Yersinia intermedia; identical to SEQ ID NO: 83998

SEQ ID NO: 84009 - protein, 196 aa, Yersinia intermedia
MTLHRQKLHADYDNYADKATLRQVLVAEQRGLCCYCQSRIRATPEGMKIEHWQCQVNHPERQLDFGNLHGACLGGHGRPELEQYCDTRKGNNRLCFSVCDPAHPIERQIKFLGNGRIESDDVAINNALNGVLNLNYSRLVDNRKAVLEAFKQRLGKGALNAEQELRKWDGTQAGDLPEFAQVMVFWLQKKISRGAA

SEQ ID NO: 84010 - protein, 412 aa, Yersinia enterocolitica; identical to SEQ ID NO: 81440

SEQ ID NO: 84011 - protein, 218 aa, Yersinia enterocolitica; identical to SEQ ID NO: 83977

SEQ ID NO: 84012 - protein, 582 aa, Yersinia pseudotuberculosis
MRLDKLTIGSLKDSPSHQFKNLKNVTIDFAQGRWVTVVIGWNGTGKSNVLEALAIIFRDLIAKKRTPEFAFQLSYCMGAGNDKQRIRIDADPDRKKDAFLIYVTNLKENESNNNILDAQDLDVDDTKLSEKPIKLTAFLNSDTQYLPHYVFSYYSGESSRMHEVFRPYLESYDSKLRNGVDPGLKRLFYAMPVHSQFVLLAFMIQQSDDVRELLEKDMGIDPDEGIESVLFVLKQPGWSKRRGNKTNNSDGDDRFWGSKGVVQTFLDRLQNIAMAPIKVKRDKQITLWNKESTEFQYLFIKDIHALRSLVDNQSPAQFFRDLESTYVSELIEEVRIRVRLKKNDGSVTFRELSEGEQQLLTVLGLLRFTAEEESLFLLDEPDTHLNPRWSVDYISYLKKFIIDGAQQTETSHILMTTHNPLAIAELEREQVQILCMSKQEDRRQIVACYPEIAPRGMGYAAIVTSDMFGIASTLDQPTQLLLEEQRAFAAKETLTLDEQHELDSINAKLDRLGFRFFHPDDEYSRYLRLRNSLLVDRFNTELPQELAKQVVEMPRAEREELAKHLIAELLSKHPNKDEGENS

SEQ ID NO: 84013 - protein, 268 aa, Yersinia pseudotuberculosis
MRYVSRLKLSMPTGWLQRAQRATQAVASGAAPNDYDHIWRELKDGLAELLHDKCWYCESPITRSDNAVDHFRPKNCVSDAINKHDGYKWLAFERFNFRYACTYCNSRRLGVNTAGGKADRFPLIDETSRVYSEGPIDQEYPMLLDPCELTDWKLLGCHQENGQPCATSIDPISKQRAEVSIEVYHLNYEPTCKHRHTVAVQLMADLDEAKRLFELSTHDQSRRSDFIRVAERLRRAIDRDAPFSGDMHFLMRGQRSAAHSWIQDLLEA

SEQ ID NO: 84014 - protein, 573 aa, Pseudomonas aeruginosa
MRLDRITIGSPKSSPTHQFKNLKNVSIDFDQQHWITVVIGWNGTGKSNVLEALATIFRDFIQGARKPAFAFNLEYRISSGSTALHVNIDADPDRPRDSLIIHVATDAEAKSDELFDASFEISSKTSALRGKRIPLKSFFDPKFGYLPRYVFAYYSGESDRLYQVFRPYLEDFDKKLRRGEDPGLKRLFYAMPVHSQFVLLAFLIQQSDDVRNFLAEHLGIDPDEGIESVLFVLREPPWTSKEGDPRFWRAKGVVASFLDRLYNIALAPVELSRRERVSLWSDKVLQFKYLYVKDIASLRKLVGEQRPAEFFRDMESTHVSQLIDEVRIRVRLQKNDGTVTFRELSEGEQQLLTVLGLLRFTAESESLFLLDEPDTHLNPRWAVDYFNYLRTFAGQSNDDRENSHILLTTHNPLAIAELVREQVQILQLSKDAESTRIVAVHPELDPRGLGYAAIVTSDMFGIASTLDQPTHLLLERQRAYAGKEHLTPEELAALSEINSKLERLGFRFFHPDEEYSRYLRLRSAALRAKFESDDPEQLANRSIAMESEEREELGQRLIRELLAEQRDKQEPDQ

SEQ ID NO: 84015 - protein, 270 aa, Pseudomonas aeruginosa; identical to SEQ ID NO: 81697

SEQ ID NO: 84016 - protein, 414 aa, Yersinia enterocolitica
MFLHEVEAEEYKGFSSIKISFDANFTILCGPNGVGKSTVLFAIASALVTHNKNIYLNENSQVRILFTGRDGVKSECGFGRGSYMMESSRQTTFKGGPSPYQYSDGRSNRIYLNDVGERFSPLFIGPNRNIFYKKISGMTSETSAVEYRKKYLREALDYLASSYSPEIKQWMINRYFIIDKDWAEIEKRNWNFIISNLDYIFGEGGRFSFYKIDRELEPSFKLDGNVVYLEDLSSGFKSILSIVFSIVEWIEKTNDGDYMLIDKATGVVLIDELDAHLHPSWQTKIKSILQTIFPKLQFIITTHSPHIISSAEANEVIILKRHDGKIVPFVVTKSLAAWKTDDIYSSIMGVDTVHQKTLNKVVSEIEELIDENKLDDAVVLIEEYSKKIPDSDPTALTLRKRINSLILSKEKEND

SEQ ID NO: 84017 - protein, 243 aa, Yersinia enterocolitica
MIKLNRGVEPNILINKKDEWTKKLIDKINYFGGYEFIPDDVKKSVVSHYSHDEIKSVLIDTTFKKCAFCECLPEDGGGYIQVEHFHPKSIYPNECFSWENFLPSCGICNNNKGTLDTKVTPIINPYDDDPKKSFYCNFLKVLPLKNDQKAINTEREIMLNSNRLINSRTELLRKLQILTEELRDSIVYLKEADTDRKISNRKSKLDQKIQEIEFYMHPKSIHSFFCSQVIENDCHYIEAKTLL

SEQ ID NO: 84018 - protein, 251 aa, Yersinia enterocolitica; identical to SEQ ID NO: 82080

SEQ ID NO: 84019 - protein, 218 aa, Yersinia enterocolitica; identical to SEQ ID NO: 81441

SEQ ID NO: 84020 - protein, 251 aa, Yersinia enterocolitica; identical to SEQ ID NO: 82080

SEQ ID NO: 84021 - protein, 218 aa, Yersinia enterocolitica; identical to SEQ ID NO: 81441

SEQ ID NO: 84022 - protein, 251 aa, Yersinia enterocolitica; identical to SEQ ID NO: 82080

SEQ ID NO: 84023 - protein, 218 aa, Yersinia enterocolitica; identical to SEQ ID NO: 81441

SEQ ID NO: 84024 - protein, 408 aa, Yersinia enterocolitica
MLCSISKINIPIPYSRKNVDIQLDGMSLIITGGNGCGKTSFITAIYNHLKKGIDDPNNNNVQFLTNQINSHEHQLNNIGRDAGNYNYYSSELEKNKARLKEINDFKIDINSIDNKDTRSLLRFHSATRQSAISSPNQAPKHSVLVEENRHFANDKDGSQFFESYLLSLKKNQSYAIAFDKNEAEANRIKDWFDKIQTDLQSLFEDSNLILEFDTKDEKFYLHQEGKDKYTFQTLSAGYSSILSIYTDLIMRVEMWGVSPDNIQGIIFIDEIDAHLHVSLQKQILRFFIKSFPKIQFIVTTHSPFVVTSVSSTIIYDLTTNEQIIDVSSYSYGVVMEEIFGVIPESHVLMDKITHIESLTNNITPENIDELEAMISSLASDQENMSNDTQAFLDAARLKLIKTKKTIEK

SEQ ID NO: 84025 - protein, 217 aa, Yersinia enterocolitica; identical to SEQ ID NO: 83981

SEQ ID NO: 84026 - protein, 411 aa, Bacteroides sp. 3_1_13
MGNFITSIKVNHIFHLENFCIPISENEKKHLIITGKNGSGKTILLNAIVEHLSQVCNDKMLSFLDLKKNLESNQAWLQQAETTGDSKSIASGQNNVEYYKNRIEEFYGKVELSFHDIYSISKDFFSQNFIIAYYADERKSLFVEPKNPVKPDLKMKTDLKHNKVDQFLNFMVDCKVQEALARNEGKTEDADYIRQWFVGFRNILRQIFDDTTLELDFNYKDYSFLIQTRGKSFKFTELSAGYSAALDIVADLILKMQSQNNVVRAYEKEGIVLIDEIETHLHLELQRVILPILTTIFPNIQFVVTTHSPFILNSLENAVAFDLEHREPIEDLTDYSYEALAEGYFGVRTDSSEIQMRLQRMEELIRSDQLSISDKSELEMYLQDFDKIPEAVAPAIKAKYYDLKREWQNKN

SEQ ID NO: 84027 - protein, 213 aa, Bacteroides sp. 3_1_13
MIRICKNADKPQTLDKSYNTDEVCKQLLMDQNDKCYLCERRLTTDYQVEHFKSQANNGDLKQTWENLFVACGYCNNKKSNKYDDILDPTQYDIETIIEHSNDFVNQKAIFDSDNRTSEVLLTIKLLNLLFNGKLSYRNCREQRFYDEFIQKMNFFSYVVDEYMSGKKEYYYPVIKEQLDIRSEYLGFKYAIIHSNDLLKHDFGDMTIWNKKGE

SEQ ID NO: 84028 - protein, 393 aa, Salmonella enterica subsp. enterica serovar Typhimurium; identical to SEQ ID NO: 82636

SEQ ID NO: 84029 - protein, 248 aa, Salmonella enterica subsp. enterica serovar Typhimurium; identical to SEQ ID NO: 82637

SEQ ID NO: 84030 - protein, 465 aa, Salmonella enterica subsp. enterica serovar Infantis; identical to SEQ ID NO: 81884

SEQ ID NO: 84031 - protein, 198 aa, Salmonella enterica subsp. enterica serovar Infantis; identical to SEQ ID NO: 81885

SEQ ID NO: 84032 - protein, 308 aa, Pantoea ananatis
MHDKYPPEIYKKNLSDERVIYLGNKVNNNMVSDTAPFRVLCKHILNKIITFSEAHSKSNVLIHNALQRLNFDESITFKFRYGKNRKKEVLTSVSPELKVNLITPTNDLTLVRNYLHHIECGDILLSDVSFSRNDFSFGLAELSSGEKQYAISLLGAIYCGCSNSMIYYDEPENSLHPSWQLSIINDLANITKELFTKSILIIATHSPLIASSVRNDRAYICDFPSGQSWQRSYLHGQASDAVLREQFHLYSARSPEIYIIINKCLDAIARNKTNTTGFEKIKNELRDYNLELQNDDPLYEVVTTILGF

SEQ ID NO: 84033 - protein, 224 aa, Pantoea ananatis
MAYIKPVARIALNKKEFRTVISSHLAGNIKWSDDALKPLKNMIRTLLREEQKGMCPYCQRMIIPERRNLGEHIEHFLDKSKDKYKKFALTASNLVLACQGCNVEKGIRDLNKGRPTPLYLNAAAGPFLWPHPYFDDMGACIQKLAGPVYAIINGSGREIQATKLIIDLKLNEIRNLEVRYNRLSSRRNRLIKILTKLAVKGNLRSRERMIPISIELGKVNDELN

SEQ ID NO: 84034 - protein, 410 aa, Pseudomonas sp. RIT-PI-a
MLDFLSFQGVGPSPALGPIGLAPRLNFITGDNGLGKSFVLDTAWWVLTRTWAAGKPIKARESSALPVIDYRFTGVDRSAGQWAWQRDRWTPVGDATPNRSLVVYAHANGTFSAWDPVRNAGELAAYHFDENQLWHGTSMAGQGRLCNGLINDWVRWQRTHGCKAFAALKQVLRALSPSREELLLPGRPCHIGLLDETEYPTLQRPQGQVPLPETSSAIRRVVALAYMLVWTWEGHRRACRLAGVRPSDELVFLVDEVECHLHAQWQRRIVPALMDVVGALTRQRLAVQMIVATHSPLVLASMETQFVDARDALFTLSVQDGQVQLHRQAWAAQGDAVNWLVSQSFGLRQARSVEAEAAIGAAEAWMRGERSGLPEGLDSEASIESQLLRALPAGDHFWPVWVVAKGGVQA

SEQ ID NO: 84035 - protein, 190 aa, Pseudomonas sp. RIT-PI-a
MIELVHPLPEPHGFDERCRQRGNAWLQDNPDVGRPRDYWSPFRPQLGEGFANRCAFGAMYIPSGTVEHFISCDEDRGMAYEWSNYRYVDAWMNSAKGSKKAEDFLDPFEVREGWFEVLLPSLQLVLTDKVPEAVRARAEYTLKHLPLRDDERVMRVRRQWLRLFEEGKIGLEGLREMAPLIAAAVERRGG

SEQ ID NO: 84036 - protein, 536 aa, Trabulsiella odontotermitis
MKVDKLHIRSRFKNLENVTVDFDEDHLMTVVVGRNGSGKSNVLEALVAIFRNLDLGEVPPFSYKLVYRLGERNKPDLPSERWLEITIDADPFRGTLAKQYDVQVKDLLIDDSEHLSIGQSSAISVPFSKVKRDKEGKAPYLPNYVFAYYSGPSDRLENYFKKHRADFYRHLLNDKPDKKLDLKGDIRPLFYAKPFHSQFVLLAFFLSDKNSPQRKFIKEHLGIEDLDSVHFVMRQPGWAKQKGELFWGARGVVRRFLDELIKHTLAPIKVTRQEDTSLTGSNVRNEFFHLFLPNIEVLHAFAKGLSDDELFKMLESTLLSEIISEVSIRVKVSSSKEPLTFRELSEGEQQLLTVLGLLKFTGGKDSLFLLDEPDTHLNPSWAVKYLQFLREFVPNQETSHLLMVTHHPLAIAELKKEQVQVMKRDHENQISAKMPDESPRGMGINLILRSDMFGLQTTLDDNTNQKLINRNALAAKEILSKEKMVREPGYKPEDDEQYLARLNTELEHLGFNIATDDPDYLEFLRNKYHTKHEENQ

SEQ ID NO: 84037 - protein, 269 aa, Trabulsiella odontotermitis
MRWICKDEIEECLTQAWREMADNAKAELIAAPDEATRKVILKRVASSNVWREFYNLLPDSLKRKCWYCEAEEIRSDMPVDHFRPKNKVEDDRLHDGYWWLAFDWQNYRCACTFCNSRRVFDETEGGKACRFPLENPDERAFTPEDQAKLSNERPYFLDPFNPDDEKLLWFDNDGLPIAKPLATPEQQTKVGNSIEIFHLHESRIVRARNKVRLEVEKQIRKIKDNDDAQTAKAKLRRMVKDTEKLSRAAVVYLRAHRELPEVKDILNLV

SEQ ID NO: 84038 - protein, 777 aa, Pannonibacter phragmitetus
MQYFNRQTVPPPAVFTSPTAGNSRESLRALFDFDSEKLSQSFAPRSFVGLDEQNVRNGLGRLFRGKCAFCEAETSTRPYRFRPASEATPVAPTDMNSHLYYAWLVDAWQNIYPICTSCAPPDREGSTYFPVIGRRCRLPTPDELTQFVDDATGLWPNHPPAEKPLLLDPCEKKDFTSHFRVSPNGILFGKNKSAEETINYFTLNRHERVNQRAAKFQSLLSTLDDYLADGDPGLLRSIVAFPDMEFGGTWFLLVRQICLAIGYGGGPTPALSMARIDRALRRLRSQSDARQSLSAAVEAISQASELDVDAELAGTTARTGKLRLQRVSLTNFKALENLTVEIPTATELGPEAVSVAPSLLILGENAAGKSSILEAIAIALATDDARDELALAPSDYILKPDYMGAPDHVAPDHSKVELVFEDGSNHVLTVDRTGFEINSKIDRSLLPPVFAYGAYRRYLRKQRQYSPAKYITNLMRSDGILSNPEKWLLGLDAATFVMVVRQLRHVLSIEGDFEVIRRNQDEQRCYIVTSIPGSTTKFSLTPLEVASSGFRTVLATVCDIFQGLLDRRVSGGIETLAQARAVVLIDEVESHLHPRWKMGIMRGLRQALPNVTFIATTHDPLCLRGMGDRDVVVLQRVGRDLNADVKVETRLPVFVERLINLPPTSHLTVEQLLTSDFFQLYSADAPEIEGKFANISDLLAKRSQGAELSEDEKRTLEAFNDDIDNALPVGLSEAHRLVQEAVAQFLKERRSASEVRLRALRQSSKNEILRILRGAAG

SEQ ID NO: 84039 - protein, 312 aa, Pannonibacter phragmitetus
MRYVERKEVTLPASVATKAKTELEAIKAHRSNPDPEKGTFEFKVYKSEEIKQALEKLFHGKCAYCETFYSASAPVDVEHYRPKGAVAEMKEHPGYWWVAMDWENLLPSCIDCNRKRKQKFPGTATSLEELWKFGKDARNFEADQSGKKDSFPVASTGTWLINEETDFGREPALLINPCKDRPEQYLAYNVAMVGYPAIVHSLDGNGKDSRGNASIQIYGLNRLGLVQERTRVLRQLEFIADIVIEVTEIADKVEALPAAQKVGIEQVLEQVPGRLRLLRERMLDELKAMTEPRAPYSAMASAWLEDFMRKLA

SEQ ID NO: 84040 - protein, 268 aa, Chondromyces crocatus
MPYGDDVPIIYASAGMRRIVALAYLLIWTWDEHLAAAKVRGEPPAREIIFLIDEIEAHLHARWQRSIVPALLPVMDILTGQHGSRVQLITATHSPLVLASVEPLFHAEKDAWFDLDLDKATRPPSVKLTSRTYVRHGEIGNWLTSEAFDLKEPRSIEGERAVKQARTLMHQGTASATAIAAADQALRDAGLPDIDPFWVRWGYFRDRQAAPAPASTKTASSRKAPASTKTASSRKASPSTKTASSRKAMPSRKAASSRKATSSRRKTT

SEQ ID NO: 84041 - protein, 227 aa, Chondromyces crocatus
MIRVALAPEPPSFEEHVRQRGQEAITRLLGKPVKGKGGRKPSTTYAREEDIPPTKLPLLWIEPRKTDGKSALDDMMALYGQRCAYLAMYIERATGSPTVDHFVAKSKNRKLAYEWSNYRLSAACVNTAKGVLDVVDPFEVQDGWFELDFATLDVQRRHGAPNAQHPKIDATLSLLNLRDCRKQREEYVTSYHLGPGEGGIDLVYLEHRAPFIASELRRQGLLLHGDT

SEQ ID NO: 84042 - protein, 763 aa, Escherichia coli; identical to SEQ ID NO: 81340

SEQ ID NO: 84043 - protein, 308 aa, Escherichia coli; identical to SEQ ID NO: 81951

SEQ ID NO: 84044 - protein, 393 aa, Yersinia enterocolitica
MKIQKIDIKDIGGIKRAIIDFDEYMNIICGPNGIGKTTILDSVAHSFISTNSNVLKRHAQSTNGQINIVLNDCDSIKESNISFEKFDPQDHSYINGLGQAGRKVIYLNISRMFKYVSLSNISKDEERQDHSIYSLLTNGISVADMKNWFAKRCLFVNTPDALSDNNKINLELAKKCFSLLNVEYSFSRVDAKKFDVFVCTPNGEIWYEYLSSGFKSCLSILFGIIKEIELRMSDDDCLAQDFDGIVLIDELEMHLHPEWQSKIVSVLRNTFPATQFIVTTHSPHVIQNAEPNQIIALGTDSNGFTYVRELPSNEFGYTGWTLDEVLKDVMGMEDTRSQKLKNMLAEFDKAIDEENKIEAESIYRELDMALHPSNVLRKMLSIDLSSISEEVEK

SEQ ID NO: 84045 - protein, 248 aa, Yersinia enterocolitica
MIKLERNFTPLFFSPQNVSRLTERFKNNGSHVWHHDDVKNSLMEISDKKCAYCEVKLGEKSTYHEVEHFKDKNDYPDDVIEWNNLLPSCRHCNSSKGTHDVVHEPIINPFNDIPAEYFYIKNFRVKGKNGIGTLTIDVLNLNDREHLVKPRCETGTIIAEKLEDSMVLFEEYISNPTNQKKRKLIGTVRGILNECQKSAIFSAVSATILHTSEDYLIIRDIMKANNLWDEDMEQLHLMSRNIKLPTKA

SEQ ID NO: 84046 - protein, 251 aa, Yersinia enterocolitica; identical to SEQ ID NO: 82080

SEQ ID NO: 84047 - protein, 218 aa, Yersinia enterocolitica; identical to SEQ ID NO: 81441

SEQ ID NO: 84048 - protein, 251 aa, Yersinia enterocolitica
MNLGNEFENHLVNLKTRQSFAKTFDNNESLYESMETWFINLEKSISFLMEDESFKLIFDPDKFKFHLQQDSKPPYTFQTLSSGYSSIFNILSELIMMTEANHISPSDLQGIVLIDEIDAHLHVSLQRKILPFLTRTYPRIQFIVTTHSPFVIGSLDNAIIYDLSNQQEFSDLSNYSYETIIEGLLGVPVVSISLEKDTKRLSALLVEENVDNAAITELVEKLSPHQENLDDESAVFLLKARRVLREDKETK

SEQ ID NO: 84049 - protein, 218 aa, Yersinia enterocolitica; identical to SEQ ID NO: 81441

SEQ ID NO: 84050 - protein, 396 aa, Pseudomonas syringae
MTGKVLTTSRDVAINLKSRNLIVIGKNGSGKTSFLKALHEILINNISEGHIVKLSEYQSALIESERKLARDPNYQGTVDHYKKIIDKISNPLRVTYTSSSDFVEQNKSGEALIRLYEATRKIAISKVTSATALIPEIPEHKKKDNLGINLEQHLVNLEIGMALAMRKNDNVKTHKIEAWFRKFQEDLKFLFEDESIHLVFNDETLSFTLKQDNRPAYPFQGLSSGYLAIFDIYADLLVRSEYLRILPTDLLGVVLIDELDAHLHISLQRKILPFLTRSFPGIQFIVTTHSPFVVSSTDDSLIYDISTGKECEDLSLFSLEHVVEGVLGVPPISHKMEDLVAELSAVSHDAQSSSDDLRKLLIKLAPHAETLDDESRMFYEMAKNKYLIKKRDEHNV

SEQ ID NO: 84051 - protein, 224 aa, Pseudomonas syringae
MFNVVRPTTVPTSLSRHQSYSEKDVVELLDKAFHSKCYICETKEPLALNVEHFEAHQGCKAKKFAWDNLFYSCARCNNFKRHTYDDILNCADLSVNVLMLLRHVPPMTPYSDILIEAMDENPKTVRTAELISRIFNEDDTGNKSVVRVQLRKRVYKRYAKVLQHINTYIDEDELQDSKQRAIEHLKALMDVKQEYSAFLRWPILESPELFKILGASINLHEAMD

SEQ ID NO: 84052 - protein, 455 aa, Pseudomonas syringae
MEITSFKLKDVGRFTDLTVQLAPTSKHPSNVTVLVGNNGAGKTTLLKSLATSLSWLVARIRTEKGNGNHLAEEDIRNGASSALILIGVVYESQGRSSLPDASPEDALFTWGIARGRQGRKAHIHSSLGGVSRLADHYRNHLTAFDKASLPLIAYYPVERSVLEIPLKIRTKHTFDQLDGYDNSLNRGVDFRRFFEWFREREDSENETGVSDAALAEISDKFGKDSKVWKALSQVKASSRDRQLTAVRSAIATFMPGFSNLRVQRKPRLHMAIDKDGVTLNVSQLSQGEKSMMALVGDIARRLAMMNQSLENPLHGDGIVLIDEVDLHLHPKWQRSLIRQLSETFPNCQFVLTTHSPLVISDAKDVLCYVLDDGELQERDGLYGLDANQVLLSVMDTDVRNSEVQRRLNRLLERVQDGDLDEARKLFSELSLELSDGHLELAKAALLIRKLELRRA

SEQ ID NO: 84053 - protein, 210 aa, Pseudomonas syringae
MRKINKGIEPEALTRWKRLNSTLRYRDLPVEESRSIRSACISEQYGLCAYCCQAITIDDAHNEHIEAQDRAQNRTLDLSNIVASCQRAHQCGHGRGTRTLPLTPLMDECETELKFYLSGLVKGHTDRANTSIEALNLGHTEESNRGLVGARKALVDALIYTQNLTPDELQYEDEDFLGLLLEDLQTPDAGRLLPFSPVLINVIRHLLTQL

SEQ ID NO: 84054 - protein, 465 aa, Salmonella enterica subsp. enterica serovar Senftenberg; identical to SEQ ID NO: 81578

SEQ ID NO: 84055 - protein, 198 aa, Salmonella enterica subsp. enterica serovar Senftenberg; identical to SEQ ID NO: 82591

SEQ ID NO: 84056 - protein, 469 aa, Salmonella enterica subsp. enterica serovar Worthington; identical to SEQ ID NO: 82612

SEQ ID NO: 84057 - protein, 198 aa, Salmonella enterica subsp. enterica serovar Worthington; identical to SEQ ID NO: 83489

SEQ ID NO: 84058 - protein, 469 aa, Salmonella enterica subsp. enterica serovar Worthington; identical to SEQ ID NO: 82612

SEQ ID NO: 84059 - protein, 198 aa, Salmonella enterica subsp. enterica serovar Worthington; identical to SEQ ID NO: 83489

SEQ ID NO: 84060 - protein, 465 aa, Salmonella enterica subsp. enterica serovar Mbandaka; identical to SEQ ID NO: 82624

SEQ ID NO: 84061 - protein, 198 aa, Salmonella enterica subsp. enterica serovar Mbandaka; identical to SEQ ID NO: 82641

SEQ ID NO: 84062 - protein, 469 aa, Salmonella enterica subsp. enterica serovar Worthington; identical to SEQ ID NO: 82612

SEQ ID NO: 84063 - protein, 198 aa, Salmonella enterica subsp. enterica serovar Worthington; identical to SEQ ID NO: 83489

SEQ ID NO: 84064 - protein, 456 aa, Yersinia intermedia
MREPYRLEGIVLQDVGVFEHTRFDFPPIECAERDEEKAEIHLFTGGNGCGKSTLLYALAAIFQPGETGTLIRRRFKSQRSAIDFCFAGLAGTYRASPSENATNNVFGKTQLAFHAPLNYSIQNGLSSLLVSNIGDHYNFSAPYNSKAFDFAAFAYSGQRSPQSNFTLSAIQQITNSPFENALSFDQTIRPGVLTQWIANNRTQAALALAEGMVDEAKRYDLALSRISQFIKVICELDIVFRLQRSPLAVALNIDGQDVNFEVLPDGLKSIICWVADLALRLEAIPWQQQRDIFAQPIILFLDEVDIHLHPKWQRRILPAIQKLLPNAQVFVSTHSPFVVGSVEDAWVYRLPNPQRSICLDNSVAETISPTHSAAGKSYQLILEEVFGIEEQFDIETESLLSEFYQARDTYLQNPQDDTDVMELADKLRVKSEELDTIIEMELRQIARRIQKRPAGV

SEQ ID NO: 84065 - protein, 194 aa, Yersinia intermedia; identical to SEQ ID NO: 84001

SEQ ID NO: 84066 - protein, 501 aa, Yersinia pekkanenii; identical to SEQ ID NO: 84004

SEQ ID NO: 84067 - protein, 215 aa, Yersinia pekkanenii; identical to SEQ ID NO: 84005

SEQ ID NO: 84068 - protein, 540 aa, Vibrio cholerae; identical to SEQ ID NO: 80874

SEQ ID NO: 84069 - protein, 205 aa, Vibrio cholerae; identical to SEQ ID NO: 80875

SEQ ID NO: 84070 - protein, 465 aa, Salmonella enterica subsp. enterica serovar Senftenberg; identical to SEQ ID NO: 81578

SEQ ID NO: 84071 - protein, 198 aa, Salmonella enterica subsp. enterica serovar Senftenberg; identical to SEQ ID NO: 82591

SEQ ID NO: 84072 - protein, 179 aa, Vibrio cholerae
MVSDIARRLVILNPSLENPLNGYGIVLIDEIDLHLHPKWQQTIVQKLENTFPNIQFILSTHSPLVLTTVTSEQIKIINELDYRFKLLSPTSNPFGKNASDALAIMETSESPLVHSEEILALIKKYESLVKRGQEDCRKTKEIKKRIESTGYTFDIADIEMWRFIAENREFFIDKSESDD

SEQ ID NO: 84073 - protein, 205 aa, Vibrio cholerae; identical to SEQ ID NO: 80875

SEQ ID NO: 84074 - protein, 465 aa, Salmonella enterica subsp. enterica serovar Mbandaka; identical to SEQ ID NO: 82624

SEQ ID NO: 84075 - protein, 198 aa, Salmonella enterica subsp. enterica serovar Mbandaka; identical to SEQ ID NO: 82641

SEQ ID NO: 84076 - protein, 469 aa, Salmonella enterica subsp. enterica serovar Worthington; identical to SEQ ID NO: 82612

SEQ ID NO: 84077 - protein, 198 aa, Salmonella enterica subsp. enterica serovar Worthington; identical to SEQ ID NO: 83489

SEQ ID NO: 84078 - protein, 465 aa, Salmonella enterica subsp. enterica serovar Senftenberg; identical to SEQ ID NO: 81578

SEQ ID NO: 84079 - protein, 198 aa, Salmonella enterica subsp. enterica serovar Senftenberg; identical to SEQ ID NO: 82591

SEQ ID NO: 84080 - protein, 465 aa, Salmonella enterica subsp. enterica serovar Mbandaka; identical to SEQ ID NO: 82624

SEQ ID NO: 84081 - protein, 198 aa, Salmonella enterica subsp. enterica serovar Mbandaka; identical to SEQ ID NO: 82641

SEQ ID NO: 84082 - protein, 540 aa, Vibrio cholerae; identical to SEQ ID NO: 80874

SEQ ID NO: 84083 - protein, 205 aa, Vibrio cholerae; identical to SEQ ID NO: 80875

SEQ ID NO: 84084 - protein, 540 aa, Vibrio cholerae
MNEPTRIPKYVKDKIRQAKQGDLYSSFTVSEYYYDGEVLERDIEQSELYLRNVSRIINNAKIRLRNISLYDYKKFSKLKFTSSEKNTTIIIGNNGSGKSTILESISKCLQFLSDNIRIQNNNNYKFQDSEINIHSISGQTIVRCILEIENDFSFSCSLTKNRENISRKVSSELEEFKALARMYQRSNELDNNTLSYPLLAYYPVERSVTLKRDDAVKYYERKKAKYSDKSEGLKNAFDGTSNFNDFFSWYKEIDDIINEFKANDSITKEEIEYLLSKTDNKEKIGSLISQLLEKKNNYNNNEDREFLIRQQKVIQESIKTFVSDIDQVKISRTPHLDMTVIKNGSEISIFNLSQGEKTLIALVSDIARRLVILNPSLENPLNGYGIVLIDEIDLHLHPKWQQTIVQKLENTFPNIQFILSTHSLLVLTTVTSEQIKIINELDYRFKLLSPTSNPFGKNASDALAIMETSESPLVHSEEILALIKKYESLVKRGQEDCRKTKEIKKRIESTGYTFDIADIEMWRFIAENREFFIDKSESDD

SEQ ID NO: 84085 - protein, 205 aa, Vibrio cholerae; identical to SEQ ID NO: 80875

SEQ ID NO: 84086 - protein, 540 aa, Vibrio cholerae; identical to SEQ ID NO: 80874

SEQ ID NO: 84087 - protein, 205 aa, Vibrio cholerae; identical to SEQ ID NO: 80875

SEQ ID NO: 84088 - protein, 540 aa, Vibrio cholerae; identical to SEQ ID NO: 80874

SEQ ID NO: 84089 - protein, 205 aa, Vibrio cholerae; identical to SEQ ID NO: 80875

SEQ ID NO: 84090 - protein, 203 aa, Vibrio cholerae
MTVIKNGSEISIFNLSQGEKTLIALVSDIARRLVILNPSLENPLNGYGIVLIDEIDLHLHPKWQQTIVQKLENTFPNIQFILSTHSPLVLTTVTSEQIKIINELDYRFKLLSPTSNPFGKNASDALAIMETSESPLVHSEEILALIKKYESLVKRGQEDCRKTKEIKKRIESTGYTFDIADIEMWRFIAENREFFIDKSESDD

SEQ ID NO: 84091 - protein, 205 aa, Vibrio cholerae
MIPLSHNNTPTELENYVKLKGQSLTIQDFSAHDFQGVKKIVRDRLHTLQGELCVYCEKKYSVDEMQVEHIKPKSGRNAQPNLCFTYSNYAVSCIQENRKTQTCGQKKKDNILFIEPTSPSCNSHFSLNTDGFINPRGFKNRKEKHSIQTTIDMLGLNKPHLQLERKKQIERLIYILKATKHNRHELTNKFIKSGNFKYILRELTM

SEQ ID NO: 84092 - protein, 540 aa, Vibrio cholerae; identical to SEQ ID NO: 80874

SEQ ID NO: 84093 - protein, 205 aa, Vibrio cholerae; identical to SEQ ID NO: 80875

SEQ ID NO: 84094 - protein, 540 aa, Vibrio cholerae; identical to SEQ ID NO: 80874

SEQ ID NO: 84095 - protein, 205 aa, Vibrio cholerae; identical to SEQ ID NO: 80875

SEQ ID NO: 84096 - protein, 540 aa, Vibrio cholerae; identical to SEQ ID NO: 80874

SEQ ID NO: 84097 - protein, 205 aa, Vibrio cholerae; identical to SEQ ID NO: 80875

SEQ ID NO: 84098 - protein, 540 aa, Vibrio cholerae; identical to SEQ ID NO: 80874

SEQ ID NO: 84099 - protein, 205 aa, Vibrio cholerae; identical to SEQ ID NO: 80875

SEQ ID NO: 84100 - protein, 203 aa, Vibrio cholerae; identical to SEQ ID NO: 84090

SEQ ID NO: 84101 - protein, 205 aa, Vibrio cholerae; identical to SEQ ID NO: 84091

SEQ ID NO: 84102 - protein, 540 aa, Vibrio cholerae; identical to SEQ ID NO: 80874

SEQ ID NO: 84103 - protein, 205 aa, Vibrio cholerae; identical to SEQ ID NO: 80875

SEQ ID NO: 84104 - protein, 203 aa, Vibrio cholerae; identical to SEQ ID NO: 84090

SEQ ID NO: 84105 - protein, 205 aa, Vibrio cholerae; identical to SEQ ID NO: 80875

SEQ ID NO: 84106 - protein, 540 aa, Vibrio cholerae; identical to SEQ ID NO: 80874

SEQ ID NO: 84107 - protein, 205 aa, Vibrio cholerae; identical to SEQ ID NO: 80875

SEQ ID NO: 84108 - protein, 540 aa, Vibrio cholerae; identical to SEQ ID NO: 80874

SEQ ID NO: 84109 - protein, 205 aa, Vibrio cholerae; identical to SEQ ID NO: 80875

SEQ ID NO: 84110 - protein, 540 aa, Vibrio cholerae; identical to SEQ ID NO: 80874

SEQ ID NO: 84111 - protein, 205 aa, Vibrio cholerae; identical to SEQ ID NO: 80875

SEQ ID NO: 84112 - protein, 179 aa, Vibrio cholerae; identical to SEQ ID NO: 84072

SEQ ID NO: 84113 - protein, 205 aa, Vibrio cholerae; identical to SEQ ID NO: 80875

SEQ ID NO: 84114 - protein, 540 aa, Vibrio cholerae; identical to SEQ ID NO: 80874

SEQ ID NO: 84115 - protein, 205 aa, Vibrio cholerae; identical to SEQ ID NO: 80875

SEQ ID NO: 84116 - protein, 540 aa, Vibrio cholerae; identical to SEQ ID NO: 80874

SEQ ID NO: 84117 - protein, 205 aa, Vibrio cholerae; identical to SEQ ID NO: 80875

SEQ ID NO: 84118 - protein, 540 aa, Vibrio cholerae; identical to SEQ ID NO: 80874

SEQ ID NO: 84119 - protein, 205 aa, Vibrio cholerae; identical to SEQ ID NO: 80875

SEQ ID NO: 84120 - protein, 540 aa, Vibrio cholerae; identical to SEQ ID NO: 80874

SEQ ID NO: 84121 - protein, 205 aa, Vibrio cholerae; identical to SEQ ID NO: 80875

SEQ ID NO: 84122 - protein, 203 aa, Vibrio cholerae; identical to SEQ ID NO: 84090

SEQ ID NO: 84123 - protein, 205 aa, Vibrio cholerae; identical to SEQ ID NO: 84091

SEQ ID NO: 84124 - protein, 488 aa, Vibrio cholerae
MSRIINNAKIRLRNISLYDYKKFSKLKFTSSEKNTTIIIGNNGSGKSTILESISKCLQFLSDNIRIQNNNNYKFQDSEINIHSISGQTIVRCILEIENDFSFSCSLTKNRENISRKVSSELEEFKALARMYQRSNELDNNTLSYPLLAYYPVERSVTLKRDDAVKYYERKKAKYSDKSEGLKNAFDGTSNFNDFFSWYKEIDDIINEFKANDSITKEEIEYLLSKTDNKEKIGSLISQLLEKKNNYNNNEDREFLIRQQKVIQESIKTFVSDIDQVKISRTPHLDMTVIKNGSEISIFNLSQGEKTLIALVSDIARRLVILNPSLENPLNGYGIVLIDEIDLHLHPKWQQTIVQKLENTFPNIQFILSTHSPLVLTTVTSEQIKIINELDYRFKLLSPTSNPFGKNASDALAIMETSESPLVHSEEILALIKKYESLVKRGQEDCRKTKEIKKRIESTGYTFDIADIEMWRFIAENREFFIDKSESDD

SEQ ID NO: 84125 - protein, 205 aa, Vibrio cholerae; identical to SEQ ID NO: 80875

SEQ ID NO: 84126 - protein, 540 aa, Vibrio cholerae; identical to SEQ ID NO: 80874

SEQ ID NO: 84127 - protein, 205 aa, Vibrio cholerae; identical to SEQ ID NO: 80875

SEQ ID NO: 84128 - protein, 540 aa, Vibrio cholerae; identical to SEQ ID NO: 80874

SEQ ID NO: 84129 - protein, 205 aa, Vibrio cholerae; identical to SEQ ID NO: 80875

SEQ ID NO: 84130 - protein, 203 aa, Vibrio cholerae; identical to SEQ ID NO: 84090

SEQ ID NO: 84131 - protein, 205 aa, Vibrio cholerae; identical to SEQ ID NO: 84091

SEQ ID NO: 84132 - protein, 540 aa, Vibrio cholerae; identical to SEQ ID NO: 80874

SEQ ID NO: 84133 - protein, 205 aa, Vibrio cholerae; identical to SEQ ID NO: 80875

SEQ ID NO: 84134 - protein, 540 aa, Vibrio cholerae; identical to SEQ ID NO: 80874

SEQ ID NO: 84135 - protein, 205 aa, Vibrio cholerae; identical to SEQ ID NO: 80875

SEQ ID NO: 84136 - protein, 203 aa, Vibrio cholerae; identical to SEQ ID NO: 84090

SEQ ID NO: 84137 - protein, 205 aa, Vibrio cholerae; identical to SEQ ID NO: 80875

SEQ ID NO: 84138 - protein, 540 aa, Vibrio cholerae; identical to SEQ ID NO: 80874

SEQ ID NO: 84139 - protein, 205 aa, Vibrio cholerae; identical to SEQ ID NO: 80875

SEQ ID NO: 84140 - protein, 540 aa, Vibrio cholerae; identical to SEQ ID NO: 80874

SEQ ID NO: 84141 - protein, 205 aa, Vibrio cholerae; identical to SEQ ID NO: 80875

SEQ ID NO: 84142 - protein, 540 aa, Vibrio cholerae; identical to SEQ ID NO: 80874

SEQ ID NO: 84143 - protein, 205 aa, Vibrio cholerae; identical to SEQ ID NO: 80875

SEQ ID NO: 84144 - protein, 540 aa, Vibrio cholerae; identical to SEQ ID NO: 80874

SEQ ID NO: 84145 - protein, 205 aa, Vibrio cholerae; identical to SEQ ID NO: 80875

SEQ ID NO: 84146 - protein, 540 aa, Vibrio cholerae; identical to SEQ ID NO: 80874

SEQ ID NO: 84147 - protein, 205 aa, Vibrio cholerae; identical to SEQ ID NO: 80875

SEQ ID NO: 84148 - protein, 203 aa, Vibrio cholerae; identical to SEQ ID NO: 84090

SEQ ID NO: 84149 - protein, 205 aa, Vibrio cholerae; identical to SEQ ID NO: 80875

SEQ ID NO: 84150 - protein, 540 aa, Vibrio cholerae; identical to SEQ ID NO: 84084

SEQ ID NO: 84151 - protein, 205 aa, Vibrio cholerae; identical to SEQ ID NO: 80875

SEQ ID NO: 84152 - protein, 203 aa, Vibrio cholerae; identical to SEQ ID NO: 84090

SEQ ID NO: 84153 - protein, 205 aa, Vibrio cholerae; identical to SEQ ID NO: 80875

SEQ ID NO: 84154 - protein, 540 aa, Vibrio cholerae; identical to SEQ ID NO: 80874

SEQ ID NO: 84155 - protein, 205 aa, Vibrio cholerae; identical to SEQ ID NO: 80875

SEQ ID NO: 84156 - protein, 540 aa, Vibrio cholerae; identical to SEQ ID NO: 80874

SEQ ID NO: 84157 - protein, 205 aa, Vibrio cholerae; identical to SEQ ID NO: 80875

SEQ ID NO: 84158 - protein, 540 aa, Vibrio cholerae; identical to SEQ ID NO: 80874

SEQ ID NO: 84159 - protein, 205 aa, Vibrio cholerae; identical to SEQ ID NO: 80875

SEQ ID NO: 84160 - protein, 540 aa, Vibrio cholerae; identical to SEQ ID NO: 80874

SEQ ID NO: 84161 - protein, 205 aa, Vibrio cholerae; identical to SEQ ID NO: 80875

SEQ ID NO: 84162 - protein, 203 aa, Vibrio cholerae; identical to SEQ ID NO: 84090

SEQ ID NO: 84163 - protein, 205 aa, Vibrio cholerae; identical to SEQ ID NO: 84091

SEQ ID NO: 84164 - protein, 203 aa, Vibrio cholerae; identical to SEQ ID NO: 84090

SEQ ID NO: 84165 - protein, 211 aa, Vibrio cholerae
  MOD_RES (43)..(51): Any amino acid
MIPLSHNNTPTELENYVKLKGQSLTIQDFSAHDFQGVKKIVRXXXXXXXXXHTLQGELCVYCEKKYSVDEMQVEHIKPKSGRNAQPNLCFTYSNYAVSCIQENRKTQTCGQKKKDNILFIEPTSPSCNSHFSLNTDGFINPRGFKNRKEKHSIQTTIDMLGLNKPHLQLERKKQIERLIYILKATKHNRHELTNKFIKSGNFKYILRELTM

SEQ ID NO: 84166 - protein, 203 aa, Vibrio cholerae; identical to SEQ ID NO: 84090

SEQ ID NO: 84167 - protein, 205 aa, Vibrio cholerae; identical to SEQ ID NO: 84091

SEQ ID NO: 84168 - protein, 540 aa, Vibrio cholerae; identical to SEQ ID NO: 80874

SEQ ID NO: 84169 - protein, 205 aa, Vibrio cholerae; identical to SEQ ID NO: 80875

SEQ ID NO: 84170 - protein, 540 aa, Vibrio cholerae; identical to SEQ ID NO: 80874

SEQ ID NO: 84171 - protein, 205 aa, Vibrio cholerae; identical to SEQ ID NO: 80875

SEQ ID NO: 84172 - protein, 540 aa, Vibrio cholerae; identical to SEQ ID NO: 80874

SEQ ID NO: 84173 - protein, 181 aa, Vibrio cholerae
MIPLSHNNTPTELENYVKLKGQSLTIQDFSAHDFQGVKKIVRDRLHTLQGELCVYCEKKYSVDEMQVEHIKPKSGRNAQPNLCFTYSNYAVSCIQENRKTQTCGQKKKDNILFIEPTSPSCNSHFSLDTDGFINPRGFKNRKEKHSIQTTIDMLGLNKPHLQLEKKTNRKINIHFKSNKTQ

SEQ ID NO: 84174 - protein, 540 aa, Vibrio cholerae; identical to SEQ ID NO: 80874

SEQ ID NO: 84175 - protein, 205 aa, Vibrio cholerae; identical to SEQ ID NO: 80875

SEQ ID NO: 84176 - protein, 540 aa, Vibrio cholerae; identical to SEQ ID NO: 80874

SEQ ID NO: 84177 - protein, 205 aa, Vibrio cholerae; identical to SEQ ID NO: 80875

SEQ ID NO: 84178 - protein, 540 aa, Vibrio cholerae; identical to SEQ ID NO: 80874

SEQ ID NO: 84179 - protein, 205 aa, Vibrio cholerae; identical to SEQ ID NO: 80875

SEQ ID NO: 84180 - protein, 540 aa, Vibrio cholerae; identical to SEQ ID NO: 80874

SEQ ID NO: 84181 - protein, 205 aa, Vibrio cholerae; identical to SEQ ID NO: 80875

SEQ ID NO: 84182 - protein, 203 aa, Vibrio cholerae; identical to SEQ ID NO: 84090

SEQ ID NO: 84183 - protein, 205 aa, Vibrio cholerae; identical to SEQ ID NO: 84091

SEQ ID NO: 84184 - protein, 203 aa, Vibrio cholerae; identical to SEQ ID NO: 84090

SEQ ID NO: 84185 - protein, 205 aa, Vibrio cholerae; identical to SEQ ID NO: 80875

SEQ ID NO: 84186 - protein, 540 aa, Vibrio cholerae; identical to SEQ ID NO: 80874

SEQ ID NO: 84187 - protein, 205 aa, Vibrio cholerae; identical to SEQ ID NO: 80875

SEQ ID NO: 84188 - protein, 540 aa, Vibrio cholerae; identical to SEQ ID NO: 80874

SEQ ID NO: 84189 - protein, 205 aa, Vibrio cholerae; identical to SEQ ID NO: 80875

SEQ ID NO: 84190 - protein, 540 aa, Vibrio cholerae; identical to SEQ ID NO: 80874

SEQ ID NO: 84191 - protein, 205 aa, Vibrio cholerae; identical to SEQ ID NO: 80875

SEQ ID NO: 84192 - protein, 540 aa, Vibrio cholerae; identical to SEQ ID NO: 80874

SEQ ID NO: 84193 - protein, 205 aa, Vibrio cholerae; identical to SEQ ID NO: 80875

SEQ ID NO: 84194 - protein, 540 aa, Vibrio cholerae; identical to SEQ ID NO: 80874

SEQ ID NO: 84195 - protein, 205 aa, Vibrio cholerae; identical to SEQ ID NO: 80875

SEQ ID NO: 84196 - protein, 540 aa, Vibrio cholerae; identical to SEQ ID NO: 80874

SEQ ID NO: 84197 - protein, 205 aa, Vibrio cholerae; identical to SEQ ID NO: 80875

SEQ ID NO: 84198 - protein, 540 aa, Vibrio cholerae; identical to SEQ ID NO: 80874

SEQ ID NO: 84199 - protein, 205 aa, Vibrio cholerae; identical to SEQ ID NO: 80875

SEQ ID NO: 84200 - protein, 203 aa, Vibrio cholerae; identical to SEQ ID NO: 84090

SEQ ID NO: 84201 - protein, 205 aa, Vibrio cholerae; identical to SEQ ID NO: 80875

SEQ ID NO: 84202 - protein, 540 aa, Vibrio cholerae; identical to SEQ ID NO: 80874

SEQ ID NO: 84203 - protein, 205 aa, Vibrio cholerae; identical to SEQ ID NO: 80875

SEQ ID NO: 84204 - protein, 203 aa, Vibrio cholerae; identical to SEQ ID NO: 84090

SEQ ID NO: 84205 - protein, 205 aa, Vibrio cholerae; identical to SEQ ID NO: 80875

SEQ ID NO: 84206 - protein, 540 aa, Vibrio cholerae; identical to SEQ ID NO: 80874

SEQ ID NO: 84207 - protein, 205 aa, Vibrio cholerae; identical to SEQ ID NO: 80875

SEQ ID NO: 84208 - protein, 203 aa, Vibrio cholerae; identical to SEQ ID NO: 84090

SEQ ID NO: 84209 - protein, 205 aa, Vibrio cholerae; identical to SEQ ID NO: 80875

SEQ ID NO: 84210 - protein, 540 aa, Vibrio cholerae; identical to SEQ ID NO: 80874

SEQ ID NO: 84211 - protein, 205 aa, Vibrio cholerae; identical to SEQ ID NO: 80875

SEQ ID NO: 84212 - protein, 540 aa, Vibrio cholerae; identical to SEQ ID NO: 80874

SEQ ID NO: 84213 - protein, 205 aa, Vibrio cholerae; identical to SEQ ID NO: 80875

SEQ ID NO: 84214 - protein, 372 aa, Vibrio cholerae
MSSELEEFKALARMYQRSNELDNNTLSYPLLAYYPVERSVTLKRDDAVKYYERKKAKYSDKSEGLKNAFDGTSNFNDFFSWYKEIDDIINEFKANDSITKEEIEYLLSKTDNKEKIGSLISQLLEKKNNYNNNEDREFLIRQQKVIQESIKTFVSDIDQVKISRTPHLDMTVIKNGSEISIFNLSQGEKTLIALVSDIARRLVILNPSLENPLNGYGIVLIDEIDLHLHPKWQQTIVQKLENTFPNIQFILSTHSPLVLTTVTSEQIKIINELDYRFKLLSPTSNPFGKNASDALAIMETSESPLVHSEEILALIKKYESLVKRGQEDCRKTKEIKKRIESTGYTFDIADIEMWRFIAENREFFIDKSESDD

SEQ ID NO: 84215 - protein, 205 aa, Vibrio cholerae; identical to SEQ ID NO: 80875

SEQ ID NO: 84216 - protein, 540 aa, Vibrio cholerae; identical to SEQ ID NO: 80874

SEQ ID NO: 84217 - protein, 205 aa, Vibrio cholerae; identical to SEQ ID NO: 80875

SEQ ID NO: 84218 - protein, 540 aa, Vibrio cholerae; identical to SEQ ID NO: 80874

SEQ ID NO: 84219 - protein, 205 aa, Vibrio cholerae; identical to SEQ ID NO: 80875

SEQ ID NO: 84220 - protein, 540 aa, Vibrio cholerae; identical to SEQ ID NO: 80874

SEQ ID NO: 84221 - protein, 205 aa, Vibrio cholerae; identical to SEQ ID NO: 80875

SEQ ID NO: 84222 - protein, 540 aa, Vibrio cholerae; identical to SEQ ID NO: 80874

SEQ ID NO: 84223 - protein, 205 aa, Vibrio cholerae; identical to SEQ ID NO: 80875

SEQ ID NO: 84224 - protein, 203 aa, Vibrio cholerae; identical to SEQ ID NO: 84090

SEQ ID NO: 84225 - protein, 205 aa, Vibrio cholerae; identical to SEQ ID NO: 80875

SEQ ID NO: 84226 - protein, 540 aa, Vibrio cholerae; identical to SEQ ID NO: 80874

SEQ ID NO: 84227 - protein, 205 aa, Vibrio cholerae; identical to SEQ ID NO: 80875

SEQ ID NO: 84228 - protein, 179 aa, Vibrio cholerae; identical to SEQ ID NO: 84072

SEQ ID NO: 84229 - protein, 205 aa, Vibrio cholerae; identical to SEQ ID NO: 80875

SEQ ID NO: 84230 - protein, 203 aa, Vibrio cholerae; identical to SEQ ID NO: 84090

SEQ ID NO: 84231 - protein, 205 aa, Vibrio cholerae; identical to SEQ ID NO: 80875

SEQ ID NO: 84232 - protein, 203 aa, Vibrio cholerae; identical to SEQ ID NO: 84090

SEQ ID NO: 84233 - protein, 205 aa, Vibrio cholerae; identical to SEQ ID NO: 80875

SEQ ID NO: 84234 - protein, 203 aa, Vibrio cholerae; identical to SEQ ID NO: 84090

SEQ ID NO: 84235 - protein, 205 aa, Vibrio cholerae; identical to SEQ ID NO: 80875

SEQ ID NO: 84236 - protein, 540 aa, Vibrio cholerae; identical to SEQ ID NO: 80874

SEQ ID NO: 84237 - protein, 205 aa, Vibrio cholerae; identical to SEQ ID NO: 80875

SEQ ID NO: 84238 - protein, 203 aa, Vibrio cholerae; identical to SEQ ID NO: 84090

SEQ ID NO: 84239 - protein, 205 aa, Vibrio cholerae; identical to SEQ ID NO: 80875

SEQ ID NO: 84240 - protein, 203 aa, Vibrio cholerae; identical to SEQ ID NO: 84090

SEQ ID NO: 84241 - protein, 205 aa, Vibrio cholerae; identical to SEQ ID NO: 80875

SEQ ID NO: 84242 - protein, 540 aa, Vibrio cholerae; identical to SEQ ID NO: 80874

SEQ ID NO: 84243 - protein, 205 aa, Vibrio cholerae; identical to SEQ ID NO: 80875

SEQ ID NO: 84244 - protein, 203 aa, Vibrio cholerae; identical to SEQ ID NO: 84090

SEQ ID NO: 84245 - protein, 205 aa, Vibrio cholerae; identical to SEQ ID NO: 84091

SEQ ID NO: 84246 - protein, 203 aa, Vibrio cholerae; identical to SEQ ID NO: 84090

SEQ ID NO: 84247 - protein, 205 aa, Vibrio cholerae; identical to SEQ ID NO: 84091

SEQ ID NO: 84248 - protein, 540 aa, Vibrio cholerae; identical to SEQ ID NO: 80874

SEQ ID NO: 84249 - protein, 205 aa, Vibrio cholerae; identical to SEQ ID NO: 80875

SEQ ID NO: 84250 - protein, 494 aa, Pseudomonas sp. 250J
MFRKITVNEKKSCAVVRLLEGESQPSTWITVMVGQNGVRKSYVLRALLDVALGQSGARTGGRLIEVEGGGRPSCVVCLSGTPLDRFPRASSNSFFGVLKESLGVPLLYFGARATNGMAGTAQSERALIAALLNNIEAVRQRGHLLERVFSHLGLRARMDIRLKLSKATADDHKLWLNTPIDKQHMVREDVEKRASQLLARFAEAQSARGWDETVERAYGRFMALDYLVIYKLLTGINKSHALPVLTLLDGELSVAPSYWDAYGWGVGEWLVLLKAGFLDTAGTSFFRLTDVAENSGDEEKDEALKLKGQDLSSGQWGWLAGFAGLCAELRPGSLVLVDEPENSLHPKWQQQYTSMLNSIFRECGEVQAVIATHSPLVASGVDPEWGSVVALRSGMSLDDGVLEIRSEAMESTFGWSASDVYENIFGIDSTRAPGFTATADIALSLIREKKPVTQREIEVIRKELSEGRETLPMHDPMRNVITSILQRFSGQQES

SEQ ID NO: 84251 - protein, 291 aa, Pseudomonas sp. 250J
MELFETLDFEEQDLPLLTAVRAHGVAGRAWSINTDVGNLRSRLLTLQGYRCAYCQVPIDRDEVGHRELDHILPKSASSECTQAKGKSNAFGDRQHTFGYGQFTFEPYNLILTCKACNAFKKSFDPMRDRQGYVVSDDYPDGRQLLWFYPYSQRYSDHIERGDDWIYSKVTDEGDAVIRTCKLDKVAVLTIRFQGRALALASNAGNLRLALMALGTQVAMGNCSKTDAHIALVDALLLDEDQAIYYLNIVTNYLENGNFSDLEKIERLMAAALERAHVSPQVAADVIATVTH

SEQ ID NO: 84252 - protein, 203 aa, Vibrio cholerae; identical to SEQ ID NO: 84090

SEQ ID NO: 84253 - protein, 205 aa, Vibrio cholerae; identical to SEQ ID NO: 84091

SEQ ID NO: 84254 - protein, 540 aa, Vibrio cholerae; identical to SEQ ID NO: 80874

SEQ ID NO: 84255 - protein, 205 aa, Vibrio cholerae; identical to SEQ ID NO: 80875

SEQ ID NO: 84256 - protein, 203 aa, Vibrio cholerae; identical to SEQ ID NO: 84090

SEQ ID NO: 84257 - protein, 205 aa, Vibrio cholerae; identical to SEQ ID NO: 84091

SEQ ID NO: 84258 - protein, 540 aa, Vibrio cholerae; identical to SEQ ID NO: 80874

SEQ ID NO: 84259 - protein, 205 aa, Vibrio cholerae; identical to SEQ ID NO: 80875

SEQ ID NO: 84260 - protein, 540 aa, Vibrio cholerae; identical to SEQ ID NO: 80874

SEQ ID NO: 84261 - protein, 205 aa, Vibrio cholerae; identical to SEQ ID NO: 80875

SEQ ID NO: 84262 - protein, 540 aa, Vibrio cholerae; identical to SEQ ID NO: 84084

SEQ ID NO: 84263 - protein, 205 aa, Vibrio cholerae; identical to SEQ ID NO: 80875

SEQ ID NO: 84264 - protein, 203 aa, Vibrio cholerae; identical to SEQ ID NO: 84090

SEQ ID NO: 84265 - protein, 205 aa, Vibrio cholerae; identical to SEQ ID NO: 80875

SEQ ID NO: 84266 - protein, 203 aa, Vibrio cholerae; identical to SEQ ID NO: 84090

SEQ ID NO: 84267 - protein, 205 aa, Vibrio cholerae; identical to SEQ ID NO: 84091

SEQ ID NO: 84268 - protein, 540 aa, Vibrio cholerae; identical to SEQ ID NO: 80874

SEQ ID NO: 84269 - protein, 205 aa, Vibrio cholerae; identical to SEQ ID NO: 80875

SEQ ID NO: 84270 - protein, 540 aa, Vibrio cholerae; identical to SEQ ID NO: 80874

SEQ ID NO: 84271 - protein, 205 aa, Vibrio cholerae; identical to SEQ ID NO: 80875

SEQ ID NO: 84272 - protein, 540 aa, Vibrio cholerae; identical to SEQ ID NO: 80874

SEQ ID NO: 84273 - protein, 205 aa, Vibrio cholerae; identical to SEQ ID NO: 80875

SEQ ID NO: 84274 - protein, 540 aa, Vibrio cholerae; identical to SEQ ID NO: 80874

SEQ ID NO: 84275 - protein, 205 aa, Vibrio cholerae; identical to SEQ ID NO: 80875

SEQ ID NO: 84276 - protein, 540 aa, Vibrio cholerae; identical to SEQ ID NO: 80874

SEQ ID NO: 84277 - protein, 205 aa, Vibrio cholerae; identical to SEQ ID NO: 80875

SEQ ID NO: 84278 - protein, 540 aa, Vibrio cholerae; identical to SEQ ID NO: 80874

SEQ ID NO: 84279 - protein, 205 aa, Vibrio cholerae; identical to SEQ ID NO: 80875

SEQ ID NO: 84280 - protein, 540 aa, Vibrio cholerae; identical to SEQ ID NO: 80874

SEQ ID NO: 84281 - protein, 205 aa, Vibrio cholerae; identical to SEQ ID NO: 80875

SEQ ID NO: 84282 - protein, 524 aa, Klebsiella variicola
MKPYFLVKYSVLDGFEIPISGDRVDESNYLSVIVGKNGSGKSRVLYNIAMSIAINSSLKWYGDEASGDYQFYNLRSFFWEKNYLPKLIGVSYESNGEKSLFWPCGESKQDCSYRYINKTPPANIICISSSFFHKFPSTNEWPLSERPLRKNDEDIYINLCMTEINKKNGYHGGRGSNVFGKGLMKSLLMNKDSLSNTLKMLRNYGGYDGVDVSFCFNDQLHLFKLNEYNYSVEDFRDSLNSMDFRDLNISDEESCEIMNKIIIFMELVNYKELLKDERFHQEAEEIDYIFTFQHQFKRKPHGVNMSFFVDEKGENSSLSDELRELVCYFNGYGLLTVKDVSFFKSSMSIPLYSLSSGELNVLTTLTLINSEIKDSSLILIDEPEINLHPKWQEEIIPTLLNSFSHISGCHFIIATHSPLIAASIKENNSSVVIIGDNRNDTIILPGSKIKGQSSDFQLFYTLKHPGPHNEYLIRKLLTIIAKRKNGMDISHEDVLFINDVSDLLIDADEGDKVKYLLAQALALI

SEQ ID NO: 84283 - protein, 234 aa, Klebsiella variicola
MKSQHTRQLPSIVFSAKSMDFISSCNLKNHKSIWNVTVGKVIGVKKEIRQHYLRYQKNLCAYCRTEVLHDHGLYWDIEHIIPKDKYAIFLFEPRNLALSCRHCNSKKSNKKVFNRRIYKTSVYPVDGEFFSIVHPHYDKYSAHIEMYIYEGRVIYEPKSDKGRNTYDMCNLERFVHIAINDTGDKNVIDFIDENLLGMDDECLFEHSPREKKLMDIILGIKSRIEKKYLNRDFA

SEQ ID NO: 84284 - protein, 271 aa, Shinella sp. SUS2
MRIDGDFRDIEVKPGKESEAGRCIINVRKKKQDGSDYIVPQRLDIVSSGYRAVLALVCDVLEGLMDAAPHLSPRDARHGEAIVLVDEIEAHLHPRWKLQIVAGLRKALPRVTFIFTSHDPLCVRGMRDGEVMMLHRYQNTGDGPSSMPEVVERVADFDHIETMTVEQLLTSDMFQLFSADDRRTDHTFAAVADLLARDRSILDERERAVLADFNAAIADGLPYGRTEVTRVVQEAVAEYLAMRRTAASTRVSAAREAAKTEVKKFLQGLLE

SEQ ID NO: 84285 - protein, 347 aa, Shinella sp. SUS2
MATEPAILRKPRPSDGKSELQLVTEHMERIAAGEKLEAFDFARYKEASVKTALETLFHGKCAYCESVYAGLQPVDVEHYRPKGEVEGAPGHPGYWWLAMEWSNLLPSCIDCNRRRSQKTPKPGEDRLVALRANGDFDRSRSILTGKQSAFPLEEGSVHVARPGDDIEAEKRLLLDPTRDDPDLHLAFHVDRAHLISLIHPKPLDPGGAAGLPDALADPAAIASAAVASRSSAAGAVSIQIYGLNRLGLVQARTRVLRDLEFLLAMSLNLHEIAADLAERVAARSTELATLHGAARERLSEDIAMDERIAGKIGRYAEEAQARIREMAQPQAPYSSLVRAWIRAYLAE

SEQ ID NO: 84286 - protein, 457 aa, Escherichia coli
MKRLYYTHHDSRTLKLAIEGDVSDNANIFTVIVGKNGVGKSRLLSQIAKDCIQDVHFLKTFNPLFDREITPKLIAVSTSPFDKFPPGRRSLNHQRKENNYRYVGMRGEGPFGVSNAVSLLSSAARGWLEKLAYSENPANLLDVFHSIDFEPHIEFVFKPTYNGPDTPDYNFIGVYSDEILTEVKKLYLKYNIKIDRKNIESLLKLNSESRHDIYEALVEINRFEPERRAVTLSVDFTNGETLVGSTYANNYFSRSILKLMNAGFMRLMDMRLIKKSYGPMSLKRASSGEQCLLVMLLGIAGHITDGSIILIDEPEISLHPRWQEEFIIMLTKAFSTYSGCQFIIATHSPQIISNLPNKGCYITSLSKNYLYKAKYFSNRSADYQLAELFDAPGIMNEYIARLAFNLLSKVKTAKLVTDDNLRELKQLQLLLENVNSNDPINELVNSVSQVCEIYAKN

SEQ ID NO: 84287 - protein, 211 aa, Escherichia coli
MPKIKNPIRFSAESLDIIEKKLSSPDFKHTDWGDDDLQVLRAEIRNHYREEQKLECVYCHEPIGVRAAQAAPIEHIVPKSQYLCFIFEPKNLCVVCPDCNEFKGKNEVLFEPVINGGRRKNYPTASASFRIVHPHIDDYEMHIIKANRVYVDKTPKGHYTIGICKLNRFFHYFGMCDEFVNDAKIAEANENFFKKGSITTNELLDDDIHLI

SEQ ID NO: 84288 - protein, 445 aa, Porphyromonas gingivalis; identical to SEQ ID NO: 80880

SEQ ID NO: 84289 - protein, 199 aa, Porphyromonas gingivalis; identical to SEQ ID NO: 80881

SEQ ID NO: 84290 - protein, 456 aa, Microcystis panniformis FACHB-1757
MWVESITLENIKCFQNQEIKFIIRNPDNKRRQDAKPYHWITLLGENGVGKSTILQALALLLAGPEAAKELLPRPTGWICNPKTPGKLTAVLHQEDGDAGKFGTDKTRKTFAYSYFVTGKERLELGGSKDKQTYTEPALIEENSKILSWLRANAFASDNHGWFAVGYGAFRRLTRVSQVIIPSLEPPQRSSNFFSQFNEDTSLSSFERWMVYLDYRIAKNPEDSQAKQMKKIGEEAITKLLPGNVEIAEVTADGLIQFLVNGQKVPTISLSDGFRSMIALAGDLIWRLLQSFPNLDNPTEASGVVLIDELDIHLHPSWQREIAGWLQEVFPKLQFFVATHSPLIAAGAGEKSLTLRIDLVEGELEIVEIPYLELAANVDRTLTSAAFGLKSTFPTDTENKIKRYHQLNRKNKNLAAEEKEEYEQLSLFVGEVKPFSEISQPNSLESRIDALLEERLS

SEQ ID NO: 84291 - protein, 229 aa, Microcystis panniformis FACHB-1757
MIPVTRISEPRVLAKNAARWLEALESIKSNNKATKAQINQAQNKYSHPQVKDALVKMFNGKCAYCESKITVVTYGAIKHFYPKSQYPDLTFTWENLLLSCDKCNDANHKGTNFPLDDITGNPLLIDPTDGVSDTNTHLEFVWDEMAKLASVYGRDRRGQIVEDLFDLNGMRGRKELINYRSQYIKKLLALLRYAKQGDSEVLSVLQEACQPGAEYYAFASIYILPHLPP

SEQ ID NO: 84292 - protein, 541 aa, Pantoea sp. CFSAN033090
MSESKKRLDIIFSDFLEMIEGNLPANIIRNSQQLRVLNEALNNDNLYLKKLSVSDFKRLREVFVTLEDDLTVFVADNGYGKTTLLDAIAISLSWLRSNIQKKDKPGTYIKDFEINNSPDAHYASIASTFKIQQYNCNLLITNAKEGVSFKRKNELQEIKEIATMYRHVNTLMKNSSLPLMAYYSIVRSNVGGGVDNKRKPIKNKNSWSKFEDYEDIVFDRNDFGDFLSWLTFLRNKAAHENSDLYGSADLLIKEIESITGTLNQLSSITGIDKNVISNLEISREEKRIMLQKVNANDNNLLNSSAFYKSVTNAILKFLPEFESINLVYGESDVKLVLTKDNVELDAQQLSQGEKTILTLVGDLARRLSLLNPMLENPFEGRGIVLIDEIDLHLHPHWQQQIIERLLTTFPNLQFIISTHSPQVISTVPERCIRILEESLNEFGEKEIKIVSPRYQTKGLTNNDALLYGMKTDPTPHLKEVAWLNEYKKLIELGEFNDEKGTSLRAKLDSHFGKTHPLILECDELISLVNFKQKLKNKKTQS

SEQ ID NO: 84293 - protein, 222 aa, Pantoea sp. CFSAN033090
MRFLVRPVDGPAILRNFNHQNDDWDTLSSAHKRLIWVELKKMQGNLCAYCERRIDFKKEGDKHIEHFLRKGIHPHLTFAWENLFGSCGEKQRCGFFKDKQDYSESDLLKMDELNPELYFRFFYNGDVEIRPNIGPRMSHVAQVTLKVFNLKPNAGGVRAERNAAINRGIKSIKIYANIARQLIEEGADVSDARDLVRDEYYESIKNHEFITAHKHVFEDFLA

SEQ ID NO: 84294 - protein, 454 aa, Marinobacter sp. CP1
MKLETLQLTNFRRFKHLEISFHKNLTVLAARNGQGKTSVLDAATIALGTFVGAFDLGKAKHIEQRDARYKREKNKPESEQQFPVEVKASLSGLKNPVLRKLSGAKNKTTTKDAVELAALGKKMMTQVRNLEPVALPLLAYYGSGRLWNVHKNVTRKSVLSESRTMGYEDCFSSASSFTQVQQWMTKATFAALQQKSMQAYEGYNIADQIEGIQETVNTVLSIEGWSGFHYSVHHEELAMTHEELGVLPVSLLSDGVRAMVSLVADMAWRCAKLNPQMGADAPMKTEGIAFIDEVDMHLHPKWQQTVIGSLRAAFPRVQFIVTSHSPQVLSTVNSESIRLIRSEQDPETGEIQSDATIPTMQSRGVASNEVMAELQGIDPIPGVEEAQWLKDYKVLITSSQSSPENENTKQKLKAKILDHFGEQHPEWLECQRLERLQQMKTKLRGKTSAGGSKD

SEQ ID NO: 84295 - protein, 211 aa, Marinobacter sp. CP1
MHQLDRPPAPDCLSNYQHGRDNWGCVTPAAKTEIWASLNVMQGNRCAYCECHIRTEPNSHHAHIEHFRQRSRHPQGTFDWNNLFGSCNRPDSCGKHKDGQAYQPQDLIKADQEDPEYYLRFLSDGQVAPADNLTEQERHRAEETIRIFNLNGSLRQIRETYVMGYRHTAEEFLALADEFDEDEWRPLLQQELQDIAGQPFETAIRHVLKID

SEQ ID NO: 84296 - protein, 271 aa, Shinella sp. GWS1; identical to SEQ ID NO: 84284

SEQ ID NO: 84297 - protein, 347 aa, Shinella sp. GWS1; identical to SEQ ID NO: 84285

SEQ ID NO: 84298 - protein, 542 aa, Vibrio alginolyticus
MMPSHPNRQINKIVSKSESGSFAASAQLVQIYTEGMMGAPVDLEKVHYYRIKCAEQLTSANLRLTSLKLMGYRGFESLEIPFSQKSNVTVLVGNNGSGKSSVLDAIQKSLTHFVSRLSTRSYNGDQLDEFDISNDVAFATVIPEFKVAETSFSFELSLSRPMTEPRKKSKFSELNEIGNLYRLANTEKKELSLPLLASYAVERANDVTTKDIEESDEILSSHTWDKSKAYSKSLTGKADFKLFFRWFKEQVESENDESSDIKVIKAQIESKESEINSSLMKSILSNPDTTETGEILIKQYKEQINELQEQLNEKSNVGNKSLDTVRSAIYKFLPGFSDIKLKRTPLDMVVKKDGREFSVLQLSQGEKSVLALVADIARRLTMLNPSLANPLEGNGLVLIDEIDLHLHPSWQQKIMQRLESTFPNLQFIVTTHSPQVCHTLDSDNIWLLKGGKKFSAPKGVRGAVSSWVLKTLFYVEERPPEDEITQLFNKYKELVYADQYDSVDALTAREVLIDNFGKDYDEIVELDLYIENKEWEKEFEED

SEQ ID NO: 84299 - protein, 257 aa, Vibrio alginolyticus
MRKINKSTESNILTEYAEEFPDSTWDEFRQHNKGESYSTIKTKIFSEQYEICAYCEVGLKDEPIHNKRIEHFVSKSDNSSSHNVHLDWFNLIGVCLGGTDYKNREQYELPENLSCDSHKAHIEGLESIVDKNWNGKVLSPLSIAQEHGLFGFDKATGNLIPDLKACNEQVIEGNVYETTLLLVEETIRVFNLNCERLSAARLKLFHQLQHKLRKARQTRDIGVLERFVASWKRDYPLFFQTSRDAILLDNKLTSKYL

SEQ ID NO: 84300 - protein, 587 aa, Vibrio parahaemolyticus; identical to SEQ ID NO: 83614

SEQ ID NO: 84301 - protein, 260 aa, Vibrio parahaemolyticus; identical to SEQ ID NO: 83615

SEQ ID NO: 84302 - protein, 416 aa, Vibrio parahaemolyticus; identical to SEQ ID NO: 83612

SEQ ID NO: 84303 - protein, 229 aa, Vibrio parahaemolyticus; identical to SEQ ID NO: 82363

SEQ ID NO: 84304 - protein, 441 aa, Vibrio parahaemolyticus
MKISKISLENYKKISSLDLIVPKSNRVICFVGENGCNKTSLISLIYHLIRRNTRNQSPSDAQDIYFGSTSDVNFSQGVNTCISEIQITADGNVYTSRDGIIRNTLKLSDDDKSLFQGKFQFFNPKALTNFYRNDWLNALDLNSDDVVSRNVLLFRPSQRSEVPYFERDPKQAVDQQLAGSSNVIGRRKFPYRVESGIERVENYFIEVLLDYLIDLQNQKPLEPIYGKFMKILSSIDESFSEISISKFPNKGIRSTNLPSLKSLSSGQSDWLVTAISILVQMVEIAPQLAKSVDDISGVVFIDEVDKNYHPKFQEEFMPWLLETFPNIQFVITTHSPYLVRSLDENALVVKLPDGEVLNHDFSYWSIEEVSHTIFGKDLGFTKKVQEELKSFEELLLTNNEEDIKAEYKRLSSKSESLERKVNQLVYTLASPDTLEILHETD

SEQ ID NO: 84305 - protein, 274 aa, Vibrio parahaemolyticus
MRQIDRNSVAVPANLLALYRNQQLYQSELDNISQGRNSAKGTIYGHDDVKNALNALYKNVCFICQKSLATGYEIEHFLPWSTHFPARAYDWNNLHKSCDKCNSMKRKVKYKQRCTTDNKKVLDMLILSPTSTSQIEQLIDFDPHSFEAIDNSNNNTKVAKTVEFLNDTQFILDRNRHWNALTDFLMSEPWSETLRNIKHRYLNFSNITLDIVNNNTESLIGEFCYRIHKGYLSVNSPYNRFSNAVIPNRIRLPIALLKEYSSQYCSSTNQTLPW

SEQ ID NO: 84306 - protein, 414 aa, Vibrio parahaemolyticus
MSGYLTKIKTKIPYSDKEVDINVDGKTLILTGGNGCGKTQLLNYLYEKLHDRIIKKDNNNLQQLENLKVHYEQQIEQGGPANKNYDHWVKQLQDTVQKIEEIKQPPITLSDLEGFVLKHKDFEALLLPFEAGRKSDILKPSSVSSLSSLKEKDRLSVTSPHQKQTASSLFEEFLVTSIANQAFSESKKINNDPVEAERIDKWFQKLEDDLQNLFEDEELRLVFQSDSLSFEIHQPHKEPYTFQSLSSGFSSIMAVYADLITKVSLRLIDPDDLMGIVLIDEIDAHLHVSIQKKILAFLKNAFPKVQFIVTTHSPFVVSSVDDAVIYDLSKLEQVEDLSMYSYESVLEGLFGVLPISSLLQQNIETLAKLLEKHPIDVEEVQSLLDKLPEDEDSLDSESLYFVNSAKLAINKAKR

SEQ ID NO: 84307 - protein, 222 aa, Vibrio parahaemolyticus
MFNVVRNEPAPASLAGGKKYDSEDVWKALKKVFHKKCYICETFEPQDINVEHFVPHKGDENLKYDWKNLYFSCGRCNNIKLAKYDELLDCCDPTIDVVRAIKHLPPSTPYAKKLHIKAQATDDKTKLTAELLDKVFNSEHTPNKAVSSAFLRKRVFEQYNLLLSQLNNYYKPMALQEEKDDAVARIKLLLKPSSPYSAFISWCIMDDDELGPMLHDFIGGAE

SEQ ID NO: 84308 - protein, 422 aa, Pseudomonas syringae pv. actinidiae; identical to SEQ ID NO: 82164

SEQ ID NO: 84309 - protein, 214 aa, Pseudomonas syringae pv. actinidiae; identical to SEQ ID NO: 81071

SEQ ID NO: 84310 - protein, 451 aa, Pseudomonas syringae pv. actinidiae; identical to SEQ ID NO: 82152

SEQ ID NO: 84311 - protein, 189 aa, Pseudomonas syringae pv. actinidiae
MCYYSEIRPDRVGLSFHIEHVENKSQHPQRTFDYNNLAACALDSQSDLEVLKIQGAEVFGGHASGKSKGVDMARFVSCHMPDCSRFFAYLSDGRVVPADGLSLDEVDRAEYTIDLLNLNSPYLQDLRQSWWDELEGLFEDHVDQDMSLHCLAGIDLIPVGASLSQFFSITRNFFGGIAEEILDQEAGRW

SEQ ID NO: 84312 - protein, 514 aa, Streptomyces azureus
MRLLEVEIPRFKNLRDFRVEFDGTSGVSVLVGRNGAGKSNLLEAITLIFRDLDLGVAPSFAYRIRYLIRQYDVEVSAWEQDGRYRVSCSVGGEIVPTGRFTGAAGARYRPRHVFGYYSGPSNRLEDHFIAHQERFYKDLVGGNDKPIRPLFYARNVHSNFVLLAFFLDDDPAVQSLLRDHLGIQGLDSVLFVMQKPSWNSNDGDPRFWNARGTVRGLLDSLYRLSLAPLRLRTRVRTGFNSHIRSEHLFLYLAGLEEVRELASGYESNQEFFKALESTYISELINDVRIRVSLNKADAPLTFRELSEGEQQLLLVLGLMRFTKEEESLFLLDEPDTHLNPAWSVQYKEFLHDFGGLDAGSQVLMATHDPLVVASLTKDEVRILERREDGRIVALEPLEDPRGMGVGALLTSDVYGLRSQLDLETLRKLDRKRELASRESVLTPDEEQELSALGHELRGLGLLLENRDPEFQEFLRAKFRAQSQPQDEVVLSREEIEQNRQEAAEIVRDLFDVDD

SEQ ID NO: 84313 - protein, 284 aa, Streptomyces azureus
MIFIDIEEVGLRLSAAWLESARKVKENLAAASTAKERARIIEENGKLWRDLKADLAAVSNGKCWYCETRDHRSDNAVDHYRPKSSVRGENHPGYWWIAFDYKNFRFACTFCNSWRKGPDGTAGGKSDYFPILVGSQRAKGPDDILSEEVPLLIDPCCATDVALLWFDETGQVSANPHWADIDSAAQEKVDTSTRYYHLDHVYLVEARRAVYAEILKLCDDADKAQRWWIKSKQSSARDRYREAMSDLVRSLKRGREYSAVALCAIRGHRATSEAARVAFEYLSR

SEQ ID NO: 84314 - protein, 474 aa, Vibrio alginolyticus; identical to SEQ ID NO: 83300

SEQ ID NO: 84315 - protein, 209 aa, Vibrio alginolyticus; identical to SEQ ID NO: 83301

SEQ ID NO: 84316 - protein, 336 aa, Pseudomonas syringae pv. aceris; identical to SEQ ID NO: 81082

SEQ ID NO: 84317 - protein, 215 aa, Pseudomonas syringae pv. aceris; identical to SEQ ID NO: 81083

SEQ ID NO: 84318 - protein, 470 aa, Vibrio parahaemolyticus
MGFRVKKVRNHVLWDKENDDRNAFTVIIGNNGCGKTELLIDTCNKYHSYYTSALLDKDTHVASAVHYLREDFSPHNWKTVEREYGHRLPRKLIAASTSQFEKFKANWSVRNDLVPSGFYAYIGSKPYMPSLSPSTRIASKAIQQLLGAEYFEERKHKALVGFLSKFDFGQKLLLKFELTFPNEDLENIQNQSLTEPETQLILKNAYIEHDEMELVELLGYCERIIEAPAFALTVGNQNLNLIHLKGSEQKPFSKLIISRMLRAGLITLSSIQTMKDKSLINDQSTVNIESSAISSLSKRSSGEQCLFLLFMSIISSIEDNALICIDEPEISLHPQWQERFVDILSESFSSYRGCHFLIATHSPLIVSDISAKNCCVYDMATNTLVDAAPYGERSSDYQLATLFHNPGNNNEYLLSQVIEVLDDICQSKEIASETKTKAHWLLSYEPRLPDGDKVKRLLSILEQTLEAFSK

SEQ ID NO: 84319 - protein, 214 aa, Vibrio parahaemolyticus; identical to SEQ ID NO: 81297

SEQ ID NO: 84320 - protein, 409 aa, Vibrio parahaemolyticus; identical to SEQ ID NO: 81298

SEQ ID NO: 84321 - protein, 221 aa, Vibrio parahaemolyticus; identical to SEQ ID NO: 81113

SEQ ID NO: 84322 - protein, 409 aa, Vibrio parahaemolyticus; identical to SEQ ID NO: 81298

SEQ ID NO: 84323 - protein, 221 aa, Vibrio parahaemolyticus; identical to SEQ ID NO: 81113

SEQ ID NO: 84324 - protein, 470 aa, Vibrio parahaemolyticus; identical to SEQ ID NO: 84318

SEQ ID NO: 84325 - protein, 214 aa, Vibrio parahaemolyticus; identical to SEQ ID NO: 81297

SEQ ID NO: 84326 - protein, 409 aa, Vibrio parahaemolyticus; identical to SEQ ID NO: 81298

SEQ ID NO: 84327 - protein, 221 aa, Vibrio parahaemolyticus; identical to SEQ ID NO: 81113

SEQ ID NO: 84328 - protein, 470 aa, Vibrio parahaemolyticus; identical to SEQ ID NO: 84318

SEQ ID NO: 84329 - protein, 214 aa, Vibrio parahaemolyticus; identical to SEQ ID NO: 81297

SEQ ID NO: 84330 - protein, 409 aa, Vibrio parahaemolyticus; identical to SEQ ID NO: 81298

SEQ ID NO: 84331 - protein, 221 aa, Vibrio parahaemolyticus; identical to SEQ ID NO: 81113

SEQ ID NO: 84332 - protein, 470 aa, Vibrio parahaemolyticus; identical to SEQ ID NO: 81302

SEQ ID NO: 84333 - protein, 214 aa, Vibrio parahaemolyticus; identical to SEQ ID NO: 81297

SEQ ID NO: 84334 - protein, 409 aa, Vibrio parahaemolyticus; identical to SEQ ID NO: 81298

SEQ ID NO: 84335 - protein, 221 aa, Vibrio parahaemolyticus; identical to SEQ ID NO: 81113

SEQ ID NO: 84336 - protein, 470 aa, Vibrio parahaemolyticus; identical to SEQ ID NO: 84318

SEQ ID NO: 84337 - protein, 214 aa, Vibrio parahaemolyticus; identical to SEQ ID NO: 81297

SEQ ID NO: 84338 - protein, 409 aa, Vibrio parahaemolyticus; identical to SEQ ID NO: 81298

SEQ ID NO: 84339 - protein, 221 aa, Vibrio parahaemolyticus; identical to SEQ ID NO: 81113

SEQ ID NO: 84340 - protein, 470 aa, Vibrio parahaemolyticus; identical to SEQ ID NO: 84318

SEQ ID NO: 84341 - protein, 214 aa, Vibrio parahaemolyticus; identical to SEQ ID NO: 81297

SEQ ID NO: 84342 - protein, 409 aa, Vibrio parahaemolyticus; identical to SEQ ID NO: 81298

SEQ ID NO: 84343 - protein, 221 aa, Vibrio parahaemolyticus; identical to SEQ ID NO: 81113

SEQ ID NO: 84344 - protein, 470 aa, Vibrio parahaemolyticus; identical to SEQ ID NO: 81302

SEQ ID NO: 84345 - protein, 214 aa, Vibrio parahaemolyticus; identical to SEQ ID NO: 81297

SEQ ID NO: 84346 - protein, 409 aa, Vibrio parahaemolyticus; identical to SEQ ID NO: 81298

SEQ ID NO: 84347 - protein, 221 aa, Vibrio parahaemolyticus; identical to SEQ ID NO: 81113

SEQ ID NO: 84348 - protein, 470 aa, Vibrio parahaemolyticus; identical to SEQ ID NO: 81302

SEQ ID NO: 84349 - protein, 214 aa, Vibrio parahaemolyticus; identical to SEQ ID NO: 81297

SEQ ID NO: 84350 - protein, 465 aa, Salmonella enterica subsp. enterica serovar Mbandaka; identical to SEQ ID NO: 82624

SEQ ID NO: 84351 - protein, 198 aa, Salmonella enterica subsp. enterica serovar Mbandaka; identical to SEQ ID NO: 82641

SEQ ID NO: 84352 - protein, 420 aa, Leptotrichia sp. oral taxon 212
MKIRNLYITEYKGLRDITLNFENNNNILDLVVLAGANGSGKTRVLESIYYYFEMFRSKAVSLELFYEKNENEVLENLMSTEGLTEIEKEMQKDIEYADCLRNIRYYNQDYKEGGNQNINSKIISRSFENLKIFPKIIYVPTEINFQKIEIASPMLVQEYKFLNIINSNLIKDVPSYIATRIVEMANEQENIPMGEIRNVVFREINEIFEILDLDIKVSEISKDAKSIPIFTNSSGDKFDINELSSGEKQLFLRTLAIKMLNPENSIILIDEPELSLHPKWQQRIVDVYRKIGKNNQIIIATHSPHILGSVKKKNIMLLDKNDDGEIIVKTGHELYNSYGQPTDRVLKDIMGLETTRDPKVFKLLEEAGELVDKNEYESEEFKTKYKELRDILGKKDEDLLLMDMDIQIRKKRGFKNAESK

SEQ ID NO: 84353 - protein, 220 aa, Leptotrichia sp. oral taxon 212
MLKVNKKDEPQFFTEFKRKKSPKNWDELDKPENHYIKKELKYHMLKNEQNIGDKSYCPYCEIILFSENIDLKEDKECHIEHIKPKSKFGNLTFDYRNFLISCSENKTCGHSKQSIWNDKLFINPVEENPEEYFSYNMRTGKIIPKKENGLDYDKAIKTIEILNLNEDNLCEYRKTYIINIINTIRKLNDDEKIEIINYFDEFPTLKKFLIENIGALKEII

SEQ ID NO: 84354 - protein, 548 aa, Vibrio hepatarius
MKLDKLWIGEFKNLKDIEIDFDQNELVTVVIGWNGAGKSNVIEALVIIFRDLDLHKAPSFSYKLEYLCRGNRVIVEAKETAVKKDQYKILVHVEGSPETVITDKHTDFFKDETRQFLPSNVFGYYSGPSDRLATHFYDHQRKFRDQLLYPEKHGLNETTLPLRPLFYAQKVHSNFVLLSFFLGADEKVKKFLKEKLFIEGIESVLFVLNKPDWTSKQGDSRFWNATGVVRPFLDRLFFASLAPMRRTMKVPHPMKKNADNVEALFLYLKDLEALKQVGDKTSDKDFFKLLESIYFSNLIHEVRIRVKVKNKNGSDESLTFRELSEGEQQLITVLGLLRFTRDDESLFLLDEPDTHLNPAWSMEYINFLKEVAGFNLDANKEKADSGAVDNSHIVLATHDPIVISTLKQEQIKIMKRDEDSLQVFAASPLYEPKGMGFSGILMSDMFGLRSDLDPKTLEKLDEHAILLANEERTEEEEVRYKELQEQLDKSGFIDAYSDPYFSAFVKAWGRKHGDKLFTQTFLSDRDRQQLADMTDDILAELDAEEAGE

SEQ ID NO: 84355 - protein, 274 aa, Vibrio hepatarius
MDAAEIATNAKADEKGWDAQKRAEQIAIEKVKARKKAISAKSNVWSLLSDILAKRSYGKCWYCESNELRSDNPIDHFRPKGKVAECPDHPGYWWLAFEWSNYRYACTYCNSRRVEVETAGGKQDHFPVFTPPDWNRSKDDNNAEKPKLLDPSDEDDYKLLTFNKNGEACPNCSDEDSEDYQKAKESIDKYHLNHEPTKKARKAIRQRIKQIIANTNKLLEDGVDMKSIQIKSNKKELIKMIRPSCTTTKFNTAAKLYLREFEDNAWVKEILDRD

SEQ ID NO: 84356 - protein, 415 aa, Vibrio xuii
MSGYLTKIKTKIPYSDKEVDIDVNGKTLILTGGNGCGKTQLLSYVYEKLIARVIERNNTTIQQLQQNIVGYEQAIKRDGPTNRSYDSWVHHMEDAKKQIEELENPPINLSDLEDFVLKYKEFRAVLLQFEAGRKSDILKPSSVAPIDSLKEKDRNTVSRPHQQKTTSSIFEEFLITSIANQAFSESKKINNNPEEAERIDKWFNKLEADLQNLFEDDELKLVFKSDSFSFKIHQPNKEPYTFQTLSSGFSSIMAVYADLIAKVSLRSIDPEELTGVVMIDEIDAHLHVSLQKKILSFLTRAFPKVQFIVTTHSPFVVSSVDDAVIYDLSKLEQVEDLSMYSYEAVLEGLFGVLPISNLLQQNIEALAKLLEKHPINLDEVQSLLDKLPQDEDSLDSESLYFVNSAKLAINKAKRQ

SEQ ID NO: 84357 - protein, 222 aa, Vibrio xuii
MFNVVRNEPAPASLAGKRKYDSEDVWKALNKVFHKKCYICETSEPQDINVEHFVPHEGDEDLKFNWNNLYFSCGRCNNIKLAKYDDLLDCCDPDTDVVRAVKHLPPSTPYAKQLQIEAQHDDYKTKLTAELLDKVFNSEHTPNKAVSASFLRKRVFDQYNLLLKQLNNYYDPVALPEEKASAVERIKLLLKATSPYSAFISWCIMGDEELGPMLHDFIGIAE

SEQ ID NO: 84358 - protein, 405 aa, Pseudomonas coronafaciens pv. porri
MIVSITGKLPSSQRIFNVDLQGRNLLIVGGNGSGKTSLLSSLHAQLRIQIIEQGLKHKSDYERNIAVAKNSLEADLLHPNMRSQYLDSLNSSETALKRITHPYTISYNDSDSFIQNYSKKTAVVSFVPAHRKSNIESVTSATSVKKDISQLSQEENLGNKLEQHLVNLKVRSALGSQIGRDEAVLRKIDKWFEDFAVSLRYLFEDDTIRLKFDPDTLKFQLAQEGKLDFTFQNLSSGYSAIFDIYADLLIRTEYLDITPSQLTGILLIDEIDVHLHVSLQRKILPFLAGSFPNVQIIATTHSPFVVTSTTDTLIYDLNTGSENEDLSMFSIEAVVEGLLGVSPVSENLKSIITELTAITSENNFDLSQAEEILEKVQPYTDHIDDESRMFYEIAVNRIIKSRNGA

SEQ ID NO: 84359 - protein, 218 aa, Pseudomonas coronafaciens pv. porri
MFNVNRSSKAPASLLKRTSWTEADVIYALKEDFHDKCYICETKSPYINVEHFHAHLNDVSKMYDWNNLFYACARCNNIKRHLFNNLIDCTNPDTDALRLIKHSPPLTPYSGEVLITPTDDDPKTIQTANLIRKVYTDDNTGIKTVTGAALRKRIYRRYAKLVEQLNIYDDEDSLQSEKDAALERIRNLMSRNQEYSAFLRWAILVSPELLSVVGDSID

SEQ ID NO: 84360 - protein, 405 aa, Pseudomonas coronafaciens pv. porri; identical to SEQ ID NO: 84358

SEQ ID NO: 84361 - protein, 218 aa, Pseudomonas coronafaciens pv. porri; identical to SEQ ID NO: 84359

SEQ ID NO: 84362 - protein, 430 aa, Pseudomonas stutzeri
MLNSLKLEGIGPAERLAVDFKPRLNFLTGDNGLGKSFVLDIAWWSLTRTWARGVMAAPRSDAEQSNIDYSYTGSAAPFTYKSKFDHQSQQWSVKQGRPAVPGVVIYAGVDGSFSVWDPARNYWKGEKEGAVTPDRPRSFDFSPDEVWKGLLSSDGKTQLCNGLISDWVLWQEGRKEAFDDLTKVLDALSPSGLEKLLPGEPMRVGSSVKDIPSLRMPYGQDVPLTHASAGMRRISALAYLLVWTWREHQLACKQYRVNPAKEIIFLIDEIECHLHPQWQRRIVPALLNVMRALTGSRDVPVQLLAATHSPLVLASVEPEFDLDRDCIWDFDLVEGQVKAALYPYSRKGSVNAWLTSSVFDLKEPASVDAEQALEKARTFLREVVATQQPLTAPQKQALEQIDAELRASLSDVDSFWIRWSQFREQRMGEA

SEQ ID NO: 84363 - protein, 215 aa, Pseudomonas stutzeri
MIRVELADEPLDFDAKVRQPGLRAIAELAGEPGLPKRKGRPRKAIANSREQIPADKFPSYWTESLPELRTAYGHICSYVCVYIEPVTGAASVDHMLPKSLSWQEAYEWRNYRLACSLMNSRKNDYRDVLDPFEIDDDWFQIELVGYQVIPRTDLDPAIKTCVQATIDRLKLNDRDCLTVREDYATDYFQGDISLGYLRRRAPLLAREIERQGRAL

SEQ ID NO: 84364 - protein, 416 aa, Planktothricoides sp. SR001
MEINRLRLRNFRVFEDAEFHFNPGMNLIVGINGAGKSTVLDALRIAFSKILPNFTVSDSKNNSESFKASDIKIGYKTLEFDVDFQASGIPFECNIWFAKSDNFKIKPDSEHILDTIKNAENQPLVVYFATQRSIITVKKYKEKDMYKMASGDPSAAFPEALKPRNLRLTEFTDWYLAQNALLNENYSPAKRSIEALNKAVTSFLDQFTNLRVVGKSDLVLDKDGLTLNINQLSDGERGLLALILDLVKRLLQANPDLEDPLKDGKAVVLIDELDLHLHPRWQRMVVKKLTEIFPSCQFIATTHSPQIIGEVEPTGLTLLQKEGDRILVKQKGLQSFGLDSSWILKHLMETEPRNFRVQSQINSIEDALEEGDLDSARNKLDALKDMIYGRDDQVIRLEASINNLEALADEVDSEEE

SEQ ID NO: 84365 - protein, 238 aa, Planktothricoides sp. SR001
MKWIQKKNEPNELKEWRSRNSNDINFGYSLMRQDHAVVKAVTHSLLEEQGWLCAYTGLIIDEGKCHIEHLKPQTQCTPAETVLYSNIVACYPEPNIGYKLPYGAHKKDHWPAPNEQHLFVSPLDPSCQSRFIFTLRGQIKSKDGDDAAAMTITKLGLDHSELEDKRKAAIQGTIGLTNNLSLKDARRRLRKLKTQQGGKLDEFCFVLVQAVEKHISRLEAIAKSKAQKKAKKSKGNNK

SEQ ID NO: 84366 - protein, 410 aa, Cronobacter dublinensis subsp. dublinensis LMG 23823
MLTAINEISIPIPYTAKKAELSLNGKNLIITGGNGSGKTSFISSIYEFLKDGLDQPNNNNKKHLEQQLRNYEDNLKQGGRDSTHYSWYEQEVIKIKKRLHALDDFHITTSTKDSANTRSLLRFHKALREAAITAPQFVPRLSALVEENAHFSNEKDGDNIFENYLISLKTSQSYAISFDKDEEKATKIQNWFNKIENDLQGLFEDTELKLRFDSTEGKFYLHQNMKDKFTFQTLSSGYSSILRIYADLIMRIEMWELTPESIEGIVFIDEIDAHLHVSLQKQILRFFSNSFPNIQFIVTTHSPFVVSSVTDAVIYDLSSNQQIVDVSSYSNNVILQELFGVNPISIVLSDKLEKIENIITRLDNNNIETALNIIHSLASSEESMDTEASAFVDYAKLKIIKFKKENAQEK

SEQ ID NO: 84367 - protein, 217 aa, Cronobacter dublinensis subsp. dublinensis LMG 23823
MFRVNRTYPAPVSLSRKLRYDGPDVHEALQECFFGKCYICENKDPLDINIEHFVSRKIDDEKSYDWDNLYLSCGRCNNIKLAKHDELLDCCNEAVWNRIKLLPGFSAKTKKVTVEPLFHDNKTITTADLLEKVYNSDHTINKRLTSAALRSQITKTTQKLIRNIIEYYEDDTPNDRKLYLIEKIKVMIRRDAKFSAFCRWIVLDDAELCEILEPFMD

SEQ ID NO: 84368 - protein, 582 aa, Cronobacter condimenti 1330
MQLLRIRIPAFRNLRDLDIAFDTHLQPSGSAINALPKPIRSHVLIGQNGTGKSNLIEGLITIFRDVDLDREAAFNYTLEYSIHGHVVRIEADSAKQKRPYVWVDDKAASQGFLLKNRQLLPAHIFAYYSGRNERIEALFHEHERRFNQRQEITTNEVLSEQLLENFTGTDADIRAIEEAKRRREVRLKHVGDDRLRRLFYCRGGHSQLVLLACLLSDDPVFQKVLKNLHIESLESALFVLKEPHRLREKRRNGKFEVQELNEGDPRFWYARSNVVSEFLDKLWKVAWAPIEQETTKHIDFRGRTEKQNQLYLFVSSQEKLKQLGESIGSTDSFFRYAEGAYIGDLIDEIRIVVKKRDEHGGKVSFTHLSEGELQMLTVLGLMRIARDDNCLFLLDEPDTHLNPIWKLRYFDDIEGVLSSDDTALLQSESQILITTHDPMMVGSLKREQVHILRRDGNTTLVDSPDEHPQGMGVTGLLKSELFGLSSTLDIETERRLFRRNELFALDERTHEQDDELRRLSSELADLGFSNADFKDPFYAKFVRRMAKHTKFHKPVLTPEEQAEQDTIADSIIDEILREDDGQ

SEQ ID NO: 84369 - protein, 283 aa, Cronobacter condimenti 1330
MIFIDLENKLPTDMDLHPDVRWSEADWNAWQKESVRLIGELAKLNEAGQIKERNELIDKQSGHWGKLKPWLLALSDGKCWFTEARDIASHLDVEHFRPKKASRNVKGPERDGYWWLAFDYMNFRIAGTVPNRKKGAWFPLRYGSPCSSYAHRCEGDEIPHFIDPTNAYDVTLLAFDEEGKAVPAPGISRWDNIRVRRTVDRLKLSEHQALAEERRKVWQRTTKLINKYFQALASTRTSAVAREQVKAAARDILCLTKPETELSSVAKWCVRLRNDPQLSRLVG

SEQ ID NO: 84370 - protein, 420 aa, Anabaena sp. wa102
MLKELHLRSVGPSPQFDVEFADRLNIFTGDNGLGKSFLLDVAWWVLTGNWVEQPAYPQRNTETPPEIISQIITLDDDEGKNYSFKFNFSKQKWQDVNVPFHGVPLLKGIIIFVRVDGSFSIFDPARNDEDGYDFTPDTLWNGLKLKGKVISNGLIQDWVTWQNQPQKTPFQLLSNVIKQLAPHPDEWIEIGEPTRVSVDDVRDIPTINLPYGNIPITQASAGMKRILGLAYLLVWTWYEHEKASELKQQEPMNQIVLLIDEIESHLHPRWQRAILPSILSVVNQLKSNITIQALVTTHSPLVLASLEPIFDQEQDKLFLFELQGKEAELNEMFWTKQGDTVGWLTSEIFGLKQARSQESETAIEAAEAWMRNDNMNTFPEHLRTQSQIHQELQRLLPGHDPFWPRWIVTAEKRNSRLSNL

SEQ ID NO: 84371 - protein, 195 aa, Anabaena sp. wa102
MLKFIPPPEPENFDAKARQPGNNWLEKNPDKKRLKDYWSNFKSDLADGFGNLCGYTVMYEPVGTVDHFLSCENHRHLAYEWNNYRFASGWINSSKGTLDNQILDPFEVEDDWFEILLPSLQLVITDAVPEEKRQKAEFTLQRLPLQDDERVLRQRREWYKLYIDGDLTLTGLEKKAPLIARAIRKQQANSPLENV

SEQ ID NO: 84372 - protein, 443 aa, Anabaena sp. wa102
MHIQKVIIKNFRCFEHLEVNLDPDINIFVGNNGSGKSALLDGIAAAMFASYIRCIQLIESIRYQQTNPFSQEDFSVKQKENQQKHYAEFTVSTTDFLDWRIVYEKKFIYNKEDISTAVTGISLSEEANKEFFAELQNKCDTLKNDPKSELSVIGYYKSDRNLTNLEYQENISNLPLDRFDSLKNALSATANFTDLATWFFWREYEELREGKNQKDINFELPDLKQIRKAISTIIAPNARVYFSGATSAKLMVEWTMETGEKRELLLSQLSAGYRNMLALVMDFARRLAQANPHMENPLSAEAILMIDELDLHLHPTWQQNIIPDLKKVFPNTQIIATTHSPEVVTTVKQNQVKILEDYQIKECPSPTKGMKSSDIVRYVLGLSDLRPDTEESRTLTRLFEAIDNGQLEEAKRLRQELQHWESYDPDMTRADMQIRKLERRNAV

SEQ ID NO: 84373 - protein, 247 aa, Anabaena sp. wa102
MKKVLKSPEPEELKKYKGRFSLQIKRWSDLKKNRETLNAIRDTLATDQKGLCAYCEMSLHEKNRSVEHFIPRNQSTKENNHDLDWQNMLAICLPPGGMKDEDLENPQLLKDLPCCGKKKDGDIPDGRLLNPLNLPTLRLFKFSSKDGEIRPDKKACEDSGIPIENVQFTIDTLELNVQRLKDQRLVVIDEIEKELDDETIDINDLEEKVAAEYFGNGTDNWHPFFTTIRWVLGAGAERHLMNIYYSG

SEQ ID NO: 84374 - protein, 452 aa, Anabaena sp. wa102
MRIEELHLQNFRGFRELKLTLPPDLAVFIGVNGSGKSSILDSIAILLSQFVADVSVHYESRLYIEEDDIKITSNEVFLSTRVEVDSNNKLWWEVSQDRKRGMQSTKGDLFNYLLERLLNELIPIHDDERILQINNKNDLILPIIVFYHTDRILIKSSAIKDMSEEERENTYDNNRLIGYQTAFSGNINDFRDFLYWFKEEEEYENEVRLTQDTNFRNPRLQIIRKVLETFLENFPNAEFSDLHIVRANSKREGGIRRLSKPSLVIKKNGENFKLDQLSDGEKTLLMIVVDIARRLAILNPSINNPAELLEKGTGIILIDEIDLHLHPQWQRIVIPSFRKTFPNCQFIVTTHSPQVLSEVNRENVFILEDSEIVELTPHTFGRDSNSILSEVMGVEKRPVKMQERIDKCFEMIDNDNLEEAKLELQKLSESLGNNDPDMIQAYTLIDFLNRVE

SEQ ID NO: 84375 - protein, 212 aa, Anabaena sp. wa102
MKRIIKGYEPRCLLQYRQINGANYDGYSPKKSLKEALLTEQVYICCYCVRRISEDNMEIEHCEPQSKYPELQINYKNLLASCLGNRRSKKDNQHCNPRKGDAEITINPCDSTKNCENYIKYSSTGKIFSDDETINHELNEILNLNLQTLKDNRQTKLFTLINALNKKFPNKTWSKEAIKKKLEELSSKDVEGKYTEYVQYIVWYLSKRLNNP

SEQ ID NO: 84376 - protein, 457 aa, Escherichia coli
MKRLYYTHHDSRTLKLAIEGDVSDNANIFTVIVGKNGVGKSRLLSQIAKDCIQDVHFLKTFNPLFDREITPKLIAVSTSPFDKFPAGRRSLNHQRKENNYRYVGMRGEGPFGVSNAVSLLSSAARGWLEKLAYSENPANLLDVFHSIDFEPHIEFVFKPTYNGPDTPDYNFIGVYSDEILTEVKELYLKYNIKIDRKNIESLLKLNSESRHDIYEALVEINRFEPERRAVTLSVDFTNGETLVGSTYANNYFSRSILKLMNAGFMRLMDMRLIKKSYGPMSLKRASSGEQCLLVMLLGIAGHITDGSIILIDEPEISLHPRWQEEFIIMLTKAFLTYSGCQFIIATHSPQIISNLPNKGCYITSLSKSYLYKAKYFSNRSADYQLAELFDAPGIMNEYIARLAFNLLSKVKTAKLVTDDNWRELKQLQLLLENVNSNDPINELVNSVSQVCEIYAKN

SEQ ID NO: 84377 - protein, 211 aa, Escherichia coli; identical to SEQ ID NO: 81031

SEQ ID NO: 84378 - protein, 457 aa, Escherichia coli
MKRLYYTHHDSRTLKLAIEGDVSDNANIFTVIVGKNGVGKSRLLSQIAKDCIQDVHFLKTFNPLFDREITPKLIAVSTSPFDKFPPGRRSLNHQRKENNYRYVGMRGEGPFGVSNAVSLLSSAARGWLEKLAYSENPANLLDVFHSIDFEPHIEFVFKPTYNGPDTPDYNFIGVYSDEILTEVKELYLKYNIKIDRKNIESLLKLNSESRHDIYEALVEINRFEPERRAVTLSVDFTNGETLVGSTYANNYFSRSILKLMNAGFMRLMDMRLIKKSYGPMSLKRASSGEQCLLVMLLGIAGHITDGSIILIDEPEISLHPRWQEEFIIMLTKAFLTYSGCQFIIATHSPQIISNLPNKGCYITSLSKSYLYKAKYFSNRSADYQLAELFDAPGIMNEYIARLAFNLLSKVKTAKLVTDDNWRELKQLQLLLENVNSNDPINELVNSVSQVCEIYAKN

SEQ ID NO: 84379 - protein, 211 aa, Escherichia coli; identical to SEQ ID NO: 81031

SEQ ID NO: 84380 - protein, 457 aa, Escherichia coli; identical to SEQ ID NO: 84376

SEQ ID NO: 84381 - protein, 211 aa, Escherichia coli; identical to SEQ ID NO: 81031

SEQ ID NO: 84382 - protein, 457 aa, Escherichia coli; identical to SEQ ID NO: 81030

SEQ ID NO: 84383 - protein, 211 aa, Escherichia coli; identical to SEQ ID NO: 81031

SEQ ID NO: 84384 - protein, 457 aa, Escherichia coli; identical to SEQ ID NO: 84378

SEQ ID NO: 84385 - protein, 211 aa, Escherichia coli; identical to SEQ ID NO: 81031

SEQ ID NO: 84386 - protein, 457 aa, Escherichia coli; identical to SEQ ID NO: 81030

SEQ ID NO: 84387 - protein, 211 aa, Escherichia coli; identical to SEQ ID NO: 81031

SEQ ID NO: 84388 - protein, 457 aa, Escherichia coli; identical to SEQ ID NO: 84378

SEQ ID NO: 84389 - protein, 211 aa, Escherichia coli; identical to SEQ ID NO: 81031

SEQ ID NO: 84390 - protein, 458 aa, Streptomyces pristinaespiralis
MYVAGLRVDGVRGFHGPRACDLDFTRPAGGYAGWTVMAGRNGSGKTTLLRMIALTLTGERRAHQLEPELEGYLTHGATRGSAVAKVLANRSADTMAQDGNELVEARLDWRPEQDGSLFDELVEDYEPPTEVVFSAPRPLASALWSSAPPPGWFCAAYGPFRRLTGTGLYERTPQQLDRAAALRTLFEEQSALTEAFDWLLSLHLRTLEERPGIGQLKAWVLRLLNDGLLPDRYHIEDVDSEGMWLRRQGDSGPEGARTELRRMSDGQRTVIALVLDIVRQMHAAYGDLGFEEHVGGRIVLPHPGVVLIDEIDAHLHMTWQKNIGQWLTTHFPAIQFIVTTHSPYICQAADPGGLIRLPGSGEQKPPQVVDGELYGRIVFGTGDDAALSDLFGLDSPYSDEARELRSKLAELEYDVLLGRADAVKTEEYLRLRDRLSSSPVARVDEVMERYRLSRERDA

SEQ ID NO: 84391 - protein, 264 aa, Streptomyces pristinaespiralis; identical to SEQ ID NO: 81117

SEQ ID NO: 84392 - protein, 423 aa, Bacillus sp. FJAT-22090
MIKKLVIEDWNQFERIDLELHPRLTIITGANGSGKSTIIRLISRLIGWSYAETGVPATSQKVNSPFLSGISLDRLLESFKEDYQKVNGNGINIGKLETENGGYKLLVPKQASQASYSVNFSSYDTPEALKGVSIPSHRLPFTYTALKSIPVKPASQTEAYILYAESLKKRAIPGSYYNPNEDSPTLHMKSTLMSLAVFGKGNDHVTSNTEAYKLFRDFVKILRVLLPETLGFNDINIKDGELLLLTNTGEFLLDSVSGGIGAIIDLAWQLYMFGDMESNKFVALIDEVENHLHPSMQRNLLPKLLEAFPEVQFIVTTHSPFIISSVIESTVYAFKYNENNKVDSHKLDFEYKAANAMEILRDVLGVPVTLPIWIEEKVNSIIDRYRGVELTPESYVQLKNDLKEVGLNEHMPQALGLLQGGNM

SEQ ID NO: 84393 - protein, 218 aa, Bacillus sp. FJAT-22090
MIRLKKLEKPDILVQKGEEWKDELMTYVNSGKDIPKNIQGRYAHKEIKKTLLEETKEKCAYCESVITGIDYGDIEHIEPKKRVPKKTFEWINLTISCGKCNQNKGQYYNENLSLINPYIDKPEEEIIFLGPYPSARSDRALMTVKQLKLDRVELLERRTEYIKKIQPLINLYLNTYDKEFQKIIYQDLIEYTKEKHEYSSMMRCILATIKLPFEMQIS

SEQ ID NO: 84394 - protein, 548 aa, Streptomyces rimosus subsp. rimosus
MQLLQLRLPDYRGLRDFTLDLEDAVDQGQAIAVLIGPNGGGKSRVLHALAELFGALYRCALGHSGRADFGYEVRYRLRGTTVDIVQPSAEAEPAMWVTGAAGSRDETPRHDWFHHLPDHVFGYQVHGRVPWGSEFERHTHFAEAELARWREQWMESWFAWQDRPENEDGVWSEQLELPIVCPLYTPGFLCTPDWLPLVLLSLAAQWADIFGDYLREQARVDGVVSAVLHLRAPKSVGEELSALPYWGLGGPPRALFAEVAASGRFGPVPDPDPLYSAGTPDDGFVLTMSSPEDVLAFRNLFDSDLSMFGLLSTLQMAGYLTVDVRVRKANGAVVRADQFSSGEQQILTVLGLLRLQRGQESLFLLDEPDAHFHPEWSRRWYSSVQRMLDDGQRSQFIAATHEPLLVSNMLRRQIRVLDTDADGRTMALVPGTAPRGQGAGGLLTSDLFRLRSQLDEHTQDLIDTQYRLIPVAEDDPEARRELQEVTDRLDGLGFATGRRDKVLSSFLAELHRRRAELIERARNGSTVTGEELEAAARVLFDERFSRGV

SEQ ID NO: 84395 - protein, 394 aa, Streptomyces rimosus subsp. rimosus
MIPVRHVDNSGLTAPQTWADRAAKELKKLQEDAEDADKKLTFREMWREDAIRDRLIALMDKCWYCETGFVRSPYHVDHYRPKSVVVGEAEHRGYWWLAYDPANYRLSCHHCNSGGARYGDQSAGTGKGARFPLLGQRASEGGSLDSELPVLLDPVVAEDAGLMGFDGQGHARRRPERPYSNDEVAQGLCRVDETIRMLALNSDRLVESRSTLIKRVDGLVRLYLANVGNASVALYARTEIDDLTRTAAEWSAAASAAERLAFLAHDRSGNESPSEGGASGDVAEGTSGGSEPPAAAVTSHRVDLSTLVAALPPEAFSAGEIALTGRGKRGPARATLLADGRIICFRRPWNTPTSAARMAAGDDLVDGWTFWSLTVDGTPRTLSDLRDSLTTKDS

SEQ ID NO: 84396 - protein, 559 aa, Streptomyces sp. XY152
MPARSGPAEGDLMQLLQLRLPDYRGLQDFTLDLESAVDKGQAIAVLIGPNGGGKSRILHALAELFGALYRCALGNSGRTDFGYEVRYRLRDTTVEIVQPSAEADPVMWVTDAAGSRDETPRHDWLRHLPDHVFGYQVHGRVPWGSEFERHVHFAEAELARWREQWTESWFAWQDRPENEEGVWSEHLELPITCPLYAPGFLCTPDWLPLVLLSLAAQWADVFGDYLREQARMDGVVSATLHLRAPASVEAELSALPYWGLGGPPRALFTEAAASGRFGPVPESDPLYSAGTPDDGFALTMSSPEDVLAFRNLFDSDLSMFGLLSTLQMAGYLTVDVSVRKVNGAVVRADQLSSGEQQILTVLGLLRLQRGQESLFLLDEPNAHFHPEWSRRWYSSVQSMLGDGQRSQFIAATHEPLLISNMLRQQIRVLETDADGRTTALVPDTDPRGQGAGGLLTSDLFRLRSQLDEYTQDLIDTQYHLIPVAEDDPEARRELQEVTDRLDGLGFATVRRDRVLSSFLAELHRRRTELIERARNGTVSGEELEATARILFDERFSRGV

SEQ ID NO: 84397 - protein, 394 aa, Streptomyces sp. XY152
MIPVRHVDITGLAAPQRWADRAAKELEKLQEDAEDADKELSFREMWREDAIRNQLIALMDKCWYCETFFDRSPYIVDHYRPKSAIVGEAKHRGYWWLAYDPTNYRLTCHYCNSGGARYGNRSAGSGKGARFPLLGQRASAGESLEGELPVLLDPVVAEDVDLVGFDRQGYIRRRPERLHSDEEVAHDLCRVDETIRILALNADRLTERRSALIDKVKGLVELYLIRRDDAVVARYARNEIDDLTRTTAEWSAAAAAAERLALLAYGRSGDEVPPRGGAVGNIAERASGGTEPPAATATAHRVDLRTLVAALPPEAFSAGGITLTGRSKRGPVSATLLANGIIMCFRQPLATPTSAARMATGDEKADGWTFWSLTVDGTTRTLSDLRDFLITQSG

SEQ ID NO: 84398 - protein, 441 aa, Streptomyces sp. NRRL F-4707
MPGTGGWTVLAGRNGSGKSSVLQVLALALTGPDAALRLNLDFTGWITRGAETGRAVVSVLPHPEVDPFTQTTPSTAAAPGEEIRLELAWRAAHVPGMEGDWPRRPYVAMDSWFDPASALTARSGPWSPVMPGWFCAGYGPFRRLTGPMRRAYNTKAPIPAPLATLFHEDAALTESVSWMVDLHHRSLQELSAARRSESVPEMPATLLLNTVMGLLGDGLLPDEYRLNGVSADGLLVSLRGSDESFPLREMSDGFRTVAALVLDIARQIHATYGHLETERTRSGHLTVLQPGVVLIDEVDAHLHVTWQRRIGAWLCDHFPNIQFIVTTHSPYVCQAADEGALIRLPGPDADEPPVVVDQDLYRRVVFGSADDAALSELFGLDTPYSGRAERHRRRLVSLERKVYAGTATPQEVNEYEELSRLLTSSVQSRVAEVAARLEQEP

SEQ ID NO: 84399 - protein, 234 aa, Streptomyces sp. NRRL F-4707
MHRHPAPVGTQNLLRRWTGRVRAAGATTEAARTEWTAAKAPRRHVKTLLESMAHGAVRCMYCDDSRGTDIDHFQPLAMAPLRVFVWDNHLLACSFCNSNAKRDEFPVDPEGACLLVDPTTDDPADHLFLMLRSGEYGYHTAKGEHTIRVFGLNRPDLVMGRKDAFFLACSALRDWHRLRQEGDPEADRVAQALRDSPFVDVVHSITRLAPGLAATVVGERTVPAVGQWRSVYGG

SEQ ID NO: 84400 - protein, 475 aa, Streptomyces sp. MMG1121
MTPPSERGRGQKGGQVYVTGIGFSNVRGFTGARTVDELPLSASHDGDGGSWTVLAGRNGSGKSTFLRALALTVAGPQVARTLVQDFSGWITTGEQSAWTQVYVRPDYSVDRLVGRGGAPIDRIVLGLDWAVPEAQAGGPRYGASPSQPRLSPYDGEEYGWKGAGRGPWADNPQGWFCAAYGPFRRLVGGSGEAQRLMLAPGPAGRMASLFHEDASLAEGVSWLKELHLRSFEEQEGARELLETVLELLSDGLLPDGYRALRVSADGLWVAPAGNADRAYPLREMSDGFRTVASLVLDIVRQLQTSYGALDAGTDEGGHPVVRMPGVVIIDEVDAHLHVTWQRRIGTWLRSHFPRIQFIVTSHSPYICQAADPGGLIRLPGPQEDRGPEVVDDGLHRRVVYGSGDDAVLSELFGLETPYSDEAERQRVRLVQLERKVFRDEADDTELREYRELTELLTSSLSTRVDEVAARLGGSR

SEQ ID NO: 84401 - protein, 225 aa, Streptomyces sp. MMG1121
MLARCTGSVVKKGADSAAATSVWGSSRAAKREIRARLHRMAPAIQRCMYCLDSQGTDIDHFQPKALAPLRTFDWLNHLLACSYCNSNVKREEYPCDEETGECLLLDPSTDDPASHLALLPASGTYEGLTAKGRKTIVVFDLNREVLRRGRVRMYRLCRDLLPVWHAKVLLGDLEGAGETAMTLREEPFGDVLRALCRRAHTPAVAELTYGRMLGPALHAWRHQEA

SEQ ID NO: 84402 - protein, 444 aa, Saccharothrix sp. NRRL B-16348
MYISQVRLRNVKGFHGAREVDLKLTAPGWTVIAGRNGSGKTSLLRAIALAVSGPAVARNLVPDFENWVTAGQREGVVQVQFTHDRRVERFGKGRPPEGRLWAGLGWTMPDDESRPTHRGLQPSLKEKLEGSKTAALRGPWQDNPTGWFCAAYGPFRRLVGGAGEAQRLMLSHGPVSRLASLFHEDASLAEGVGWLIEQHLRSLERRPGAEELKTVALGVLSDGLLPDDYRIEGVDSDGLWVVSGGHRFPLREMSDGYRTVAALVVDLIKQIHGSYGDLKTTPTAHGLALTAPGVVIIDEVDAHLHVSWQKRIGGWLKEHFPNIQFIVTTHSPYLCQAADPGGLIRLPGPDQQEPPRVVDQGLYERIVYGSGDDAVLSELFGLDTPYSERAQQLRAELVELEVAVIGGTAGARAVRRYEELRALLTSSPVARTREVSARLERDET

SEQ ID NO: 84403 - protein, 238 aa, Saccharothrix sp. NRRL B-16348
MPAELADRLPVLTAEIGNAAHPTHTARALWKRAVVRRNVLAPLRRRLEDMAPGYQRCMYCGDSQGTDIDHFEPLSLNPLRTFDWLNHLLACSTCNSNLKRDRFPVADDGTPLLVDPTTEDPFDHLLLTLSLGVYVPRTEKGKATIDVCGLNRPVLTQGRVHAKRVVLMCLSRWTAGRALDAADEMREAVLTVRGQPFADVCQAMLRLALSPGAERVFEEAPWALAVLRDDELRAQLLA

SEQ ID NO: 84404 - protein, 389 aa, Pseudomonas sp. 655
MKVKRIKITGVGGIDDIVISFDDQMNIISGPNGIGKTTILESVAHAFSGYESQLLKRKVSSERGSVTTFVDLGDGEVEERNFQVAEFSPRKNENTSPVEHYVKYLISLKVTRTFAYVALDSVSRDTSRDPYGTASSNKYGINLIEIKSWFVNRYLYSAHSGALSAVQTHNFSQAKKFFSLLSSDFEFSRVDAGTNEIMVNTPAGEIYYEYLSSGFKSCLSILFGIVKEIEFRFADSEIMLDNFDGVILIDELELHLHPEWQAKISSILTQAFPSAQFITTTHSPHIIQTAMPKQVVALHYTDGKIARKSLPSNDYGYQGWTVEEVLMDVMGLGDTRTAVYHVAIQSFQRAVDEDDYKAGSLAFGELEKLLHPENHLRKLLAFQLGALKG

SEQ ID NO: 84405 - protein, 245 aa, Pseudomonas sp. 655
MIKLERQPKPDYLSDATVIELTAKFQSDGSSVWNHPQIKLPLLVSSNDKCAYCECSLSDESKYMEVEHFKYKNLYKELVVEWNNLLPACKRCNIAKGVHDVGTDILINPYEVDPRNHLTFKLYQLRGRDEVGTSTVEALDLNNSERLVFKRFEVGEQVFSSVRVAIDRLEAYKLSSTAIRRNKLLSIVETILNECQPKAIYAATTATVALNDEEFLSLIMELRALGLWEDYLEAKLSTAQGIALS

SEQ ID NO: 84406 - protein, 520 aa, Pseudomonas sp. 655
MHRENYETIHSVVEERFNSRLAFVGAAKLWVLGALTKTSIRKSPPSEGEFSSELAGFIAESSTAEWQAFIDRLAGISPALAERNVTVRNPETNPEKFHFSRIRVIEIENFKGIRKLQINLSHDATQERGIAPAAVLLGENAVGKSSILQAIALGVMSPKLRSRINFDWEATLPRDTLTDGADDRPLALQSTIKVTFDDGETSDIHIRRDGSFTSQNLRSSLILGYGAHRSFQDEQSSFRIIRKSSSIASLFEKNKPLPHSATWLELLDDGDFFPVARALREILNLDMSDEIYRLASGEVLVRRHNESIPVFRLSDGYRSLFAMSLDIIRNMLKEWGNLEDARGIVLIDEIELHLHPRWKMQIVSALRRAMPQVQFIYTTHDPLCLRGMLDGEVHVLIRDDEGCVQEMTGLPDVTAMRAEQLLTSEYFGLASTVEPETMRKLDRIVLSDSRSTSPDAHFSEQMNAFSIIGDTPEKQVVNEALRRHIIEQLRSDTLDRAAVREDAVKLILARLRADSNGVGL

SEQ ID NO: 84407 - protein, 324 aa, Pseudomonas sp. 655
MIFVDRNTVDEPLSLALPNGKGAKERARAIKHYAALATPPVLAKAKATKNSGKKTKATAPKKFNFAAYRCKDVKQTLDNLFHEKCAYCESSYKAVMSAQVEHFRPKGRVSEDSSHKGYWWLASTWTNLLPSCSHCNTSEYHEVHKLTVEQPYPQKKHTGRYKLGKYDYFPIGGQRAVAEGDDLDREDAYLIDPTRRNPNDHLQWIVEGGLSLIAPERVGTAWDPYGLHTYQIFGLNRKKLVETRTTLMLEVKKQLLKARNALMKAATKEPGEFFDYLYNHAMEIFVELDELKAPSKPYSAMVKKLLDEERTEIMAAFMALARRP

SEQ ID NO: 84408 - protein, 540 aa, Vibrio cholerae O1 biovar El Tor; identical to SEQ ID NO: 80874

SEQ ID NO: 84409 - protein, 205 aa, Vibrio cholerae O1 biovar El Tor; identical to SEQ ID NO: 80875

SEQ ID NO: 84410 - protein, 414 aa, bacterium 336/3
MSFVEKIVINDWKQFSDIEIEFHPQLTILTGANGSGKTTILNLLGKLVYGNIQDEIAVPSIDKETGGFKYIPRSLKLIDNVRSNIIGYLKYQDGEFSKIKIPDYEVGAVYHIELDNIKRITGAYIPSHRVVFYYQHIPNISTRKIKKSEARLTSSSSIISKLYHDHSSKSTNYFIKETLLNWAISGAGNDFIISDKELKEYFLEFQDILRITLPKSLGFSKIVIKNYEIIFETSTGDFMLDAVSGGISAIIDLVWLIFTSIENKSENVLVIIDEVENHLHATMQREILPSLIEAFPNVQFIVSTHSPLIIGSVKDSNVYALRYNSDKRIFNEKLDIVNKARSANQILDEVLGVSFTMPVWVEKSLEEITNKYANSEITSTIFHQMRNDLKELGLESLVPLTMEKIITKINDQNK

SEQ ID NO: 84411 - protein, 219 aa, bacterium 336/3
MIRINKSLEPNILQTNKVAWTTELLDYISNGKKIPKGVYNRYNHSEVKVQLKMECFNKCMYCESVVAHVSHEHIEHIRPKAKDKFPSLTYEWNNLGLSCPVCNMNKGDEYDINLPFINPYIESPEDFIIALGAYIFHKPSNPKGDLTIRILKLNRPDLLERRLERIKVIHNLIDRYVSQTNPILKQAIKDELDIEVSQYKEYYLCVKSLYNSMVDDNQA

SEQ ID NO: 84412 - protein, 540 aa, Vibrio cholerae; identical to SEQ ID NO: 80874

SEQ ID NO: 84413 - protein, 205 aa, Vibrio cholerae; identical to SEQ ID NO: 80875

SEQ ID NO: 84414 - protein, 457 aa, Escherichia coli; identical to SEQ ID NO: 84378

SEQ ID NO: 84415 - protein, 211 aa, Escherichia coli; identical to SEQ ID NO: 81031

SEQ ID NO: 84416 - protein, 583 aa, Escherichia coli; identical to SEQ ID NO: 83204

SEQ ID NO: 84417 - protein, 285 aa, Escherichia coli; identical to SEQ ID NO: 81961

SEQ ID NO: 84418 - protein, 583 aa, Escherichia coli; identical to SEQ ID NO: 83204

SEQ ID NO: 84419 - protein, 285 aa, Escherichia coli; identical to SEQ ID NO: 81961

SEQ ID NO: 84420 - protein, 583 aa, Escherichia coli
MQLLRICIPNFRNLRGLDIAFAMHLSAALGAPADAQPKPIRSHALIGQNGTGKSNLIEALITIFRDVDLDREAAFDYTLEYSIRDHVVRIEADTVTQKRPYVWVDGKAETQGYLLKNRELLPTHIFAYYSGRNERIEALFQEHQRRFNLRQEITTDEVLSEQLLENFTGSEADIRAVEEAKRRRESRLKQAGDDRLRRLFYCRGGHSQLVLLACLLSDDQVFQKVLKNLHIESLESALFVLKEPHRLREKRRSGKFDEQELIEGDPRFWYSRGNVVSEFLDKLWQVSWAPIEQEATKQIDFRGRSEKQKQLYLFVPNQDKLKQLGELVGSTDSFFRYAEGAYIGDLIDEVRITVKKRDEYGGKVSFTQLSEGELQMLTVLGLMRITREDHCLFLLDEPDTHLNPIWKLRYFDDIEGVLASDEGALVQGESQILITTHDPMMIGSLKREQVHILRRDKGRSIVDTPDEHPQGMGVTGLLKSELFGLSSTLDIETERRLFRRNELFVKSPRSPEEDTELSRLSTELADLGFSTADFRDPDYALFVRKMAQHRRFRKPTLTPEEQAEQDAIADSIIDEILREEEDQ

SEQ ID NO: 84421 - protein, 285 aa, Escherichia coli; identical to SEQ ID NO: 81961

SEQ ID NO: 84422 - protein, 457 aa, Escherichia coli; identical to SEQ ID NO: 81030

SEQ ID NO: 84423 - protein, 211 aa, Escherichia coli; identical to SEQ ID NO: 81031

SEQ ID NO: 84424 - protein, 583 aa, Escherichia coli; identical to SEQ ID NO: 83204

SEQ ID NO: 84425 - protein, 285 aa, Escherichia coli; identical to SEQ ID NO: 81961

SEQ ID NO: 84426 - protein, 457 aa, Escherichia coli; identical to SEQ ID NO: 84378

SEQ ID NO: 84427 - protein, 211 aa, Escherichia coli; identical to SEQ ID NO: 81031

SEQ ID NO: 84428 - protein, 457 aa, Escherichia coli; identical to SEQ ID NO: 84378

SEQ ID NO: 84429 - protein, 211 aa, Escherichia coli; identical to SEQ ID NO: 81031

SEQ ID NO: 84430 - protein, 457 aa, Escherichia coli; identical to SEQ ID NO: 81030

SEQ ID NO: 84431 - protein, 211 aa, Escherichia coli; identical to SEQ ID NO: 81031

SEQ ID NO: 84432 - protein, 583 aa, Escherichia coli; identical to SEQ ID NO: 83204

SEQ ID NO: 84433 - protein, 285 aa, Escherichia coli; identical to SEQ ID NO: 81961

SEQ ID NO: 84434 - protein, 457 aa, Escherichia coli; identical to SEQ ID NO: 81030

SEQ ID NO: 84435 - protein, 211 aa, Escherichia coli; identical to SEQ ID NO: 81031

SEQ ID NO: 84436 - protein, 457 aa, Escherichia coli; identical to SEQ ID NO: 81030

SEQ ID NO: 84437 - protein, 211 aa, Escherichia coli; identical to SEQ ID NO: 81031

SEQ ID NO: 84438 - protein, 457 aa, Escherichia coli; identical to SEQ ID NO: 84378

SEQ ID NO: 84439 - protein, 211 aa, Escherichia coli; identical to SEQ ID NO: 81031

SEQ ID NO: 84440 - protein, 583 aa, Escherichia coli; identical to SEQ ID NO: 83204

SEQ ID NO: 84441 - protein, 285 aa, Escherichia coli; identical to SEQ ID NO: 81961

SEQ ID NO: 84442 - protein, 457 aa, Escherichia coli; identical to SEQ ID NO: 81030

SEQ ID NO: 84443 - protein, 211 aa, Escherichia coli; identical to SEQ ID NO: 81031

SEQ ID NO: 84444 - protein, 457 aa, Escherichia coli; identical to SEQ ID NO: 84378

SEQ ID NO: 84445 - protein, 211 aa, Escherichia coli; identical to SEQ ID NO: 81031

SEQ ID NO: 84446 - protein, 457 aa, Escherichia coli; identical to SEQ ID NO: 84378

SEQ ID NO: 84447 - protein, 211 aa, Escherichia coli
MPKIKNPIRFSAESLDIIEKKLSSPDFKHTNWGDDDLQVLRAEIRNHYREEQKLECVYCHEPIGVRAAQAAPIEHIVPKSQYLCFIFEPKNLCVVCPDCNEFKGKNEVLFEPVINGGRRKNYPTASASFRIVHPHIDDYEMHIIKANRVYVDKTPKGHYTIGICKLNRFFHYFGMCDEFVNDAKIAETNENFFKKGSITTNELLDDDIHLI

SEQ ID NO: 84448 - protein, 583 aa, Escherichia coli; identical to SEQ ID NO: 83204

SEQ ID NO: 84449 - protein, 285 aa, Escherichia coli; identical to SEQ ID NO: 81961

SEQ ID NO: 84450 - protein, 583 aa, Escherichia coli; identical to SEQ ID NO: 83204

SEQ ID NO: 84451 - protein, 285 aa, Escherichia coli; identical to SEQ ID NO: 81961

SEQ ID NO: 84452 - protein, 457 aa, Escherichia coli; identical to SEQ ID NO: 84376

SEQ ID NO: 84453 - protein, 211 aa, Escherichia coli; identical to SEQ ID NO: 81031

SEQ ID NO: 84454 - protein, 583 aa, Escherichia coli; identical to SEQ ID NO: 83204

SEQ ID NO: 84455 - protein, 285 aa, Escherichia coli; identical to SEQ ID NO: 81961

SEQ ID NO: 84456 - protein, 583 aa, Escherichia coli; identical to SEQ ID NO: 83204

SEQ ID NO: 84457 - protein, 285 aa, Escherichia coli; identical to SEQ ID NO: 81961

SEQ ID NO: 84458 - protein, 393 aa, Escherichia coli
MKLTELTINGIGGIKSLYVKFRPDMNIICGPNGVGKSTLLLAASFPFLHGYTNRIKRNVTSETGSVSLIIEDNSVNFNSVLDVNVHLPTETIHNFNNNGFDKRKLIKFEILRNFDYKHLEALNADKSLSDDAVSQQINLGVNLHDIKDWFAKRDLFEKVDNGYGPNTIKNIHLARECISILNPQFSYNRVDPKSYDIFVNTPTGVIWYEYLSSGFKSCMSLLLGIIKEIELRYPEKDIYAQEFDGVILIDEIELHLHPEWQARITEALTTTFPSAQFIVTTHSPHVVQNAKPHQIIALVPDNDGTVRVKELPENGLGYSAWTVEEVLLDVMGMESTLSRKLQELLDNFERFVDEENFDKAKEIYDYLDMALHQNSILRKSLKISLMSIREREE

SEQ ID NO: 84459 - protein, 248 aa, Escherichia coli
MIKLERNFIPDFFTRVDLLSLTQEFKDNGTSVWHHPEVKSACLKLSNGKCAFCEVKLEEASTYNEIEHFKDKKNFPDDVIRWENLLPSCRHCNGSKQRHNVVLNPIINPCNDLPSEHLYMIGYRIKGKTDLGKTTVDVLNFNHREHKFIPRCKAGELIDSSIDDAIEKLNWFNENPSTRRKNILMNLVEAILGECQKTSPFSAVSATMLHRSVEYSYLKETMQMQGLWSDYMQELHDESLSLTLPSIR

SEQ ID NO: 84460 - protein, 583 aa, Escherichia coli; identical to SEQ ID NO: 83204

SEQ ID NO: 84461 - protein, 285 aa, Escherichia coli; identical to SEQ ID NO: 81961

SEQ ID NO: 84462 - protein, 393 aa, Escherichia coli; identical to SEQ ID NO: 84458

SEQ ID NO: 84463 - protein, 248 aa, Escherichia coli; identical to SEQ ID NO: 84459

SEQ ID NO: 84464 - protein, 457 aa, Escherichia coli; identical to SEQ ID NO: 81030

SEQ ID NO: 84465 - protein, 211 aa, Escherichia coli; identical to SEQ ID NO: 81031

SEQ ID NO: 84466 - protein, 457 aa, Escherichia coli; identical to SEQ ID NO: 84376

SEQ ID NO: 84467 - protein, 211 aa, Escherichia coli; identical to SEQ ID NO: 81031

SEQ ID NO: 84468 - protein, 457 aa, Escherichia coli; identical to SEQ ID NO: 84376

SEQ ID NO: 84469 - protein, 211 aa, Escherichia coli; identical to SEQ ID NO: 81031

SEQ ID NO: 84470 - protein, 457 aa, Escherichia coli; identical to SEQ ID NO: 81030

SEQ ID NO: 84471 - protein, 211 aa, Escherichia coli; identical to SEQ ID NO: 81031

SEQ ID NO: 84472 - protein, 457 aa, Escherichia coli; identical to SEQ ID NO: 81030

SEQ ID NO: 84473 - protein, 211 aa, Escherichia coli; identical to SEQ ID NO: 81031

SEQ ID NO: 84474 - protein, 457 aa, Escherichia coli; identical to SEQ ID NO: 81030

SEQ ID NO: 84475 - protein, 211 aa, Escherichia coli; identical to SEQ ID NO: 81031

SEQ ID NO: 84476 - protein, 457 aa, Escherichia coli; identical to SEQ ID NO: 84378

SEQ ID NO: 84477 - protein, 211 aa, Escherichia coli; identical to SEQ ID NO: 81031

SEQ ID NO: 84478 - protein, 457 aa, Escherichia coli; identical to SEQ ID NO: 84378

SEQ ID NO: 84479 - protein, 211 aa, Escherichia coli; identical to SEQ ID NO: 81031

SEQ ID NO: 84480 - protein, 457 aa, Escherichia coli; identical to SEQ ID NO: 81030

SEQ ID NO: 84481 - protein, 211 aa, Escherichia coli; identical to SEQ ID NO: 81031

SEQ ID NO: 84482 - protein, 457 aa, Escherichia coli; identical to SEQ ID NO: 81030

SEQ ID NO: 84483 - protein, 211 aa, Escherichia coli; identical to SEQ ID NO: 81031

SEQ ID NO: 84484 - protein, 457 aa, Escherichia coli; identical to SEQ ID NO: 84378

SEQ ID NO: 84485 - protein, 211 aa, Escherichia coli; identical to SEQ ID NO: 81031

SEQ ID NO: 84486 - protein, 583 aa, Escherichia coli; identical to SEQ ID NO: 83204

SEQ ID NO: 84487 - protein, 285 aa, Escherichia coli; identical to SEQ ID NO: 81961

SEQ ID NO: 84488 - protein, 457 aa, Escherichia coli; identical to SEQ ID NO: 84378

SEQ ID NO: 84489 - protein, 211 aa, Escherichia coli; identical to SEQ ID NO: 81031

SEQ ID NO: 84490 - protein, 457 aa, Escherichia coli; identical to SEQ ID NO: 84378

SEQ ID NO: 84491 - protein, 211 aa, Escherichia coli; identical to SEQ ID NO: 84447

SEQ ID NO: 84492 - protein, 457 aa, Escherichia coli; identical to SEQ ID NO: 81030

SEQ ID NO: 84493 - protein, 211 aa, Escherichia coli; identical to SEQ ID NO: 81031

SEQ ID NO: 84494 - protein, 341 aa, Candidatus Magnetomorum sp. HK-1
MKPIRMIEHKLAELTIKKYRLFQNFKLDLTDDKGNPLDTVILAGINGSGKTTILDFISDTLFSENKKDKSNIVRVKLTGNLSEMKKLGDQIQSSELNPFPIQNKEISNYIDHFILDSNKFSNVTVREARKAAFEEINKLFNILDINIQLIDRKDGKPIFKNFQGKKLGLEDLSAGEQELFIRVLRLKILSPKKKIVLIDEPEFALHPSWQQKILIVYQKILCDGDNQLILATHSPQVIASADVKSVFLLKPNLETKKIDVSMPKYTKGHTINYVLSEIMGADYRDTKINNDIEEYLALIRKGEHETIKGIELKNIINDLDPNSEDKIRIDFALRRFKVLKK

SEQ ID NO: 84495 - protein, 221 aa, Candidatus Magnetomorum sp. HK-1
MRRIIRNPISDKTCKQLKEKSKKKFKLSKYQRKEIEKNLFKSQKHLCCYCECRIDDTNKHVEHFLDQETNKDRIYDYNNMFLSCDGEKYSNNENNRQEIITCGHRKGINQNQAKINYDLLLNPADEEPHTLLKYIDGLITPSKICSNKEKEKATYTIKMLSLDSNRLNNTRIEAIVQLVKNLNLLTDDEKKLFIENVLNEEQERLPPFFSTLKDNFSFLLN

SEQ ID NO: 84496 - protein, 1124 aa, Candidatus Magnetomorum sp. HK-1
MLQEFSLKHFRQAFSQKKGYILIVANQHFSKILLEAIKYQSPGNQSFIPKQIKEIAIADKYNVDKPVFIISSAYIRHQTLAEIKKEQKSLQLFIDRLQILPEKEKTRKSISDVFKNIYIFLSIEYPQLIRSLSFFPDLIIDRSPEGGLQKSIIPYDDQLNNEPIIINFKMLDIHDVMKDYFYYFVPLLYPSTIYKEIIVLESLKKNVFKVKVVLHAHGTRGHNKGHSQLEVVKFDAISRINREKSAFDRINTNKFSDIIYQVRNTALFKGEFVAAIRSSAASIFTDEKQQKLREVLAEPSVSQQAKEKAIDHIFDSLKRFYATQDIHEINNALHLYQETILPYAFYIKLKDFDITPVDDTCELSRITNNISICEDMSSICCKLIGIIPDLSKANRCKLLFIVESDDDDSGKLLKLVCLYEDENWRENFNKKGLKIDQKVIIHNIEKRGWLFEAYKQYRYIKDKGILPTKDSSISKTRMINDTISEQTFSDLINKDSSIELPDSKDMAFLNEKTEFNDFQEICRTEDLLISGQKDTYHIPNPLHMIYQAIKKQDIFQKDYSGVSHGDLNIDNVIVHFGDTHSHKETRIHLIDLSEYNENFPLAFDAVTLETGIKLHILSTSSEQYQTIHQFIDALISFERQLYEDFSGKTEDDSTWSDDMKTFFPIIQKIRKMAFDRYPMSTVKAYKCYTQQLLFYSLRALSYTDLTSRSKAWAFITAGIAGEYLLQKERKIKPIKPSTLQVNPSENIYIDKEKNTPLPYAIKQIHMSQFYDTINTSVKELPVDAQWIFLTGENAFGKTLVLRAIALGLWGNINSNVQKQWFLTQHSKIGLEYKKGYSSIINIYGDKYFSPIQKLVAYGPSRLIIQDIQSKNKIDQESGHLYNLFHDDGILLNMELELIKWHGNNKKYGIVKDVLLRVMPYISDIQVINGQVVFFSKDKDTNNPGDGILFEQLASGPKSIFAMVGDMMIRMYQLLPDIIDPTDFYGFVIIDEIDVHLHLKWQKELPSVLSNVFPNIQFIVSTHSGIPMQGVNTDRSIFLKVNRDEENGIQIERLFQDQVKDMKHWTPNILLSSPMFDYEDYINKEITDLTLLKTEDSYKEMKEDEALDQFLNRFETKLSESNKKE

SEQ ID NO: 84497 - protein, 314 aa, Candidatus Magnetomorum sp. HK-1
MISVDKNYNKPPDELKDIQKKIEQFNLTEYSLNDTLDSFFTPKNKTAIKEALSAIYHNKCAYCECNPTVGSYTEIEHYRPKKGGYYWLAFEWSNLLLSCTRCNKSKSNKFPLKDESNRLKQPPDDSDRKATSDILLSEQPLLLNPEVTHKNKNAQYNNEKIGPIEKHLEFNKNGEVNYLTDEGKETIEVFKLNKRPELVIARRKVIKKYIKCLKNNIEEYAKSNDFFKFTENVNQLIENVLKDADNPEKEYLQLRRQIVDQPDNFFKKAFEEKKIVHIYDLIKRSIEDIKASRKKHPALPIKHNNRYASKKQIT

SEQ ID NO: 84498 - protein, 358 aa, Candidatus Magnetomorum sp. HK-1
MKLRKIHIDNYKLFNNFDLDLTHNDKSQNLIVIAGINGSGKTTLLKEVIYQTLVNKSIHKGCSIDIETNDKKNHIFVIDSQSLQLNSQERINNEKKALFSQLDHIYYYEAGLSVENNNVKNVILKYIDSLIYEKDKKSSEAYQIAQDVLDSIFNGFDLQIKFKGVDRNREILFKNAQTENIKIEELSNGEQELITKAFSIYLAEIKDSIILIDEPESSLHPIWQSRITQLYQKIADQYNNQVILSTHSPHIVSAVHKEQIRVLIKEGKHLSVISNFNRSYGVKVDQILLEIFRTNGLRIPEIENKLFKLREMVSLNQYDTDDCNALKQELENTIGYDDTDLALIRLEIAKRKKNEKDQ

SEQ ID NO: 84499 - protein, 198 aa, Candidatus Magnetomorum sp. HK-1
MKKINKIEPDFYQNYISANKPDTWKQVSFDIGFDMRTYMLMEEQNFQCAYTEIRLEPEQSHIDHFKKKSLYPNLTFHWNNLLTSSNYDFYGARFKDKHIKKEHYQNIINPVVENPQQYFSYSFTGEILVDPKNEKTKLSIEMFNLNDRSLVEQRKAVAEIVKSMYNQFTVEELIDCIGKFESFIRALYIEFKNNDDIE

SEQ ID NO: 84500 - protein, 371 aa, Candidatus Magnetomorum sp. HK-1
MNYTIKKVKINNFQCIKDITIDNLNKSKWIFLLGDNSNGKTAFLQALTIGVCGIKNAGHLLEEQNSCQITVTLSIHGRNQKNVIKRIPKENTWSSVDRPDYFCSYGPSRLQMQDINLDHFLIDPDRSLLNQQGSLLNIEDWIRRQKLREESNTLARIRYKNVIKLFERLLPNVSQIVLEDDQIFYIENGYKATIHQIGSGNKTILSMVGDIVIRLFEMQPKETEPQNLNGIVVIDELDLHLHPVNQRYLPEILSDLFPNIQFICSTHSPIPLLGAPKNSIFFVVERDRQKSITTIRDYEIDISNLQPNTLLTSPLFGMESIRSVQNSIFAEFRTENDYREYLHRKKRDESLKQYAQKGIHLPKELMDKIYD

SEQ ID NO: 84501 - protein, 297 aa, Candidatus Magnetomorum sp. HK-1
MIRVIKKSTPPEILQTKAEKLRIKALKECKKHKFYSRYYGHPSVKKKLLEIYCNKCAYCESSISEGAPLQVEHYRPKKNLMEDMNHPGYYWLAYEWTNLLLSCPSCNRSKSNSFPIMGERVKSPQNDHKEWNINSESFISEKPLLFNPEFDNLEKQFKFYIDGSIAGEEKNRRSEETIRICILNRENLRAARKEEIETFISELLDIEHKIYVILNYLRNKNDLTRDNFQIVIELEFNPLFQKLMKAMQKEHKYSCLWRYIFNNFKGFIIKQFSKKEYQDMVYYAFNRYFSNKKIDME

SEQ ID NO: 84502 - protein, 430 aa, Candidatus Magnetomorum sp. HK-1
MRISQIKLKQIGAYEDLSIDFKTNKDPQKAEIHIFSGVNGSGKSTILYALAAGFDSTELEKRFRISAQNENLQIHHNSQYDIFFEDHSGSVYSISNQKEVPPEASFSKSTQLVNLREAMTAKANAFQKYRLDFAIFGYSGTRTLYSAPIASIKEISTNPLYHALNFGKSVNSDLIVQWIANTKARIAFAIQDGNKVLAQKYEDSIKRVEQAISDIVGHDVHFSFSYDPMNVTIKINNENLEIDILPDGLKSIISWITDLFIRMERIPWTDDNNILDKCFILLLDEIEIHLHPSWQRKILPVVQSLFKNAQIFIATHSPFVISSISDAWIYKFRLTNGKSSLSEIVPSKAGFSYPSVLDDVFDVAEYFDIDTENSFHQFYQIKNEILSGNTDNIQTFKEIVKQLSQKSIELQDIVGREIRQLERITGKAFI

SEQ ID NO: 84503 - protein, 197 aa, Candidatus Magnetomorum sp. HK-1
MMKIERTPVPECLQENYKQWGHEYATKSRKNSTYRFQWKQWKGKAVDVLIKPDMVRMTKNHCSYCDSYPLGIAAQQTIDHFRPKKQFPFLTYVWHNLFLACNVCQNSKQDRYDKKMLKPDTVSFKFETYFVINYKTGCIEVNPGSSSKNQERARLTIETFGLNKFGRPHSRLREYQKYQDLCQKGYCLDDFSYRFFM

SEQ ID NO: 84504 - protein, 461 aa, Candidatus Magnetomorum sp. HK-1
MRLQSITIENFRCFNKLTLDLHPELTVLIAPNGAGKTTLLDASRIAVWPFVKAFDLGNQTGKSATIQIEDVRKIMHENGNMEPVVPSKIIAKGQRQDNLTFETWEQKREKLKPRTQPTYDTSAKSLMQFGERLQKKIRKENQTTPVDLPVIAYLGTGRIWYQGRHSAVVEDKPLDQSIYSRTWGYQDCLSMSSNYKQFENWYAWIYRSFREQQIICLEKNSPLNGASLIFQDAIDVIKSAVNGTIQDDTGWQDIAYSASQQQQIVLTHPKHGEIPLSLLSDGLRNTVVMVAEIAFRCIKLNPHFGKEAARKTTGIVMIDEVDMFLHPSWQQTIIESLRKVFPRVQFIITTHSPQVLSTIESDSIRIFKDSNVYHAPKGTKGAESSRILKRVLGVEGRPQNDKNTQLLNRYLELVYADKWLGDEAKAIRQQLDEIFADEEPALTEADLYIENREWEKEIEKN

SEQ ID NO: 84505 - protein, 260 aa, Candidatus Magnetomorum sp. HK-1
MKKIKKTPGPNHLTNYEKKYPVANWSDFKNYNGGEGYQCIRNQILKDQGGLCAYCETKIIDLPPHKQRVEHFHAKSDKAFKNKNWALDWNNIFGVCIGGDDSDKKLHPLPENLSCDSHKNHLFNKKQLPEACEKFLVNPLKMIATPCLFDFHKATGELRPNINTQKHESKKNDYEISEELLKKSIDILNLNCDRLKQQRLLILKKYNQMIAKARKRNDKECFSKISALWFKDKWQSFFTTRRLLLGKHAEVFLSKIGYDG

SEQ ID NO: 84506 - protein, 416 aa, Burkholderia sp. HB1
MRSSFIESLHVRDFRQFDDLSVEFNSGFNFIAGPNGSGKTSILACVAHALTHHSLEHSRASDTSEVFIDVSHKGDLLRVGLGKGSFTGHGYRTSSTKLWAALPEAEGRKSVLSIETDKHAPDFSPLLLGAQRSLRYIQTQGMQREPLLVERRKQYRNNSVKHIFEESSSNVKQWLINRYFIVDKDWATTEKKNWQHFLSALPALAPFDSNFEFVRIKSDMEPVFSIYGRECYLEELSSGFKAVLTIVARIIEWAEGTGEGELAEIEKSVGSVLIDEIDVHLHPEWQFTLRDGMRQMFPNLQFIVTTHSPHVLASARAGEVIAMPASVRGKCSIAPQPHSYSGWTTDQILTEVMGVRSLENKQYELLVHQAFDCVEEKDSVGLKSIIGRLRSIAHPDDAIVKVLDVRLASIILTEND

SEQ ID NO: 84507 - protein, 249 aa, Burkholderia sp. HB1
MIKLNRPAEPAILSANKSKWLSDLLAAAGKYGSYKAIPDAEKEKLVCFYRHDDIKHALEESSLGKCAFCEGKPAESGNIEVEHFAPKSIHYQRTFDWSNFLPCCRKCNGSKGTHDTVASPIVNPYDHDPRDYFYFQDISLRPIRGAHYEIAAKTIEVCGLDATRLMRPRATLLISIRQFLADLNEALTKLSTAESPQSRTRRMRKLAEAVDRIENAMLPSESHSSFIRSIVEKEDAYDEAKRLIAGQEL

SEQ ID NO: 84508 - protein, 410 aa, Photobacterium leiognathi subsp. mandapamensis
MAKYIHKVSGIIPNTYKTINIDLNGKNLIITGGNGSGKTCLLNELYKKIDLLIVEKLQADLSTLKNEYDNQLAYLSTLQKGTTNYYHAVNHLEYIKQKLDSITKGLDLNIINNIDFSIKLEDKTAILAFFTAHRKTEIISADTAKGIDSEKEKIKLQNNTQSLGNNLEQHLVNLRNRRSLAMTEDQDDKLADKISNWFNLFENDLKLLLEDETAKLNFKSSTLKFTISQENKPEYTFQSLSSGYQAIFQIYADLLMRTEYFDITPKELVGVVLIDEIDAHLHVSLQRLILPFLTTSFPNVQFIVTTHSPFVLMSAEDTVIYDLSKNEQIDDDISLFSHTSIIEGLLDTKPSSQKLDKYINELAEIINSEDINYARLEVLLNKLRAGFNTLDSKSKSFFMLGENALLDREQ

SEQ ID NO: 84509 - protein, 218 aa, Photobacterium leiognathi subsp. mandapamensis
MFTVIRYGDIPACLEKNIYNSPEVVERLENIFYGKCYLCEQADLQAPEIEHFEPHEGDATLKYDWNNLYYSCARCNSIKSNIHRNLVDCCSTDIDVVRAIKCLMPRTPDDDVHVSAELDEVRVHNTVALLDKCFNEEGTALRGITRSSLIEKLYEYFTNFLMYRQTIMNRHSTPVAKRDAIEALEAMLQDQYEFSAFWRWHVLTDRKLKDKVEGIINF

SEQ ID NO: 84510 - protein, 394 aa, Photobacterium leiognathi subsp. mandapamensis
MQNYRIYVGINGCGKSYKLREIAEKALNYGRSVIAVSTSLNDKYPKMKANKPYFYLGHRLNSSLAKKAIFSSLERLNDKDDPIKLNSMLSILSYIKMDERIGIKVVGFKRDFEDLINKFEYNSDNFFKLQNQLENKGISINELLSLCYNYRKIYDESYQEINWISRYSRFGERYLDRQSDTLSGETLSGLVKYEKELRKLGVIKELRVFLSKKDSVVKLEDISSGEFSQLYTSMFILAYLKEDSIVLIDEPENSLHPEWQLNYLKNLKNLFPYHSFECHIATHSPMLISGALKEDDVYVYRHDGEKFQEVNTKSGSIEDTYIDQFGIVTPESHSLSERCVDILNKFSDQDINYDYAKNKVKEIRAMSYDEKQVEFLDGVLRLIDKIQQNKNEKW

SEQ ID NO: 84511 - protein, 206 aa, Photobacterium leiognathi subsp. mandapamensis
MVKKLNLNCDEITSIRRAVKSGHTGWSNKDKSFKHVKKKIKKILKKRTNYRCCYCERNLIGEFDYVLDIEHIIPKSKCLKHMFTMKNLSVSCKRCNMKVKGCDTSFLNFDINLLPKNVFKSKYYKFVHPNLDVRQEHIKMVTEDNHKVRLVHYLCNPNSEKAKYTFDYFNLNEFQIKEANKSQGIKKSRIKDKWIDAEFQKLLDNR

SEQ ID NO: 84512 - protein, 775 aa, Pseudomonas fuscovaginae
MYCFDRSSVPPPSLLQSREANADRQALADYFLADRTKRAQSRAPEPVVDLNENSVRSGLDRLFHGKCAFCERVVQSKATYRFRPRAQASPLERTSNAHLYYIWLSSAWENLYAICKDCEPVRPDHFPVLGRRVALPSAQEVDAYAQAGNGLWGGYPLKERHVLIDPCERVDLSRHLSVDLSGELYALSERAAATITHFKLNRIQLLKLRKSKLKTYFDDLIGNWSFSLGEDDSHPVLFDFARMDFGGCWYLLCRRIVLTLSKSRVSASELAPDRIEHTLRALSESADVVEWYGGLELSLAGTAVRDSRPVAKSETFGARDCPSLESIRFSNFKGIEQLELRIPAVPLRRSSGTNAVRPALLILGENAAGKSSILEATALVLSSDLACTKLPVDYASLPLDPELLGAVQTPRCSLASVVAVFQGGSERHLTISEGEFWHEDRGLSVDGQPLLPQVFAYGAFRQYQKRVSPRSPSKSIINLFDSTALLSNPEKWLLSLKADAFNSVVRTLRGILSIEGSFEIMERDPQNQRCLIVTSAGDGQPLCRTPLSLASSGYRSVLAMACDIIQGLMNRRLNPHFESLETAQAVVLIDEVEAHLHPRWKIQIMRALREALPQVTFIVTTHDPLCLRGMQDGEVIVMQRVSSDQRTDVQWPVMVEQLVRLPNVSQLTVEQLLTSDFFSLASTDQPETERELAGLADLLNARERGERLTVPQQDLLRRLERDISDALPVGSSEVQRLVQEAVVEYLDSRRQVSTQKLAQLRSAAKQRILGILEGI

SEQ ID NO: 84513 - protein, 342 aa, Pseudomonas fuscovaginae
MRAVSRDSVPVPDAMLGDDSPAKKELQKLQDYFMAPTGALPAFAVYKSDSVKKQLHELFHGKCAYCESFYYGSAPVDIEHYRPKGRVYEEPDHPGYWWIAMDWENLLPSCIHCNRRSGQVTPTLSASLVSLVNEGRDFSRSRVVQTGKQDSFPILGQRAAVGARDFSGEQALLLDPCRDQPQEHLRFHVDSENLIGLVLPKPHDSGGLALAGGVAGVRPELRGVIEQALAGGLSLRGAVSIHVYGLNRLGLVQERTRVLRQLEFLEMLAVEMGLMAQELEPDSEAPVVESEQARARNERIARRLRFLQEQILGEIKTMARPEAPYSAMVREWLEGFRARLSR

SEQ ID NO: 84514 - protein, 775 aa, Pseudomonas fuscovaginae
MYCFDRSSVPPPSLLQSREANADRQALADYFLADRTKRAQSRAPEPVVDLNENSVRSGLDRLFHGKCAFCERVVQSKATYRFRPRAQASPLERTSNAHLYYIWLSSAWENLYAICKDCEPVRPDHFPVLGRRVALPSAQEVDAYAQAGNGLWGGYPLKERHVLIDPCERVDLSRHLSVDLSGELYALSERAAATITHFKLNRIQLLKLRKSKLKTYFDDLIGNWSFSLGEDDSHPVLFDFARMDFGGCWYLLCRRIVLTLSKSRVSASELAPDRIEHTLRALSESADVVEWYGGLELSLAGTAVRDSRPVAKSETFGARDCPSLESIRFSNFKGIEQLELRIPAVPLRRSSGTNAVRPALLILGENAAGKSSILEATALVLSSDLACTKLPVDYASLPLDPELLGAVQTPRCSLASVVAVFQGGSERHLTISEGEFWHEDRGLSVDGQPLLPQVFAYGAFRQYQKRVSPRSPSKSIINLFDSTALLSNPEKWLLSLKADAFNSVVRTLRGILSIEGSFEIMERDPQNQRCLIVTSAGDGQPLCRTPLSLASSGYRSVLAMACDIIQGLMNRRLNPHFESLETAQAVVLIDEVEAHLHPRWKIQIMRALREALPQVTFIVTTHDPLCLRGMQDGEVIVMQRVSSDQRTDVQWPVMVEQLVRLPNVSQLTVEQLLTSDFFSLASTDQPETERELAGLADLLNARERGERLTVPQQDLLRRFERDISDALPVGSSEVQRLVQEAVVEYLDSRRQVSTQKLAQLRSAAKQRILGILEGI

SEQ ID NO: 84515 - protein, 342 aa, Pseudomonas fuscovaginae
MRAVSRDSVPVPDAMSGDDSPAKKELQKLQDYFMAPTGALPAFAVYKSDSVKKQLHELFHGKCAYCESFYYGSAPVDIEHYRPKGRVYEEPDHPGYWWIAMDWENLLPSCIHCNRRSGQVTPTLSASLVSLVNEGRDFSRSRVAQTGKQDSFPILGQRAAVGARDFSGEQALLLDPCRDQPQEHLRFHVDSENLIGLVLPKPHDSGGLALAGGVAGVRPELRGVIEQALAGGLSLRGAVSIHVYGLNRLGLVQERTRVLRQLEFLEMLAVEMGLMAQELEPDSEAPVVESEQARARNERIARRLRFLQEQILGEIKTMARPEAPYSAMVREWLEGFRARLSR

SEQ ID NO: 84516 - protein, 432 aa, Ideonella sakaiensis
MYIDKISLTNLRGFDALEFSLVRPDGTYPGWTVFTGDNGSGKSTLLKAIAVALTGKDTARALQPSFHRWIREGQHDAAIELGIARIESDDFLTEGGRLPEKVFRARLALKNGQKEPLLEAALPSGITRKNYSTPQRTIWSQEPRGWFSCGYGPFRRVFGASPEAMRQMVAPSTERFVTMFQEAASLAEVDQWLRNLSHRSLEARSGASEQRDLILDVLRDELMPNQITIDRIDSDGLWLRDRNGLQLSWSEMSDGYRAALALLADILRHLINVYGITDLTGRDAQGKLFVKRSGVVLIDEIDAHLHPEWQREIGFWLKRHFPNIQFIVTTHSPIICQAADPNGLFVLPEPGSADRPHPLSDEEYRKVIASRPDTILLTSAFGLQNTRSPRAVAARAQYAELKSKERSGARLSRSEREQVEQLQLFALADEEP

SEQ ID NO: 84517 - protein, 249 aa, Ideonella sakaiensis
MRRIHRVPLPARAHGYLETRRLATAGPIAVDRAWKRARRTQALGEVVRTLRSMAGPLERCMYCVDSHGSDIEHFWPKASYAERAFEWANLLLCCTECGRLKGDRFPLLPGGQAALVDPSAEDPWDHLDFDPDTGNLTARYDAASAAPSARGAATVKLLQLDRREAMTEGCRRTYRRLADRVRQALAASEVIDAEQLASDLLRLDDHGLLGWCFGPIGSTLEPFLELRRRDPEAARLLRDSIAGAEKAPA

SEQ ID NO: 84518 - protein, 458 aa, Pseudomonas syringae pv. maculicola
MRLDTLRMQNYRCFGEFEIDFDPHLTILIASNGGGKTTILDAARVALWPFVKGFDLGGQTGKSATIQIEDVRLTQFGSGNMESQVPSVIQAKGVWWENAGDSSWLQQRVSLKKSTNTIGDAGSKALTLYGKSLQDSVRSDAHVTLPMVTYLGTSRLWFEGRFSSAAAQTTLDKSEYSRTSAYLNCLSYSSSFKTFTAWYIWMYRSYREAQLIALERGEEMSDTGQRFEKIISAVKEAIDRLIKAPTGWHRLEYSASHQQQLVMHHPDQGILPVEMLSDGLRNTIAMVADLAFRACKLNPHLGELAPLQTPGIALIDEVDMFLHPFWQQTIVGSLRAAFPAMQFIVTTHSPQVLSTVRRENIRVIGKDAQGRLIASPPLAMTYGEPSNSVLRSVMQVDPQPPVDEKPGLLQLTEWVDKGRYDEPQAILLMQQITEALTEQHPQLQRLQRSIKRQKALKG

SEQ ID NO: 84519 - protein, 189 aa, Pseudomonas syringae pv. maculicola
MCCYSEIRPDRVGLSFHIEHVENKSQHPQRTFDYNNLAACALDSQSDLDVLKIQGAEVFGGHASGKSKGVDMARFVSCHMPDCSRFFAYLSDGRVVPADGLSLDDVDRAGYTIDLLNLNSPYLQDLRQSWWDELEALFEEHVDREMSLHCLAGIDLIPVGASLSQFFSITRNFFGGIAEEVLDQEAGRC

SEQ ID NO: 84520 - protein, 768 aa, Pseudomonas syringae pv. syringae
MQYIQRDVPVPAILTGSAANEHREFLVRFMAQSEEQLSQKYPPASSLNLSDQSMSAALKRLFIGRCAFCEAWADLMPYRFRPKSQSLPYGPSKFAHFYYSWLDIAWQNIYPICHSCMPADGEYFPVLGKRAPLPDMVLYQQYAQENTGMWPAYPLREKPILLDPCFDQALYKELSTRSDGSLVGLSERGRLTIEHFNLNTAVRTAERFASHQDYLRQLVQWVREANAKESIKIFDFKQLEFGGSWYLLLRRLAVFVGAETSSRPVLSMAGIARVFAKLRKIADGRSRLEQCIQQLADNEPQEFSSEDTIMYLKRPSTASVTRLRLENFKSIENLDINLQPQTPTTPFEGTRQFPALLIIGENSAGKSTILEALALGLSSTQAFVSLGLTTKNFILAPEFLGAAQPRVVSEALIEIDISNGSKRTLLIEQGGINIPDEMQQENIPVFAYGAFRQYQHQGPSSKPKPDAFVHSLFDGRMLPNPERWLLKLSNARFAMVIRALREILSIDGRFDVIRRDIASKQCYVVTGIRDDGSPLSQSSLKVASSGFRSILAMACDVMRGLMNPSIYPDFESLQTARAVVLIDEVEAHLHPRWKMRIMRGLREALPNVTFIATTHDPLCIRGMNDGEIVVLRRVQLRQGTTDAGLQSQVEAQTDLPPLSELRIEQLLTSDLFQLHSTDDPEMDQQFAHIADLLAMPSEQLEPEQLRTLKRFNDDVASALPVGTSEAHRVVQDAVAEYLQIRARTSVQRVADAKASVKAKIIQALKGIL

SEQ ID NO: 84521 - protein, 309 aa, Pseudomonas syringae pv. syringae
MRRVERIGSVPSNLESANKGGKTERDRARDHQLDTNPKKDSFTYVGYKHDDVKRKLAALFHNKCAYCETFFSASAPVDVEHYRPKGSVADDPAHPGYWWLAMSWDNLLPSCIDCNRKRKQYLPDASTSLKALYDSSTNAGMNLGKGGKQDSFPIRDSGKRLAAESYAYIDEEPLLLDPTRDDPREHLRFSVDRTSPVSLVLAGSAPGRASDRGAMSIQTYGLNRLGLVQDRTRLLRRLEFLGEMILELGITVDELKALPAQAALDNAIKRLEVMQGRMLVEIKAMAAPMEPYSEMVGAWLNNYIEQLEA

SEQ ID NO: 84522 - protein, 167 aa, Pseudomonas syringae pv. syringae
MMALVGDIARRLAMMNPALENPLQGNGIVLIDEVDLHLHPKWQRSLIAQLTTTFPNCQFLLTTHSPLVISDSKDVLVYVMDDGELREQDSLYGLDANQVLSSVMDTGIRNEAVQTCLDEMQHFLIRGELDEARTLYGVLADQLPADHIELARASLLIRKLEIRREKD

SEQ ID NO: 84523 - protein, 216 aa, Pseudomonas syringae pv. syringae; identical to SEQ ID NO: 81085

SEQ ID NO: 84524 - protein, 336 aa, Pseudomonas syringae pv. syringae; identical to SEQ ID NO: 81082

SEQ ID NO: 84525 - protein, 215 aa, Pseudomonas syringae pv. syringae; identical to SEQ ID NO: 80909

SEQ ID NO: 84526 - protein, 335 aa, Pseudomonas savastanoi
MTAQGGAFERQEWHVSLERSSLQTNFSALNSLVFSENLISIDVSTHGDLPVFAVYQANRRWLTMSVTAELAAQSKPSRLDAYTSWFDAASNLKNFETWFIGKTLERFQRLSRAGSSSVFNDELTWINSAIQCALPDAKGIEYDMELRALVVDMYDRKIPFNDLSDGQRGMVALFADIARRICLLNPHMGKDVLSKTNGIIVIDELDIHLHPGWQRTIAPALKKAFPSIQFIAASHSPQVIGSLQPGEVILLNNHDGSHPRATYGLDSSTILEEVMGVLQREPEIEELLDELFSTLENDELEKARLQLDALKQKAPDLPEFAGAEALLKRKELIGR

SEQ ID NO: 84527 - protein, 227 aa, Pseudomonas savastanoi; identical to SEQ ID NO: 81187

SEQ ID NO: 84528 - protein, 451 aa, Pseudomonas savastanoi pv. glycinea; identical to SEQ ID NO: 81314

SEQ ID NO: 84529 - protein, 227 aa, Pseudomonas savastanoi pv. glycinea
MARSHRSPPATSDTSTSRWSSFGYKAQVLGCLLEEQYGLCCYSEIRPDRVGLSFHIEHVENKSQNPQRTFDYNNLAACALDSQSDLEVLKIQGAEVFGGHASGKSKGVDMARFVSCHMPDCSRFFAYLSDGRVVPADGLSPEEVDRAEYTIGLLNLNSPYLQGLRQSWWDELEALFEEHVNQNMSLHCLAGIDLIPVGANLSQFFSITRNFFGGIAEEVLEQEAGRW

SEQ ID NO: 84530 - protein, 300 aa, Pseudomonas syringae pv. cilantro; identical to SEQ ID NO: 81076

SEQ ID NO: 84531 - protein, 214 aa, Pseudomonas syringae pv. cilantro
MRRIIKGTEPASFTEWKASANEDWMPTYPTLQNPQKRELHNSLLQEQHFSCCYCGREIELDSSHIEHFKPQEHYLPLALEYSNLHASCLRETKPGNPLHCGHHKSNWFDETLHIFPLADDCEQRFRYLLTGKIQNTESADLPAATMIEKLALDIAYLTRRRQEAITGIFDEQFILSASEAELTHLVQSLRSGDAGKQVAFGHVVARYAEQFLTP

SEQ ID NO: 84532 - protein, 452 aa, Pseudomonas syringae pv. cilantro
MEIKSFRLINVGRFSDLEVALAPTERHASRVTVLVGNNGAGKTTLLRSVATSLSWLVARVRTPKGVGSRIDEDTIQAGAVTSSILIDAYDDLILHPLVSGPEYHWGITTTRKGRNPTSSTVLNELNWLADGYRSKLTSKIDASLPILAFYPVERSVLDVQPKIHGKRTFDQLDGYDNALGRGVDFRRFFEWFREREDSENETGISTELLNELSQKILVDTELWKVLTREHASSRDRQLTAVRNAVAAFMPGFTNLRVKRKPRLHMAIDKDGQTLNVSQLSQGEKSMMALVGDIARRLAMMNPALENPLHGNGIVLIDEVDLHLHPKWQRSLIAQLTTTFPNCQFLLTTHSPLVISDSKDVLVYVMDDGELREQDSLYGLDANQVLLSVMDTDIRNAAVQKRLDRLQELLMAGDLEEVRSLYKKLAIDLPSGHIELAKASLLIRKLELRRAKD

SEQ ID NO: 84533 - protein, 207 aa, Pseudomonas syringae pv. cilantro
MVLEQWARSNKGKKYEDLVDRDDIKDAIRHACVREQHGLCAYCCRRITLEKTSAHNEHVEAQRLAPHRTLDFKNIVASCNQPGRCGKAHGHQLLRLTPLMVECETELQFELSGLVRGNTDRAQDCINVLNLGSDQASNKWLISERKAMIDNLLYSQGMNSSGLGLESDDVLDLLHDELLVPDEQQQLQAFSPVLVNVIRRLKALQAS

SEQ ID NO: 84534 - protein, 458 aa, Pseudomonas syringae pv. cilantro
MRLDTLRMQNYRCFGELEIDFDPHLTVLIASNGGGKTTILDAARVALWPFVKGFDLGGQTGKSATIQIEDVRLTQFGSGNMESQVPSVIEAKGVWWENAGDSSWLQQRVSLKKSTNTIGDAGSKALTLYGKSLQDSVRSDARVTLPMVTYLGTSRLWFEGRFSSAAAQTTLDKSEYSRTSAYLNCLSYSSSFKTFTAWYIWMYRSYREAQLIALERGEEMSDAGQRFEKIISAVKEAIDRLIKAPTGWHRLEYSASHQQQLVMHHPDQGILPVEMLSDGLRNTIAMVADLAFRACRLNPHLGELAPLQTPGIALIDEVDMFLHPFWQQTIVGSLRAAFPAMQFIVTTHSPQVLSTVRRENIRVIGKDAQGRLIASRPLAMTYGEPSNSVLRSVMQVDPQPPVDEKPGLLQLTEWVDKGRYNEPQAILLMQQITEALTEQHPQLQRLQRSIKRQKALKG

SEQ ID NO: 84535 - protein, 189 aa, Pseudomonas syringae pv. cilantro
MCCYSEIRPDRLGLSFHIEHVENKSQHPQRTFDYNNLAACALDSQSDLEVLKIQGAEVFGGHASGKSKGVDMARFVSCHMPDCSRFFAYLSDGRVVPADGLTLDEVDRAGYTIDLLNLNSPYLQDLRQSWWDELETLFEDHVDQDMSLHCLAGIDLIPVGASLSQFFSITRNFFGGIAEEVLAQEAGRC

SEQ ID NO: 84536 - protein, 358 aa, Pseudoalteromonas sp. SW0106-04
MNGRHIDQKYGIFLITGDNGTGKTRFLTKLSQRIKKDLSKQICLYDKLICLSGTVYEKYPKPDKNPAYFSSNSYYYFGYKANNNMFSEITPFRAILNSMFSNAGLVEERSGYVAKLLKEIGFSSEIKLDFRWARNSRENESFTPLILDFDKDTTRLYEHSVKELIFQEKAHLKTIFFIKNGNDIPISGLSSGERLFLITILSLCFTVTNNSLTIFDEPENSMHPKWQEKITRVLCNIFQRYAPNSALYIATHSPLVLSSVPNELAHIFNRRTKAPSAENAKYNGNNVDTVLKQHFGLKSARSLEFIEAMQSCLTAMTHQHIDFKKKFETLKEMQISLDENDPLYDAYNTITAFAEETL

SEQ ID NO: 84537 - protein, 230 aa, Pseudoalteromonas sp. SW0106-04
MNLGPSKLSVTCHRKIINRKQNKKLIQEYLAGKLKWSDKSLAKLKKSVRQQLRVSQQGRCIFCRRVIKGERRNVNEDIEHFLDKSKSYYRRWTFSAVNLTLACRACNFVKSTKDLGDSKVQRSKGLYSGVGTFKWIHPYFDSYHDNIEIKKGWVYIVKKGSPRAHAATTMIKQCELDKIETIEKNSECIKARQLRLTILASKALSKGQLARSKKLLDQLKIEQNLNWFDY

SEQ ID NO: 84538 - protein, 436 aa, Pseudomonas amygdali pv. lachrymans
MRLDTLRMQNYRCFGEFEIDFDPHLTILIASNGGGKTTILDAARVALWPFVKGFDLGGQTGKSATIQIEDVRLAQFGSGNMESQVPSVIEAKGVWWESAVESSWVQQRVSLKKSTNTIGDAGSKALTSYGKSLQDRVRSDAHVTLPMVSYLGTSRLWFEGRFSSAAAQTTLDKSEYSRTSAYLNCLSYSSSFKTFTAWYIWMYRSYREAQLIALERDEEMSDAGQRFEKIISAVKEAIDRLIKAPTGWHRLEYSASHQQQLVMHHPDQGVLPVEMLSDGLRNTIAMVADLAFRACKLNPHLGERAPLQTPGIALIDEVDMFLHPFWQQTIVGSLRAAFPAMQFIVTTHSPQVLSTVRRENIRVIGKDAQGRLIASRPLAMTYGEPSNSVLRSVMQVDPQPPVDEKPGLLQLTEWVDKGRYDEPQAILLMQQITDSH

SEQ ID NO: 84539 - protein, 195 aa, Pseudomonas amygdali pv. lachrymans; identical to SEQ ID NO: 81091

SEQ ID NO: 84540 - protein, 287 aa, Pseudomonas amygdali pv. lachrymans
MPVFAVYQANRRWLTMSVTAELAAQSKPSRLDAYTSWFDAASNLKNFETWFIGKTLERFQRLSRAGSSSVFNDELTWINSAIQCALPDAKGIEYDMELRALVVDMDDRKIPFNDLSDGQRGMVALFADIARRICLLNPHMGKDVLSKTNGIIVIDELDIHLHPGWQRTIAPALKKAFPSIQFIAASHSPQVIGSLQPGEVILLNNHDGSHPRATYGLDSSTILEEVMGVPQREPEIEALLDELFSTLENNELEKARLQLDALKQKAPDLPEFAGAEALLKRKELIGR

SEQ ID NO: 84541 - protein, 227 aa, Pseudomonas amygdali pv. lachrymans; identical to SEQ ID NO: 81089

SEQ ID NO: 84542 - protein, 705 aa, Pseudomonas amygdali pv. lachrymans; identical to SEQ ID NO: 81074

SEQ ID NO: 84543 - protein, 365 aa, Pseudomonas amygdali pv. lachrymans; identical to SEQ ID NO: 81075

SEQ ID NO: 84544 - protein, 300 aa, Pseudomonas amygdali pv. lachrymans; identical to SEQ ID NO: 81076

SEQ ID NO: 84545 - protein, 214 aa, Pseudomonas amygdali pv. lachrymans; identical to SEQ ID NO: 81077

SEQ ID NO: 84546 - protein, 272 aa, Pseudomonas amygdali pv. lachrymans
MSVTAELAAQSKPSRLDAYTSWFDAASNLKNFETWFIGKTLERFQRLSRAGSSSVFNDELTWINSAIQCALPDAKGIEYDMELRALVVDMDDRKIPFNDLSDGQRGMVALFADIARRICLLNPHMGKDVLSKTNGIIVIDELDIHLHPGWQRTIAPALKKAFPSIQFIAASHSPQVIGSLQPGEVILLNNHDGSHPRATYGLDSSTILEEVMGVPQREPEIEALLDELFSTLENNELEKARLQLDALKQKAPDLPEFAGAEALLKRKELIGR

SEQ ID NO: 84547 - protein, 227 aa, Pseudomonas amygdali pv. lachrymans; identical to SEQ ID NO: 81089

SEQ ID NO: 84548 - protein, 474 aa, Pseudomonas amygdali pv. lachrymans
MAMLFVSPFYGLHLVCCPNCNGRCFPYAWPDDETGENIVRLDTLRMQNYRCFGEFEIDFDPHLTILIASNGGGKTTILDAARVALWPFVKGFDLGGQTGKSATIQIEDVRLAQFGSGNMESQVPSVIEAKGVWWESAVESSWVQQRVSLKKSTNTIGDAGSKALTSYGKSLQDRVRSDAHVTLPMVSYLGTSRLWFEGRFSSAAAQTTLDKSEYSRTSAYLNCLSYSSSFKTFTAWYIWMYRSYREAQLIALERDEEMSDAGQRFEKIISAVKEAIDRLIKAPTGWHRLEYSASHQQQLVMHHPDQGVLPVEMLSDGLRNTIAMVADLAFRACKLNPHLGERAPLQTPGIALIDEVDMFLHPFWQQTIVGSLRAAFPAMQFIVTTHSPQVLSTVRRENIRVIGKDAQGRLIASRPLAMTYGEPSNSVLRSVMQVDPQPPVDEKPGLLQLTEWVDKGRYDEPQAILLMQQITDSH

SEQ ID NO: 84549 - protein, 227 aa, Pseudomonas amygdali pv. lachrymans; identical to SEQ ID NO: 84529

SEQ ID NO: 84550 - protein, 300 aa, Pseudomonas syringae pv. maculicola; identical to SEQ ID NO: 81076

SEQ ID NO: 84551 - protein, 214 aa, Pseudomonas syringae pv. maculicola; identical to SEQ ID NO: 80883

SEQ ID NO: 84552 - protein, 300 aa, Pseudomonas syringae pv. maculicola; identical to SEQ ID NO: 81076

SEQ ID NO: 84553 - protein, 214 aa, Pseudomonas syringae pv. maculicola; identical to SEQ ID NO: 81077

SEQ ID NO: 84554 - protein, 452 aa, Pseudomonas amygdali pv. mellea; identical to SEQ ID NO: 80906

SEQ ID NO: 84555 - protein, 206 aa, Pseudomonas amygdali pv. mellea; identical to SEQ ID NO: 80907

SEQ ID NO: 84556 - protein, 455 aa, Pseudomonas amygdali pv. mellea
MRLDTLRMQNYRCFGEFEIDFDPHLTILIASNGGGKTTILDAARVALWPFVKGFDLGGQTGKSATIQIEDVRLAQFGSGNMESQVPSVIEAKGVWWESAVESSWLQQRVSLKKSTNTIGDAGSKALTSYGKSLQECVRSDAHVTLPMVTYLGTSRLWFEGRFSSAAAQTTLDKSEYSRTSAYLNCLSYSSSFKTFTAWYIWMYRSYREAQLIALERDEEMSDAGQRFEKIISAVKEAIDRLIKAPTGWHRLEYSASHQQQLVMHHPDQGVLPVEMLSDGLRNTIAMVADLAFRACKLNPHLGERAPLQTPGIALIDEVDMFLHPFWQQTIVGSLRAAFPAMQFIVTTHSPQVLSTVRRENIRVIGKDAQGRLIASRPLAMTYGEPSNSVLRSVMQVDPQPPVDEKPGLLQLTEWVDKGRYDEPQAILLMQQITEALTEQHPQLQRSIKRQKALRG

SEQ ID NO: 84557 - protein, 195 aa, Pseudomonas amygdali pv. mellea; identical to SEQ ID NO: 81061

SEQ ID NO: 84558 - protein, 272 aa, Pseudomonas amygdali pv. mellea
MSVTAELAAQSKPSRLDAYTSWFDAASNLKNFETWFIGKTLERFQRLSRVGSSSVFNDELTWINSAIQCALPDAKGIEYDMELRALVVDMDDRKIPFNDLSDGQRGMVALFADIARRICLLNPHMGKDVLSKTNGIIVIDELDIHLHPGWQRTIAPALKKAFPNIQFIAASHSPQVIGSLQPGEVILLNNHDGSHPRATYGLDSSSILEEVMGVPQREPEIEALLDELFSTLENNELEKARLQLDALKQKAPDLPEFAGAEALLKRKELIGR

SEQ ID NO: 84559 - protein, 214 aa, Pseudomonas amygdali pv. mellea; identical to SEQ ID NO: 80905

SEQ ID NO: 84560 - protein, 335 aa, Pseudomonas amygdali pv. myricae
MTAQGGAFERQEWHVSLERSSLQTNFSALNSLVFSENLISIDVSTHGDLPVFAVYQANRRWLTMSVTAELAAQSKPSRLDAYTSWFDAASNLKNFETWFIGKTLERFQRLSRAGSSSVFNDELTWINSAIQCALPDAKGIEYDMELRALVVDMDDRKIPFNDLSDGQRGMVALFADIARRICLLNPHMGKDVLSKTNGIIVIDELDIHLHPGWQRTIAPALKKAFPSIQFIAASHSPQVIGSLQPGEVILLNNHDGSHPRATYGLDSSTILEEVMGVPQREPEIEALLDELFSTLENDELEKARLQLDALKQKAPDLPEFAGAEALLKRKELIGR

SEQ ID NO: 84561 - protein, 227 aa, Pseudomonas amygdali pv. myricae
MRRVIKGTEPASLTEWKASAHEDWTPTYPTLQNPQKRDLHNCLLQEQNFSCCYCGREIELDSSHIEHFRPQDHYLPLALEYSNLHASCLRETTPGNPLHCGHYKGNWFDEDLHISPTEDDCEQRFRYLLTGKIQSTSHTDLPATTMIEKLALDIAYLTKRRQEAITRVFDEQILASISDTELTLLVQGLRSGDANKQLAFSHVVARYAEQFLASLNPPPEKSSVKNT

SEQ ID NO: 84562 - protein, 272 aa, Pseudomonas savastanoi pv. phaseolicola; identical to SEQ ID NO: 84558

SEQ ID NO: 84563 - protein, 214 aa, Pseudomonas savastanoi pv. phaseolicola; identical to SEQ ID NO: 80905

SEQ ID NO: 84564 - protein, 452 aa, Pseudomonas savastanoi pv. phaseolicola; identical to SEQ ID NO: 80906

SEQ ID NO: 84565 - protein, 206 aa, Pseudomonas savastanoi pv. phaseolicola; identical to SEQ ID NO: 80907

SEQ ID NO: 84566 - protein, 448 aa, Pseudomonas savastanoi pv. phaseolicola
MQNYRCFGEFEIDFDPHLTILIASNGGGKTTILDAARVALWPFVKGFDLGGQTGKSATIQIEDVRLAQFGSGNMESQVPSVIEAKGVWWESAVESSWLQQRVSLKKSTNTIGDAGSKALTSYGKSLQECVRSDAHVTLPMVTYLGTSRLWFEGRFSSAAAQTTLDKSEYSRTSAYLNCLSYSSSFKTFTAWYIWMYRSYREAQLIALERDEEMSDAGQRFEKIISAVKEAIDRLIKAPTGWHRLEYSASHQQQLVMHHPDQGVLPVEMLSDGLRNTIAMVADLAFRACKLNPHLGERAPLQTPGIALIDEVDMFLHPFWQQTIVGSLRAAFPAMQFIVTTHSPQVLSTVRRENIRVIGKDAQGRLIASRPLAMTYGEPSNSVLRSVMQVDPQPPVDEKPGLLQLTEWVDKGRYDEPQAILLMQQITEALTEQHPQLQRSIKRQKALRG

SEQ ID NO: 84567 - protein, 195 aa, Pseudomonas savastanoi pv. phaseolicola; identical to SEQ ID NO: 81061

SEQ ID NO: 84568 - protein, 272 aa, Pseudomonas savastanoi pv. phaseolicola; identical to SEQ ID NO: 84558

SEQ ID NO: 84569 - protein, 214 aa, Pseudomonas savastanoi pv. phaseolicola; identical to SEQ ID NO: 80905

SEQ ID NO: 84570 - protein, 455 aa, Pseudomonas savastanoi pv. phaseolicola; identical to SEQ ID NO: 84556

SEQ ID NO: 84571 - protein, 195 aa, Pseudomonas savastanoi pv. phaseolicola; identical to SEQ ID NO: 81061

SEQ ID NO: 84572 - protein, 452 aa, Pseudomonas savastanoi pv. phaseolicola; identical to SEQ ID NO: 80906

SEQ ID NO: 84573 - protein, 206 aa, Pseudomonas savastanoi pv. phaseolicola; identical to SEQ ID NO: 80907

SEQ ID NO: 84574 - protein, 317 aa, Pseudomonas savastanoi pv. phaseolicola
MTEKSDTSLPLLAFYPVERSVIEIPLKVHARHTFDQLDGYDNALGRGVDFRRFFEWFREREDSENETGISIELLNELSQKILIDTELWKVLTREHASSRDRQLTAVRTAVEAFMPGFTKLRVKRKPRLHMAIDKDGKTLNVSQLSQGEKSMMALVGDIARRLAMMNPALENPLHGNGIVLIDEVDLHLHPKWQRSLIAQLTITFPNCQFLLTTHSPLVISDSKDVLVYVMDDGELHEQDSLYGLDANQVLSSVMDTDIRNEEIQTVLDKLQHFLMRGELDEARTLYAGLTDELPANHIELAKASLLIRKLEVRREKD

SEQ ID NO: 84575 - protein, 206 aa, Pseudomonas savastanoi pv. phaseolicola; identical to SEQ ID NO: 80907

SEQ ID NO: 84576 - protein, 272 aa, Pseudomonas savastanoi pv. phaseolicola; identical to SEQ ID NO: 84558

SEQ ID NO: 84577 - protein, 214 aa, Pseudomonas savastanoi pv. phaseolicola; identical to SEQ ID NO: 80905

SEQ ID NO: 84578 - protein, 458 aa, Pseudomonas savastanoi pv. phaseolicola
MRLDTLRMQNYRCFGEFEIDFDPHLTILIASNGGGKTTILDAARVALWPFVKGFDLGGQTGKSATIQIEDVRLAQFGSGNMESQVPSVIEAKGVWWESAVESSWLQQRVSLKKSTNTIGDAGSKALTSYGKSLQECVRSDAHVTLPMVTYLGTSRLWFEGRFSSAAAQTTLDKSEYSRTSAYLNCLSYSSSFKTFTAWYIWMYRSYREAQLIALERDEEMSDAGQRFEKIISAVKEAIDRLIKAPTGWHRLEYSASHQQQLVMHHPDQGVLPVEMLSDGLRNTIAMVADLAFRACKLNPHLGERAPLQTPGIALIDEVDMFLHPFWQQTIVGSLRAAFPAMQFIVTTHSPQVLSTVRRENIRVIGKDAQGRLIASRPLAMTYGEPSNSVLRSVMQVDPQPPVDEKPGLLQLTEWVDKGRYDEPQAILLMQQITEALTEQHPQLQRLQRSIKRQKALRG

SEQ ID NO: 84579 - protein, 195 aa, Pseudomonas savastanoi pv. phaseolicola; identical to SEQ ID NO: 81061

SEQ ID NO: 84580 - protein, 452 aa, Pseudomonas savastanoi pv. phaseolicola; identical to SEQ ID NO: 80906

SEQ ID NO: 84581 - protein, 206 aa, Pseudomonas savastanoi pv. phaseolicola; identical to SEQ ID NO: 80907

SEQ ID NO: 84582 - protein, 455 aa, Pseudomonas savastanoi pv. phaseolicola; identical to SEQ ID NO: 84556

SEQ ID NO: 84583 - protein, 195 aa, Pseudomonas savastanoi pv. phaseolicola; identical to SEQ ID NO: 81061

SEQ ID NO: 84584 - protein, 272 aa, Pseudomonas savastanoi pv. phaseolicola; identical to SEQ ID NO: 84558

SEQ ID NO: 84585 - protein, 214 aa, Pseudomonas savastanoi pv. phaseolicola; identical to SEQ ID NO: 80905

SEQ ID NO: 84586 - protein, 272 aa, Pseudomonas amygdali pv. sesami
MSVTAELAAQSKPSRLDAYTSWFDAASNLKNFETWFIGKTLERFQRLSRAGSSSVFNDELTWINSAIQCALPDAKGIEYDMELRALVVDMDDRKIPFNDLSDGQRGMVALFADIARRICLLNPHMGKDVLSKTNGIIVIDELDIHLHPGWQRTIAPALKKAFPSIQFIAASHSPQVIGSLQPGEVILLNNHDGSHPRATYGLDSSTILEEVMDVPQREPEIEALLDELFSTLENNELEKARLQLDALKQKAPDLPEFAGAEALLKRKELIGR

SEQ ID NO: 84587 - protein, 145 aa, Pseudomonas amygdali pv. sesami
MRRVIKGAEPASFTEWKASANEDWMPTYPTLQNPQKRDLHNCLLQEQNFSCCYCGREIELDSSHIEHFRPQDHYLPLALEYSNLHASCLRETTPGNPLHCGHYKGNWFDEDLHISPTEAIANSASVICSQGKSKARPTQIFPPRR

SEQ ID NO: 84588 - protein, 452 aa, Pseudomonas amygdali pv. sesami
MEIKSFKLVNVGRFSDLEVALAPTERHASKVTVLVGNNGAGKTTLLKSVATSLSWLVARVRTPKGAGSRIDEDMVQNGTATSSITIRIEDVLISDDEINPLESEWAITATRKGRNATSSTVLSELNRLADGYRSKLTEKSDTSLPLLAFYPVERSVIEIPLKVLARHTFDQLDGYDNALGRGVDFRRFFEWFREREDSENETGISTELLNELSQKILIDTELWKVLTREHASSRDRQLTAVRTAVEAFMPGFTKLRVKRKPRLHMAIDKDGKTLNVSQLSQGEKSMMALVGDIARRLAMMNPALENPLHGNGIVLIDEVDLHLHPKWQRSLIAQLTTTFPNCQFLLTTHSPLVISDSKDVLVYVMDDGELHEQDSLYGLDANQVLSSVMDTDIRNEEIQTVLDKLQHFLMRGELDEARTLYTELADELPANHIELAKASLLIRKLEVRREKD

SEQ ID NO: 84589 - protein, 206 aa, Pseudomonas amygdali pv. sesami
MLEKWKRANKGKKYADLVGREDIKDAIRHACVTEQHGLCAYCCCRITAEKGSACNEHVEAQHLAPHRTLDFGNIVASCTKAGRCDAAHGHQTLPLTPLMIECEKELQFELSGLVAGTTPRACASINVLNLGDTRESNRDLVVKRKEMIDTLLFSYSIDPAELAVEADDVLDLLRNDLLELDAQQLLQAFSPVLVNVILGIQNARQP

SEQ ID NO: 84590 - protein, 766 aa, Pseudomonas amygdali pv. sesami
MQRIERPDQPPTVLMSPEAQASRKAMLEFWQLGPERRAQTSVPVIGYSSEEPQLRDALAAMSGHRCAFCEASDGLQVYRFRPVGNALPLAKSSDAHLYYLWLADAWHNLLPICAGCVPIEPHFPVRGARCPLPSVEQVQTYVARGNGIWSWGAPNERAQLLDPAQEPQFTKHLIPTLDGELLPGTPRGEATIYTFDLNRSERRDQRYHTYESRLDDLQAFLAASSQAGIEPILDFSDLEFGGTWYLLLRRLLNHVPMTGIARNLSASQIAPALQRLAQSTDAAAIFEQSLLTLRREDIRLRANGRQAMAPNPAKDSVCAIQINNFKAIEQLELNLKEHSARTADGKIKPVPSLVILGENATGKSSILEAIALTLVPAAVRNALAVPWSDLVIDPSQLGIERSYQAGHAQIRIGLTNQHWVTLSIDHHTHLHESSLGNQQVPVFAYGAFRRFTRTSPRTTTHSHVRNLFDGTMLPNPEPWLIALRQDRFDMVIRTLRDVLAVEGDFDVIQRNPGSRDLRVVTAVTELDGTTRYNRTPFHAVSSGYRSMLAMICDIMKGLMSPAVYPEFESFQSARGVVLIDEIEAHLHPRWKVQVMSRLRAALPNITFIVTTHDPLCLRGMEDGEVAVLQRIPTSESQVESQLPIIIESMEGLPSVANLRLEQLLTSDFFQMLSTDDAHTDRRLAMIADLVGARARGEVLTAEDERVLNSFRNDIASALPIGSSEVHQIIQEAVAEYLSKRRIASSQTLRRLRREAKDEILAALERF

SEQ ID NO: 84591 - protein, 313 aa, Pseudomonas amygdali pv. sesami
MRRVHRASVAAPASLQPGGGGAAELIRARTHIARPILAGATKKSFEYAAYKKDDVRTALDQLFHGKCAYCETFYAASAPVDIEHYRPKGGVSEEPAHGGYWWIAMQWENLLPSCIDCNRKRGQRIVEASTSLGVLASTASISWRQSGKHDSFPLAHTGVRATAEATDFSREHPLLINPCEEDPATYLMHIIDPALPTGLLVPVGDQQQQARGAVSIQTYGLNRLKLFEDRNRLLRTLEFLGDLVIELTETIADLETPAVQHRLIGTPAFRVSARLRLLRDRLLAELKAATAPEVPYATMASAWLEQFKLRFIH

SEQ ID NO: 84592 - protein, 458 aa, Pseudomonas syringae pv. maculicola str. M6
MRLDTLRMQNYRCFGEFEIDFDPHLTILIASNGGGKTTILDAARVALWPFVKGFDLGGQTGKSATIQIEDVRLAPFGSGNMESQVPSVIEAKGIWWEKADDCRWLQQRVSLKKSTNTIGDAGSKALTLYGKSLQDSVRSDAHVTLPMVTYLGTSRLWFEGRFSSAAAQTTLDKSEYSRTSAYLNCLSYSSSFKTFTAWYIWMYRSYREAQLIALERGEEMSDTGQRFEKIISAVKEAIDRLIKAPTGWHRLEYSASHQQQLVMHHPDQGILPVEMLSDGLRNTIAMVADLAFRACKLNPHLGERAPLQTPGIALIDEVDMFLHPFWQQTIVGSLRAAFPAMQFIVTTHSPQVLSTVRRENIRVIGKDAQGRLIASRPLAMTYGEPSNSVLRSVMQVDPQPPVDEKPGLLQLTEWVDKGRYDEPQAILLMQQITEALTEQHPQLQRLQRSIKRQKALRG

SEQ ID NO: 84593 - protein, 189 aa, Pseudomonas syringae pv. maculicola str. M6
MCCYSEIRPDRVGLSFHIEHVENKSQHPQRTFDYNNLAACALDSQSDLDVLKIQGAEVFGGHASGKSKGVDMARFVSCHMPDCSRFFAYLSDGRVVPADGLSLDEVDRAEYTIDLLNLNSPYLQDLRQSWWDELEALFEEHVDQDMSLHCLAGIDLIPVGASLSQFFSITRNFFGGIAEEVLDQEAGRW

SEQ ID NO: 84594 - protein, 441 aa, Pseudomonas syringae pv. maculicola str. M6
MNLTRLCLKNYRRFAEFDIEFDPQLTVISARNGQGKTSVLEAIVAALGPFVGSFDQGMSRHIERTDARYARVGEGFESEQQFPVIISAEMSNPAKRWQRALNGPKSRTTTKEAEPLAAWGKELQLLLRSDSAISLPVVRYYSSRRLWVSHKNVSSKAILTESRTAGYEDCLSAFSTYVQLQEWMRKATLAVIQQKQQPGYEHSNLAPRLQGIRNAVNEVMAEEGWSDFHYSLTYEELSMSHADHSALPLGLLSDGVRAMITLVADLALRCSRLNGHLKEQASLQTTGIVLIDEVDLHLHPAWQQRVVASLRKAFPNIQFIVSTHSPQVLSTVKRECIRMVFQDADENWQAACPPQEVKGVESAIALNDIMGVNPIPPVAEAFWVAEYTAKIENGSHEDHNGLALRKKLLDFYGAQHQVILDADRLIRFQTFKLQKHSNTKG

SEQ ID NO: 84595 - protein, 168 aa, Pseudomonas syringae pv. maculicola str. M6
MRCAYCEGAIFHEGHIEHFRRKNPDHFPELTFAWSNLFLACGSTQHCGHHKDRRSAPAYDPDLLIKPDEHDPEHYLYFHSSGKVLARNNLSDHENSCATETIRVFGLDNPALEGARANAVRSYRKMHDADLSEIASWSDAERDAYFRGEIEATRCLPYATTIRHFLQK

SEQ ID NO: 84596 - protein, 272 aa, Pseudomonas syringae pv. maculicola; identical to SEQ ID NO: 84558

SEQ ID NO: 84597 - protein, 214 aa, Pseudomonas syringae pv. maculicola; identical to SEQ ID NO: 80905

SEQ ID NO: 84598 - protein, 458 aa, Pseudomonas syringae pv. maculicola; identical to SEQ ID NO: 84578

SEQ ID NO: 84599 - protein, 195 aa, Pseudomonas syringae pv. maculicola; identical to SEQ ID NO: 81061

SEQ ID NO: 84600 - protein, 379 aa, Pseudomonas syringae pv. maculicola
MVQNGTATSSITIRIEDVLISDDEINPLETEWGITATRKGRNATSSTVLSELNRLADGYRSKLTEKSDTSLPLLAFYPVERSVIEIPLKVHARHTFDQLDGYDNALGRGVDFRRFFEWFREREDSENETGISIELLNELSQKILIDTELWKVLTREHASSRDRQLTAVRTAVEAFMPGFTKLRVKRKPRLHMAIDKDGKTLNVSQLSQGEKSMMALVGDIARRLAMMNPALENPLHGNGIVLIDEVDLHLHPKWQRSLIAQLTITFPNCQFLLTTHSPLVISDSKDVLVYVMDDGELHEQDSLYGLDANQVLSSVMDTDIRNEEIQTVLDKLQHFLMRGELDEARTLYAGLTDELPANHIELAKASLLIRKLEVRREKD

SEQ ID NO: 84601 - protein, 206 aa, Pseudomonas syringae pv. maculicola; identical to SEQ ID NO: 80907

SEQ ID NO: 84602 - protein, 451 aa, Pseudomonas savastanoi pv. glycinea; identical to SEQ ID NO: 81314

SEQ ID NO: 84603 - protein, 195 aa, Pseudomonas savastanoi pv. glycinea; identical to SEQ ID NO: 81061

SEQ ID NO: 84604 - protein, 272 aa, Pseudomonas savastanoi pv. glycinea
MSVTAELAAQSKPSRLDAYTSWFDAASNLKNFETWFIGKTLERFQRLSRVGSSSVFNDELTWINSAIQCALPDAKGIEYDMELRALVVDMDDRKIPFNDLSDGQRGMVALFADIARRICLLNPHMGKDVLSKTNGIIVIDELDIHLHPGWQRTIAPALKKAFPSIQFIAASHSPQVIGSLQPGEVILLNNHDGSHPRATYGLDSSSILEEVMGVPQREPEIEALLDELFSTLENNELEKARLQLDALKQKAPDLPEFAGAEALLKRKELIGR

SEQ ID NO: 84605 - protein, 214 aa, Pseudomonas savastanoi pv. glycinea; identical to SEQ ID NO: 81051

SEQ ID NO: 84606 - protein, 335 aa, Pseudomonas amygdali pv. morsprunorum
MTAQGGAFERQEWHVSLERSSLQTNFSALNSLVFSENLISIDVSTHGDLPVFAVYQANRRWLTMSVTAELAAQSKPSRLDAYTSWFDAASNLKNFETWFIGKTLERFQRLSRAGSSSVFNDELTWINSAIQCALPDAKGIEYDMELRALVVDMYDRKIPFNDLSDGQRGMVALFADIARRICLLNPHMGKDVLSKTNGIIVIDELDIHLHPGWQRTIAPALKKAFPSIQFIAASHSPQVIGSLQPGEVILLNNHDGSHPRATYGLDSSTILEEVMGVPQREPEIEALLDELFSTLENNELEKARLQLDALKQKAPDLPEFAGAEALLKRKELIGR

SEQ ID NO: 84607 - protein, 227 aa, Pseudomonas amygdali pv. morsprunorum
MRRVIKGTEPASLAEWKASANEDWTPTYPTLQNPQKRDLHNCLLQEQNFSCCYCGREIELDSSHIEHFRPQDHYLPLALEYSNLHASCLRETTPGNPLHCGHYKGNWFDEDLHISPTEDDCEQRFRYLLTGKIQSTSHTDLPATTMIEKLALDIAYLTKRRQEAITRVFDEQILASISDTELTLLVQGLRSGDANKQLAFSHVVARYAEQFLASLNPPPEKSSVKNT

SEQ ID NO: 84608 - protein, 272 aa, Pseudomonas savastanoi pv. glycinea; identical to SEQ ID NO: 84604

SEQ ID NO: 84609 - protein, 214 aa, Pseudomonas savastanoi pv. glycinea; identical to SEQ ID NO: 81051

SEQ ID NO: 84610 - protein, 458 aa, Pseudomonas savastanoi pv. glycinea; identical to SEQ ID NO: 84578

SEQ ID NO: 84611 - protein, 227 aa, Pseudomonas savastanoi pv. glycinea; identical to SEQ ID NO: 84529

SEQ ID NO: 84612 - protein, 451 aa, Pseudomonas savastanoi pv. glycinea; identical to SEQ ID NO: 81314

SEQ ID NO: 84613 - protein, 195 aa, Pseudomonas savastanoi pv. glycinea; identical to SEQ ID NO: 81061

SEQ ID NO: 84614 - protein, 272 aa, Pseudomonas savastanoi pv. glycinea; identical to SEQ ID NO: 84604

SEQ ID NO: 84615 - protein, 214 aa, Pseudomonas savastanoi pv. glycinea; identical to SEQ ID NO: 81051

SEQ ID NO: 84616 - protein, 684 aa, Pseudomonas syringae pv. maculicola
MSPIFRPECPDYLLPYLANGPHELGQRWELEGYDSSRLDDVTRKFRRRLVEDLVQAFGPICCYCESYAHPGSGVVERHRPRRGVRGENPYLHLHSDWRNLYWACPVCDRYKGNRFPQMGLPLPERPYLETVEFEEPGLLDPCRDNPDEHLEFDETGQVSALSARGDITIKLLDLNRRQLIQTRFEQVQLLQSTGRIHSLDEHPAHRAVWRQLGEAGRHQARPYGFPGEVPRRQQNFDRYKEESSVEIIDTESKKGMGSYLAKAQYVTRLEIKNYGPIHHLDLNLEAPDGSNAPCYALLGENGVGKSTVLKALALTLSGEAYSKALRCTSNRLLAIGAHEGSVVVTLVGGDQVSMRFRRNKKIEFSNEHSRSLVVAYGATRLLATARHKSKPGKDHAKIDNLFDPFLPINDPTEWLKHLGRDRLDEVNDVLRKLMPKDHQVQVIVSEDASISLNASGVEGRQLRELSDGYQCMIGMAVDIMQVLSQSEAALDSSEGIVLIDELGNHFHPAWRLQCLPALREAFPGAQIIYSTHDPLCLRGLKEGEVAVLRRDRLNHIYALENLPSVANFRVDQLLTSEHFGLRSTVDPELDTKIEAYEELLSKPDRSDEEEQSLANLVAELTDTRYLGGSRRERMALQMLDTTGALDIPVDAAANVQQFTDSTVSKLKFLMQQVTPLTGQPRGKQ

SEQ ID NO: 84617 - protein, 273 aa, Pseudomonas syringae pv. maculicola
MIKVDRPRDSTPPHLILKGRDELRKHLTLEPKKRVFKEYSSKPVRKKLTELFGRKCMFCESLLAGTQSGDVEHYRPKGKVVVYPKTTAVAAHVVPGYFWLGAKWPNLLLSCSDCNRPRTQDDFDGNERVIGKANFFPLADETKRAIGTWRIRQEEPLLLNPCIDDPAEHLVFLEDGRVQARLIDGVPSAKGEASIYYLGLARAELLQMRARHGRMVRAAIRHTISALKEGRDPGADLEDLEAFLMPKEPYVAFSRMLIYKYMRQHLAALGLSV

SEQ ID NO: 84618 - protein, 300 aa, Pseudomonas syringae pv. maculicola; identical to SEQ ID NO: 81076

SEQ ID NO: 84619 - protein, 214 aa, Pseudomonas syringae pv. maculicola
MRRIIKGTEPASFTEWKASANEDWMPTYPTLQNPQKRELHNSLLQEQHSSCCYCGREIELESSHIEHFKPQEHCLPLALEYSNLHASCLRETKPGNPLHCGHHKSNWFDETLHISPLADDCEQRFRYLLTGKIQNTESADLAAATMIEKLALDIAYLTRRRQEAITGIFDDQFILSASEAELTHLVQSLRSGDAGKQVAFGHVVARYAEQLLAS

SEQ ID NO: 84620 - protein, 452 aa, Pseudomonas syringae pv. maculicola; identical to SEQ ID NO: 81250

SEQ ID NO: 84621 - protein, 216 aa, Pseudomonas syringae pv. maculicola; identical to SEQ ID NO: 81251

SEQ ID NO: 84622 - protein, 782 aa, Pseudomonas syringae pv. maculicola
MQRFARNEIPPPIFREKRFKLARKELLELFTLDTQELSQTRITGEELSLDLSQVGPIHDALGHLFHGKCAFCESQDLTVPYRFRAASSVTSAMGMVDSHLYYVWLANAWENIYPICIKCIPRQPAFFPVDGKRVPIPSLEQIRRYAAEDLGSWRTSGPRESAVLLDPCIDRNFERHLFPSVDGDLLPLSERGDTTIANFRLDRLDLNKARAARLREYREALLAPDRNRANLRYSNFQNLFDFQELEFGGLWYLQCRLIARYLSQKVGMVMPTGRSHIARTLKTLLFMGDYKLSHEQLKSWIEETDFGHLPLEIPPTDYGVLEPAPVIQKAVVPRIYPSLHSLQFDHFKVIEHLKLKLDIPTAESQLNNAALQPALLILGENATGKSSILEAIALALSPRETRRALNLTPGSLVLSPAQLGSNDTPTQFWARVRLGFDEGRDKVLSIDNAACKQFGPRLVPPVFAYGAFRQYQKKTPPVFEPAHGIINLFETDRLLANPEQWLLGLKGEDFNDVARALKIIMSVEGDIKVIEPAPDGKSCLIVTAPAGVVTKTPLNDVSSGYRTILAMVCDIMQRLMDRRINPDFPGLEHAQAVVLIDEVEAHLHPRWKIQIMQVLRRALPKITFIATSHDPLCLRGMQDGEIVVVHRRSRAGGANTQYATCIEQLHDLPDSTQLTIEQLLTSDFFNLMSTDQPATEKQLANVADVLNKLKRKETLTDEDEQVMRYFEKEIKEALPIGTSEAQRVVQEAVAQFLQERREKPSIEWGAIRTDAKTKILNILRNS

SEQ ID NO: 84623 - protein, 365 aa, Pseudomonas syringae pv. maculicola
MRFVDRSLIKKPRAMRPRKTTVSAADQELLDLTAHYEKKSAALAAALAADDPVAASASVAEEFSAKKPPFTTHRKDSVKTQLYAIFHGKCAYCETFYPAVAPVDVEHYRPKGGVSQDADHPGYWWLAMEWENLLPSCIHCNRLNKHATPKLSTQLVELRADGTGFSDQYKVTTGKGNHFPILGPRATPASRDCSTEYPLLLNPCLDDPQEHLAFHVDRKKLIGLVLPKPHNGAGLPAHVSTTDLLPAFADEIDQALRDKLSLRGAVSIHTYGLNRLGLVQDRTRVLRQLAFLEESVKDLCAMIQSLEARINDPFAVENIRIIKRMEALVERTAQHMADMAKPQAPYSTMVREFLQGFEARLVAIP

SEQ ID NO: 84624 - protein, 462 aa, Streptomyces sp. NRRL S-4
MYVSRVSVQDIKSFNGPRQVDLRLTRPDGTHAGWTVLAGRNGAGKTTLLQAIALALGGPGVARSLMPGFENWVTAGAAEGRVQVEVSYEKPYDLFTDGHPGSRTLTAGLTWAIPPEQVSASGLRYRVGVPSVAETGKEGSWNHEARRGPWEDNPLGWFCASYGPFRQLVGTADMDLLPHAFGPVARHVHLFQENAGLTDGISWLVGLHLRALEGRPGAEQLKLAALSILRDGLLPDGYRIDDVDSEGLWVEREGIRFPLREMSDGFRAGAALVVDILQQIDMAYGHIDWLASDGELLFSQVPGVLLIDEIDAHLHVSWQRRIGPWLTSHFPNIQFIVTTHSPYICQSADPGGLILLPGANEDTAPRIVAEEQFERVIYGSGDDAVLSELFGLDTPYSEQAERKRGELVALEMDLLRGQVDAETADRYRELKRLLTSSPTARLDEMSARLKDLADDEPEDPSR

SEQ ID NO: 84625 - protein, 247 aa, Streptomyces sp. NRRL S-4
MIRLQRLDLPQDTVTRMDDHTEEIRESEEPKDKARYLWTHTTVRRHVHTALFAALGEMAPGHERCMYCGDNQGSDIDHYEPLSTAPLRTFEWANHLLACAVCNSHHKRHVFPRDEAGRPLLIDPTIQEPLDHLHLVLGTGLYRGLTPQGDSSIDVFGLNARGALVKGRHDAYSTAALFLGKWRAAADKGQTDRARDTVRIAWDRPLADVLASMFHQAVHPAAELLFSGEDEVLDLLRDPALRAGFLG

SEQ ID NO: 84626 - protein, 548 aa, Serratia marcescens
MKVDKLHIRSRFKNLENVTVDFDQDHLMTVVVGRNGSGKSNVLEALVSIFRNLDLGEAPPFSYELVYRLGEPHKVNQPSDRWLEIIIDADPTRGTLAKQYEVCVRDLLSGEISTDMPVEKNQGITIPFSKVKRDKEGSAPYLPKYVFAYYSGPSDRLERYFRKHRTDFYRSLLKNELDLKGDIRPLFYAKPHHSQFVLLAFFLSEQDSKEKAFLREHLGIEGLDSIHFVMRQPGWAKKKGELFWGASGVVRRFLDELIKYTLSPVKITRQEDTSLTGSNIRNEFFHLFLPDQYALRDFARDLSADELFKMLESTLLSEIISEVSIRVKVSSSEEPLTFRELSEGEQQLLTVLGLLKFTGGKDSLFLLDEPDTHLNPSWAVKYLKFLREFVPNHETSHLLMVTHHPLAIAELKKQQVQVMWRDDDYKVHSQEPYIDPRGAGFMATLTEIFGLNTTLDLETQSLLDQRNELARIENRSEEENNQLDLINDYLNRLGFSFENRDPLYSDFLLAWQDLRYSDKPLLTPDKAAQRRLAMKKVIEAILTKKDES

SEQ ID NO: 84627 - protein, 280 aa, Serratia marcescens
MIFIRRDAALIPQKVLDVALRAQSALEKLSPEKRKEFIKKKSHIWRGFSKYLAKMSYGKCWYSEAKDAGANFDVDHFRPKAEAKRTEEIVDLEGYAWLAFDWDNFRLSAQNCNRLNTDDSGETHGKGSWFPLIEGSPKASWDNRCIENEMVVLLDPVIKADLTYIDFDDNGRFKPSQLCVGIPAVRVRQSGIFYGLNLEKMREARFEVMRDAKELFEIIQQSALELEQFGDNAPMKTIERQIEKLRMKTRADAPFSRAVRAQLTKIGADDYLIDRSLDAA

SEQ ID NO: 84628 - protein, 451 aa, Pseudomonas libanensis
MEIRKIRLNNVGRFADLEVAFAPTEKHASKVTVFVGNNGAGKTTILKSIATSLSWLVGRIRTDNGGGSPIQEDVVTNGERFATIEAEVSGITHPSASASATYSWTLARTLRGHKAKVNSSLTKLTELAELYRVHLGLIDGSGSLPLVAFYPVERSVLDVPLTIRKSENPFDQFDGYENALNGGVDFGRFFEWFRDREDTENEQGISSAVMEQLEKISSTDEKLVSELKNMHLASRDPQLNAVRTAVSKFMPDFSNLRVQRKPRLHMAIDKLGNTLSVSQLSQGEKSLMALVGDIARRLALMNPSLKNPLEGTGVILIDEVDLHLHPQWQRRLIQQLTETFPNCQFILTTHSPLVISDTKNVLCYVLDDGELEERTGLYGLDANQVLLSVMDTDIRNSEVQSRLDRLLELLQEKKLKEANALFEELSTDLPPGHIELTKAALLIRKLELRSA

SEQ ID NO: 84629 - protein, 209 aa, Pseudomonas libanensis
MRKIIKGNEPAELTKWMRDNPKGRYCDLTHEERNSIRQACIEEQHGLCAYCCHAITQETAHNEHVAARETHPHRTLDYSNIVASCNRSKQCGKAHAHQTLPLTSLMDECETELKFYLSGRVEGLSPRAITSIQVLNLGDCRENNRTLFSARKSILDTLLFDYGMEGNDLEAEDGELLKMLLEDLRLPDAHNRLKPFAPILVNVIRQLTN

SEQ ID NO: 84630 - protein, 414 aa, Nostoc piscinale CENA21
MLKELHLQQVGPAAHFNVAFADRLNIFTGDNGLGKSFLLDIAWWVMTTNWVEQPAYPQQVRGENPQITGIVSNKKDIREYRSYFDFSEQKWRSLQMPPLLKEVVIYVRVDGSFSVFDPARQRDIAYNFNPNTLWNGLKSKNKVLCNGLIQDWVTWQNQPSKYPFQLFSNVIKKLAPHPSEWIEVGEPTRVSIEDVRDIPTVNLPYGNVPVTQTSAGMKRILGLAYLLVWTWYEHKKAAELRQQKPVNQIVLLIDEIESHLHPRWQRVILPAILAVVKELQPRMKIQALVTTHSPLVLASLEPNFNEQEDQLFLFKLQDREVSLDEVPWSKQGDTVGWLTSEIFGLKQARSKEAEIAIEAAEAWMRNDDMNAFPEHLRRPTQIHQELQRVLPGHDPFWPRWIVTTEKRNFGLSEV

SEQ ID NO: 84631 - protein, 195 aa, Nostoc piscinale CENA21
MMPFNPPPEPPDFDEKVRQPGNAWLQKNPDPKKGTRDYWSPFKSYLADGFNNLCGYSVMYEPVGTVDHYRSRENYRYLAYEWSNLRFASAWINSSKGTLDDQVLDPFDLGEDWFEILLPSLQLVLTDKVPPQQLQRAEFTLERLRLRDDERVLRQRQQWYQLYLDGDLTLQGLEKKAPLIARAVKKQQQAISQQG

SEQ ID NO: 84632 - protein, 416 aa, Mesorhizobium plurifarium
MIFSGLTLNGWRQFEEIDISFHPKLTVITGANGAGKSTLLSLISQHYDWSQPLLSTPTYSKDGLIRYVSGLFPWVNKSDNSSSKTVGKFFYSNGAKSEIVVPSVNSIMYNVTINPQPPVLGLHIGSHRPAPTYQQVGNIPTNAIGAAQAYNTYHSEIVQRQQNSYSQFGPIYRMKEAIISMATFGPGNRYVQRNENVAKLLESFKEVLSKTLPPSIGFRDISVRIPDVIIVTDTGDFVIDAASGGLMSLIDLSWQIFLYAYDKNQFVITIDEPENHLHPSMQRALLNRLILAFPNAQFIVATHSPFIVSSVKDSAVYVLGYKGSQSHSDQSIKTTVSSLRLDSANKAGTASEILRDVLGVPVTLPEWAENDLRTIADQFQIENLNSENIVLLRQQLVAAGLGEYYPEALRQIAGTP

SEQ ID NO: 84633 - protein, 223 aa, Mesorhizobium plurifarium
MIHLTKVAKPQILEDNEVAWTAAIVDKLVAGEVPTNAEKTRYRNPHIKAALVTETHGKCAYCESKLLHIHHGDVEHIYPKSLDPEKTFVWNNLTLACEICNQNKSNKDPFLEHIIDPYIVEPSDHLIFSGPLVFPRGTAAGTSTRSLLDLNRGELSERRKDHLEKIMGIIDTISRADLPIATRRAIFADLRDHEAHPSAQYAAMVQTVIGQIAPSLPIDITAN

SEQ ID NO: 84634 - protein, 573 aa, Achromobacter sp. 2789STDY5608606; identical to SEQ ID NO: 84014

SEQ ID NO: 84635 - protein, 270 aa, Achromobacter sp. 2789STDY5608606; identical to SEQ ID NO: 81697

SEQ ID NO: 84636 - protein, 475 aa, Achromobacter sp. 2789STDY5663443
MQVHQVISQRLYVTLGRKLSDSGNYVDVITGPNGCGKTELLEVLLQYAKSPYQSRPNRSNLWPVVHATGMPGKVVVQTFSPFSRFEAPKADATSLTERYTEDDVEQSKYVCAGLHRSSRSVGATLSRKVLEEALIRLSENPETAEILLSVLYELGFQTQFRLGYKLKIGFKHAFEKNDPARFIESHLQDMQTKGRLRPSETRILRELNSGKGEEFLGVLRHSIDVVREHHDQRAKSYVLPISLQNVRRDFHVIQTFVLLRRLDLLNLTSCELRGNEVESIDVAKTSSGQQQMLCAIFGLATSITPDCLVLLDEPELSLHPEWQLKYVDALFRIARSVHNAHIVVATHSPLVVQQAVLHGADVVQMGDDGTRYSAHPLPMFSDTPLSIEQALVDVFQTPIVGSAHVSNEIFQAVVIGETGDRLEKSEALAKLDQLGKIYRDEKDGTTAQLVRDAIRLINTPDTPPPPSVDVRQRLG

SEQ ID NO: 84637 - protein, 276 aa, Achromobacter sp. 2789STDY5663443
MTFRDKADPLTQLTTLNAVEHGTLKTDGAQSHHLWSDTQYQHRQLVDKFRAEVKDHYFWHQGYRCCYCSTELQPNARVYDAEHILDKSGFPEFMFHPENIAVACVICNTHKSAKSVLSDDTVRPLTIPALSTDYKILHPHFDEWDHHLSFDELGRIVPVPGSTKGPETISICAMDGINLLRLSRKFAPASRKGVYKLMCKVVTYVSPSKIEDTFALMQKLADQSPDALAVVATLRDRVAQMQAQRAAEATAAQAALLAPRPTLALPAPDNPLAGGL

SEQ ID NO: 84638 - protein, 268 aa, Citromicrobium sp. JL477
MAVRAMRDVFSIDGEFDVLERRDDRVFVVQKLGEGEAGPLQHTPLTIVSSGFRAVLAMLCDIMQGLMDKRVNPEFRTLETARGIVLIDEIEAHLHPRWKMAIMTGLRRALPQVTFIATSHDPLCLRGMKPGEVLVLERIPGAQADTELPVFTQSLVDLPDNSHWTIEQLLTADFFQLRSTENADAERRLARMQDKLALGVTPAEDPELQAYLNEISGALPIGDSEVHRLVQEAVAMFLAEQRTATRERLKGLKEETRQAIVEALRSAT

SEQ ID NO: 84639 - protein, 320 aa, Citromicrobium sp. JL477
MRPVPRPADVPEILTTKGAEERKKAVRYFGPPRASAKAFPFAIYKHKEVKNELERLFRGKCAYCETFYASAQSMDVEHYRPKGAVEGDDAHPGYWWIAMAWDNLLPSCIDCNRKRYQITPRGDVSQVRLHEATLGFSRSSTVGTGKKDSFPLAAGGVRATRADDSLSAEKPLLLNPCEEDPGEHLEYLFDPANPVSFVVARKLVGGDPDFAGDHSLSLKGATSIHVYGLNRIGLVQARTEVLRRLEFLGALMIDLKALAQDLAGAPPDETVRRAERAVSGFADRLLVEMRAMADPARPYSAMVAAWLDHFASRVADPDAA

SEQ ID NO: 84640 - protein, 650 aa, Vibrio splendidus
  MOD_RES (265)..(265): Any amino acid
MIPISLFDLGSEDVNKHEYLKQLLSFPTGYDPYQYNVKRDPYYSEALKRITDSSRVKLSGNIEHCFYCGTQTDNIVPAFFHDGSGINLWIYTDWKCSALICHTCHENYGSSNVRYKNRVRKINRGNSRSLLHFEPEIVLPTIEPVHLHFNYLDDGRLVPLSQRAKATIERLSLNRKELVSRRLCAIENYRTNYDSFEYSSLESPIDSLFIASVEVDDDGSFSDYLLKRVQRDSIFYDDLFNDITPIPLRSESFKPIEIYKRDFFXYTFSGISSIKFDGIRGFDINQKLEFNGKNSLIILGENGVGKSTLLELLKRALKPRYKKHLDDLCNSIDTLPTYEIEYTDENYHYIYGSDKKSKGLRDKCNLIHVSENRSHSKTPNLLAQWVWSQHKNDQLIHWVARKLKTLLDLPQDYYFCTIDGKVYWETESNDTGRVYITDLSSGYNSLLTIFYMVMSGITEKEVINDLNLIEKRLSSTLVLVDEVELHLHPRFKKKVVSNLKETFPEVIFVFTTHDPLVIKSANNNEHVIVLEKNNNVNKSNVKTRIIDTLPDHTHLTTEQILSSPIFGLGTMCGDDSIQKQVDNYYVALRNNDIHIINEHRKILGKTGFFGSTFRELLALSAVDAYISKGVIPKTDDIEKILEKAENHEKD

SEQ ID NO: 84641 - protein, 366 aa, Vibrio splendidus
MRKIRYISPVPANMDPNTTVYQSILTNNRQKFNLSRGNTINFDFSGYDNENNKTRIRALASQCCAYCGVRVNSSNTVEVEHFRPKNELKCRDNEFILHHKSGHRSHKTTRKASDFGYYQLGNHYENMLPACGGCNRGAGNGGIYVGNKHVTDIPYGKKNNFPVRFKKLDGIYKEYRKGTRAIESIQGEVPLLFNPYKDNPNKLFDYKNPNSVGECFIVKIRPGKNLCKNEKLKATISINLLGLNRVYLCGERYRISSSIKDIARNLVADRKSNNYRLNSWAGYAANYSSYYSRETSTMLGFSFKFGYKLGFELHKRIKENFMVESNGILTDTCNFMRVVEQLSLFSERYYDPNIDNDEINDLIGFG

SEQ ID NO: 84642 - protein, 268 aa, Citromicrobium sp. JL1351; identical to SEQ ID NO: 84638

SEQ ID NO: 84643 - protein, 320 aa, Citromicrobium sp. JL1351; identical to SEQ ID NO: 84639

SEQ ID NO: 84644 - protein, 268 aa, Citromicrobium sp. JL31; identical to SEQ ID NO: 84638

SEQ ID NO: 84645 - protein, 320 aa, Citromicrobium sp. JL31; identical to SEQ ID NO: 84639

SEQ ID NO: 84646 - protein, 764 aa, Citromicrobium sp. WPS32
MRYVERDRIEPPAVFGSDDARISRQRVLDLFMSGPETLLQTRSDRSRSIADHPEVRRALADLFNHSCAFCETLIDDPKVFRFRPAEGAHPVTDRDLAHLYYAWLADAWQNLYPICWECMPEDPFYFPVADRRRSPIPNPGQLSEYIDRGDGRWPFYPLDEKTIFLDPCNDRDLWRHLRFWSDGSIGAYSNSRRGRATIRQFRLDRRSLREERVVMFERYFAQLWEGLETEDYDDGSSLFPHRGPFSGGWRIYLRDLLARALNRRASEDVERQLLVLREHRDWRDRLERAREALFAPPEPEEAWNSERLYHEPSAPREPRRIVIRNFKSLENIEVRLPAPSTSGEPNAAALLILGENAAGKSTILEAIAIALMDTETRHMLDLKAGQLVLNPRYLGARGAHSPEQAEVELHYAEGEKQHLSIAPSTLASSDHFIEQDFRTQGKPNSIPLFAYGAFRQYLDAQRRYTKHKHVRSMFQTDQLLSNPERWLLGLKRAEFNMAVRAMRDVFSIDGEFDVLERRDDRVFVVQKLGEGEAGPLQHTPLTIVSSGFRAVLAMLCDIMQGLMDKRVNPEFSTLETARGIVLIDEIEAHLHPRWKMAIMTGLRRALPQVTFIATSHDPLCLRGMKPGEVLVLERIPGAQADTELPVFTQSLVDLPDNSHWTIEQLLTADFFQLRSTENADAERRLARMQDKLALGVTPAEDPELQAYLNEISGALPIGDSEVHRLVQEAVAIFLAEQRTATRERLKGLKEETRQAIVEALRSAT

SEQ ID NO: 84647 - protein, 320 aa, Citromicrobium sp. WPS32
MRPVPRPADVPEILTTKGAEERKKAVRYFGPPRASAKAFPFAIYKHKEVKNELERLFRGKCAYCETFYASAQSMDVEHYRPKGAVEGDDAHPGYWWIAMAWDNLLPSCIDCNRKRYQITPRGDVSQVRLHEATLGFSRSSTVGTGKKDSFPLAAGGVRATRADDPLSAEKPLLLNPCEEDPGEHLEYLFDPANPVSFVVARKLVGGDPDFAGDHSLSLKGATSIHVYGLNRIGLVQARTEVLRRLEFLGALMIDLKALAQDLAGAPPDETVRRAERAVSGFADRLLVEMRAMADPARPYSAMVAAWLDHFASRVADPDGA

SEQ ID NO: 84648 - protein, 268 aa, Citromicrobium sp. JL2201; identical to SEQ ID NO: 84638

SEQ ID NO: 84649 - protein, 320 aa, Citromicrobium sp. JL2201; identical to SEQ ID NO: 84639

SEQ ID NO: 84650 - protein, 268 aa, Citromicrobium sp. RCC1878
MAVRAMRDVFSIDGEFDVLERRDDRVFVVQKLGDGEAGPLQHTPLTIVSSGFRAVLAMLCDIMQGLMDKRVNPEFSTLETARGIVLIDEIEAHLHPRWKMAIMTGLRRALPQVTFIATSHDPLCLRGMKPGEVLVLERIPGAQADTELPVFTQSLVDLPDNSHWTIEQLLTADFFQLRSTENADAERRLARMQDKLALGVTPAEDPELQAYLNEISGALPIGDSEVHRLVQEAVAMFLAEQRTATRERLKGLKEETRQAIVEALRSAT

SEQ ID NO: 84651 - protein, 320 aa, Citromicrobium sp. RCC1878
MRPVPRPADVPEILKTKGAEERKKAVRYFGPPRASAKAFPFAIYKHKEVKNELERLFRGKCAYCETFYASAQSMDVEHYRPKGAVEGDDAHPGYWWIAMAWDNLLPSCIDCNRKRYQITPRGDVSQVRLHENTLGFSRSSTVGTGKKDSFPLAAGGVRATRADDPLSAEKPLLLNPCEEDPREHLEYLFDPANPVSFVVARKLVGGDPDFAGDHSLSLKGATSIHVYGLNRIGLVQARTEVLRRLEFLGALMIDLKALAQDLAGAPPDEMVRRAERAVSGFADRLLVEMRAMADPARPYSAMVAAWLDHFASRVADPDGA

SEQ ID NO: 84652 - protein, 268 aa, Citromicrobium sp. RCC1885; identical to SEQ ID NO: 84650

SEQ ID NO: 84653 - protein, 320 aa, Citromicrobium sp. RCC1885; identical to SEQ ID NO: 84651

SEQ ID NO: 84654 - protein, 485 aa, Pseudomonas sp. In5
MGTQENMTSAGKNSLRLSQLRLRDFRCFESIDIDFHPQLTVLVAANGTGKTSILDAIAIAFGPYIGAFDEAVGKHFEPSDIRQFRARQTTTNEMEYAPQGARLEATGFVPGSLLDRLSDDLLPTIWRRHLSSATKTKTSVKDAKELVAYGKRMQEASRTPDTEVVLPLIAYYGTGRLWQQKKLTDAKNIQRTSRTVGYTDCLDPASSYKSFVQWFRYWSLNAKEAQLKALEAGVSIAKTEFDTYIQSVSRAVNVCIQPAGWSGIEYSFTRDTLVARHEQLGELPVEWLSDGIRNMIGMVADIAFRATKLNGHLGAQAAQKTPGLLLIDEVDMHLHPEWQQVVLLNLAQAFPAMQLIVTTHSPQVLSTVSSDSVRILRSEIVPETTSRVTTVSEPQWQTRGVASSDLLARIMGVDPVPHVPEAIWVSDYQALIQQNLHEQPEGRILRDRLEAHFGAEHPVVHELDRLVRLQGIKQRLPRELGNRER

SEQ ID NO: 84655 - protein, 212 aa, Pseudomonas sp. In5
MRRLNRQDEPPAGLRRYRHGRDAWSAVTPEERMAIWLSLDLMQGPRCAYCDGPMGDGNRHIEHFRQRGRYPQGTFDWSNLFGSCNRAGTCGMAKDQCGAYSPETLIKPDIEDPDVFLLFTPGGTVRPRAGLTANNHLRATETIRILVLDGALNQIRRAQLCGYIQTMEIFADYAEAYPDDDSWVEELEREVRDTAHLPYATAIRHVLTRQSE

SEQ ID NO: 84656 - protein, 469 aa, Escherichia coli
MKIEQVSLKNFRCFEQLDVTFHPQLTVLTAPNGAGKTTILDAVRIALWPFVKGFDLGSQTGKSATIQIEDVRLERREQEMEPILPCQITVQATGIPIREKQPHLYEWQQVREQVKPRTQSKGDRSTQVLTRLAKNYQSVIYKGQQAEADTIELPLIVYLGTGRLWYQGRYTSEAEDKKLDASVFSRLWGYQNCLTATSSYKQFESWYGWVFRSYRELQIGQLENQIKPQDQSSLAYFAAAIEVVQRAINTLTSSLTGWHDLQYRASMGQQLVMEHYQHGYMPLAMLSDGLRNMVATVSDIAFRCIKLNPHLKDEAAQKTAGIVLIDEVDMFLHPAWQQQVLGALQEAFPLLQFIVTTHSPQVLTTVAKENIRQLGSDEHGTYARMPPFSPLAHENSDALAKVMETHSQPSLPLQETISEYELLVRSGEETSERATTLLATLEQAGYQFHESDLATWRFLARRKLAAKGS

SEQ ID NO: 84657 - protein, 197 aa, Escherichia coli; identical to SEQ ID NO: 81635

SEQ ID NO: 84658 - protein, 469 aa, Escherichia coli; identical to SEQ ID NO: 84656

SEQ ID NO: 84659 - protein, 197 aa, Escherichia coli; identical to SEQ ID NO: 81635

SEQ ID NO: 84660 - protein, 763 aa, Escherichia coli; identical to SEQ ID NO: 81340

SEQ ID NO: 84661 - protein, 308 aa, Escherichia coli; identical to SEQ ID NO: 81341

SEQ ID NO: 84662 - protein, 428 aa, Phormidesmis priestleyi Ana
MHIQTLTLNHYRGAKSLTLALHPRLNVFVGTNGAGKSTVLDAATILLSWVVNRIRTPGASGRPLSEDDITNDYPSASIALEAAHDSETITWRLAKGRRGQRALENPTHLSELNSYVKQVQAQITTEAASIPLFVYYPVNRAVLDIPLRIRGQHSFELLTAYDNSLTTGANFRTFFEWFREREDLENELKARSQQPLSLFEEPQPIPQVPDPQLEAVRSAIHQFLPEFQNLTVRRNPLRMEIQKGKQLLTVNQLSDGEKCLIALVSDLARRMAIANPAAANPLAGKGIVLIDEIDLHLHPKWQRIIVPKLLEVFPHCQFIISTHSPHVLTHVQPENIFLLQWQDGNITAQKPSESYGKNVDRILEDLMGLETTRPTAISSELHSLYEMIEQGHLEAARAEIASIKRDIGEDPDLTKAEVLIRRKELIGR

SEQ ID NO: 84663 - protein, 205 aa, Phormidesmis priestleyi Ana
MKHIQKQAAPQAFIDWKSRPRTYDRFKKTAPIKQVVKAALMQEQGYLCCYCERRLTDSDSHIEHFKPQKDPTVDPLDFNNLLCSCQKDLDQGEPRHCGNSKGSYDANLLVSPLDSTCEARFMFTADGYVQTAIETDAIAQTTIDVLQLDIPKLRALRSSAIAPFLTPDLSDDELRQFVKGYLAKDASGQHSEFWTTIRALFGGLV

SEQ ID NO: 84664 - protein, 458 aa, Phormidium sp. OSCR
MEIKSIALRNFALFKHLELSLAPTPQNPSNITVFVGNNGTGKTSILKALTVSLSWFIARLSTEKGHGSHIAETDILNGTNSATIDVKICDSLQASAYPDDTATDNDFHWRIAKARKGRKAESTSQLTDCTCLASYYRNALSQNDQVSLPLIVFYPVERVVLDIPLKIRTKHTFLQLDGYDNSLSQGVDFRRFFEWFREREDAENESGISEDVLHQLKPLAETNQDVWQLLNELKASTKDRQLTAVRTAIRRFMPHLDNLRVRRQPRLYMAVDKNGETLNVAQLSQGEKSLMALVGDIARRLAMLNPALENPLTGDGIVLIDEVDLHLHPSWQRSLCDRLLETFPNCQFILTTHSPLVISDCKNILVYTLTNGEIQELPSQYGQDVNTVLLDVMDTSIRDPEFDAKLSDLLDAIQDSNLSQAHQLLTELTAEPTNQNNLELVKARLLLRKQELRHASHS

SEQ ID NO: 84665 - protein, 209 aa, Phormidium sp. OSCR
MRAIHKGAEPTSLANWKRKHPQDSYMDLDPEIRQAIREQALKEQYYLCAYCCQRIRDVYTCHNEHIEAQKINPKRTLDFANIVASCNTSNQCGDAHKSHHLPLTPLMSECETELRFKLSGRVEGLSERATTAIQVLNLGDHERHNKALIGKRKQLSDVLLWTNGVNPDEGLEDEELLGMLISDLGQPQDGILEPFAPVVINILRSWLQS

SEQ ID NO: 84666 - protein, 426 aa, Phormidium sp. OSCR
MYIQRLSLTHYRGAASLSLNLHERLNVLVGVNGAGKSTVLDAIAILLSWMVSRMRQSGTSGRSLSEAEIMNGKSWASLEIVCADEHQSLSWRLSKSRRGYGNPPQPSELQQLSHYTKTLQGQISQADSGVNLPLFVYYPVHRAVLDIPLRIRSSHRFDLLSAYDQALTTGANFRTFFEWFREREDLENEILVQQLPLFREEDQEAHRDRQLEAVRSAISQLLPEFQNLTVRRSPLRMEVEKNGEILTVNQLSDGEKCLIAMVGDLARRMAIANPNRANPLQGKGVILIDELDLHLHPKWQRMIAPKLQKVFPNCQFIVSTHSPHVLTHVEAETVMLLNRNHEGLQVQNPSESYGKPVDRILEDIMELETTRPTAVSQTLHEIYEMISLDQCETAHQKIQDIRQLIGDDPELTKAEILIQRKKLIGK

SEQ ID NO: 84667 - protein, 210 aa, Phormidium sp. OSCR
MKYIQKKGEPPELTNWKQQANADWTPSYQELRGSLKQSVKKALMVEQGYLCCYCEQALDAVNSHIEHFRPQSDPTVDSLDFYNLLCSCQNQICKGEPRHCGNLKGDWFDEVLLLSPLEKNSEARFKFTADGHIQPQDNQDTAARVTIEKLGLNIPKLRAARKLVIEPFLDEVLSIEELHFFVENFLKEREDGHLNPFWTTINSLFGDLSY

SEQ ID NO: 84668 - protein, 709 aa, Bacteroides thetaiotaomicron
MIKIEKGKAPEFLSSEKVEIARERMRTFYASNREQKRYLFPFNKEIDIKLKEDLHKIFYGKCGYCETIIESPEKGVIDRYRPHNGVRDKDGYNQDLYWWLTFEWDNLIYSCKECNQYKANYFPIQGVRALKVKDNLDQEKRLLLNPCVDDPQEHFYYNHDGHIQIKTREGEQTVDLLRLNDRTDLIEGRKKARKEIITILEKINKNGVRSIDKNEISYLQRILEYDNDSTAFFGYKKWVLLNELGDNLLLDLEFNIKNHDREWLNDRNQNNKILIKNEDKRYLANDYFPIEYIHIKNFKSIENLKIEFKEDELNNKSWLILLGENGVGKSSILQAIAVGLNANAKIITSTLIKSLIKKRKQKAEIEIKERNSSNIIRTILTRKDNTIKQEGSFNSYLMGYGSLRLSVEEVDSESIKIQDTNNVSYENLFQPIKPLNDITKWLKSIYRKDPVFFERVAYSIKQLLPHDFSCNELTIKDNNIMFKKSEELFSELSDGFKSTIILAVDIMMKLSDAQSDMDKMTGIILIDELGNQLHPRWQMSIVKQLRTVFPNINFIISTHHPLCLRGAKRDEILLLKNIEGEVIGIRQLPDPSTLRVDQILASEFFGLSSLVDPETEAYFNRYYELLAKDEKASVEDQEEITRLRDKLRDKQQLGISLREELMYSVIDKLLAKEIAYNKNPLDRENLKREVINRVKDIWTNLNLDYYDND

SEQ ID NO: 84669 - protein, 315 aa, Bacteroides thetaiotaomicron
MITINRIDCPDILKQGKNPKSKGELETIDALKFFSDQNNHTSTYRKTGTTTVGYKIYSDDSVRKVLLNMFNGKCAYCESKITSIYNGDIEHFRPKGEIKEATPTKPGYYWLAAEWENLLFACPFCNQTNTHTIIANGILKETVLGKLHQFPLVSEQYRLKYTHGQIYFSDRNAYQQAFDLEETERLLLNPCKDLNIENYFKYEDSGVIIVNSDLTEQRNILRAEKSIQVYALNRLALVQARREKIIQIKAQIKRTEESIINYNRYAKQSDEEKIWFEGIMRKEIKILKRYKNINQEYSGLAKYIIRKYFEEIYFI

SEQ ID NO: 84670 - protein, 469 aa, Citrobacter freundii; identical to SEQ ID NO: 81634

SEQ ID NO: 84671 - protein, 197 aa, Citrobacter freundii; identical to SEQ ID NO: 81635

SEQ ID NO: 84672 - protein, 412 aa, Enterobacter cloacae subsp. cloacae
MPLERLHVKSLKKFPEVNVRFNSRFNFITGPNGCGKTSLLAAIAHCLEWNGEYSRHQDESEYWIDISEKDIKYRFGLGPGCIGTKRYRQDQLMTWVSPPEEKGRYTFLAYQTKDNLVLPPLVIGAQRKINYKSVSGVTRESDSQQSRSIYCNNALRFLYNNDSRDVKQWLINRYFIIDKSWAIEEKLNWEHLLCSLPAIGPFDSDFRYIDTERDLEPVFSIYGKKCFLEELSSGFQAVLYIIIAVFEWIEACLPVGERDVRKACGTVLIDELDNHLHPEWQFTVRQGLAKIFPEIQFIITTHSPHLLASAKENEIILLPSSYPEEKYDFEPSDKAYSGWSTDLILTELMGVVSLDNKDYEVLVTACYDNIKNNDLDKLKINYAHLESICHPDDEILIILKTRIAGMEAKVDD

SEQ ID NO: 84673 - protein, 252 aa, Enterobacter cloacae subsp. cloacae
MIKLTRPPEPKILCDNSAVWTRDIMNLVAKYGSYKEIPSSEKEAALKFYRHDDIRNALKESSFRKCAFCEGKPEETGFAEVEHFYPKSIYTEKAFEWANLLYCCKACNNKKLDHDTHLLPIINPYELDPRECFTYTDIMIEAKPGANQDIAERTIKVCGLAEKRLFSPRSAILASFRIFEADIHDALAEFQQARTLPNKKKRASMISNALSTIEELVLPNAKFSNYCTYLLSSSDVYQQAKKTLEEFTHQNL

SEQ ID NO: 84674 - protein, 552 aa, Enterobacter cloacae subsp. cloacae
MEKIIRTLKSKAQKNDILANYTLYDKYLEGEDTKSNINIAMQYLNKCYELLEMREEVHEKPLSRLKIEKLILKDFRKFRELEVTFHDKITVIIGDNGSGKTTITDALAKLLSWLSARIETAKKGAKTLTPSEININSEDFSEIISHLSFYNKNIFSSSLSRPTLGFKGRKVSDLEDFNNISELYRVVNASSKENYNRELNLPLFCYYSVDRASSYSTFNSNSNSQEPQSRFKAYNGALDGPGRFNEFFDWFLFINNYLGSSVVNTPEELSLIKEIEAFEELKLDVNSPLFSIYKEKKKSFEKIKKSKDNELNKHVMLQNDVVKKAIISSVTSVSDIFTDSSTGKHELKIINDGVLININQASQGQKTLIAMIADLSRRLVLLNPNLKNPLYGQGIVIIDEIELHLHPQWQQSIVHSLTSTFPNIQFIITTHSPQILSTVDKDCIRKIKETTEGNYEVYTPKFQTKGVQSTKILEYIMETNSIPDLEEARRVDLFSSLLQQGKKEKALEVLEILKEHFSEFEGQEHPVIQKCINQLKIYDMKHRILGNKDNDK

SEQ ID NO: 84675 - protein, 223 aa, Enterobacter cloacae subsp. cloacae; identical to SEQ ID NO: 83673

SEQ ID NO: 84676 - protein, 455 aa, Pseudomonas fluorescens
MEITRIKLTDVGRFTDLEISLAPTPNHPSNITVLVGNNGAGKTTLLKSLATSLSWLVARIRTEKGNGNHLAEDDVRNGAIAALILIGVIDESLTRSHPADACSEDTVFTWGIARGRQGRKAHIHSSLGGVSRLADHYRNQLTADDKASLPLIAYYPVERSVLEIPLKIRTKHTFDQLDGYDNALNRGVDFRRFFEWFREREDSENETGVSDTALAEISTKFGKDSDIWKTLSQLKASSRDRQLTAVRSAIAAFMPGFSNLRVQRKPRLHMAIDKGGVTLNVSQLSQGEKSMMALVGDIARRLAMMNQSLDNPLEGDGIILIDEVDLHLHPKWQRSLIRQLSETFPNCQFVLTTHSPLVISDAKDVLCYVLNDGELQEHNGLYGLDANQVLLEVMDTDVRNSDVQKRLNQLLKHLQDGDLDGAKKLFSDLSLELPEGHLELAKAALLIRKLELRRA

SEQ ID NO: 84677 - protein, 211 aa, Pseudomonas fluorescens
MRKIDKGMEPHSLTRFKHSNNTLRYRDLPPEESRSIRSSCISEQYGLCAYCCHSITVDNAHNEHLEAQDHAPNRTLDFSNIVASCHRLHQCGHGRGTRPLPLTPLMAECETELKFYFSGLVEGQTERARLSIEALNLGHTEESNRGLIGARKQLVDTLMFELGMQPADLQFEDEELLVLLLDALKTPSPAQCLQPFSPVLVNIIHQFLAQP

SEQ ID NO: 84678 - protein, 540 aa, Vibrio cholerae O1 str. KW3; identical to SEQ ID NO: 80874

SEQ ID NO: 84679 - protein, 205 aa, Vibrio cholerae O1 str. KW3; identical to SEQ ID NO: 80875

SEQ ID NO: 84680 - protein, 491 aa, Bacteroides cellulosilyticus
MGKRMSIPILAYICEENIRKCIMSTEKQPVYIRSLTLNNYKCFKGENKFFFCKNDGGKKLSQCTVILGDNGTGKTNLLKAIANLEPVLDDVKNVDSSAEKVERLYLDIAVLLGDRMLSPDLSKKPMYKPRVVERYDCEIQYDIECDFLKIKKRQDNINKSTFEEIIRYTTRFPMPGNSQLHESISPTKYGYTQKTNYVDPTEDISRVRIDAYGTNRHSKFGSKRLENLLNSESLFYDDNRLIDIESWILQLDTAKHHKRPGASARYLKVRNLIRHSSLFPNVKDIEIGFDDNENSFVYFVTEDGRYRLSDLGYGYQCTFSWIFDFCKKLFDRYPNSKNPFHEPAILLVDEIDMHLHPTWQRSILSELCKMFPMTQFIVTTHSPLLVQSIEKINLYALVKDNDTIKISHYPETSFQGWTVEEILREIMNLGDEVRSDKYMVLINQLQDALQKGDARQAKNIFSELSNILHPSSIDRELIPLQIEGIRDNEHD

SEQ ID NO: 84681 - protein, 239 aa, Bacteroides cellulosilyticus
MIKLILSNKPRELTPQMESALIEQFENDKTDPVWQKKFIKDAVFEIAYGKCAYSEVRLKEEGKDMQIDHFYPKVPYSKKVVEWGNLLPSLNHCNRHKSNIDPNTVEIVNPLFDNPKEYLYFQNGFLCYKNVKGSNTINILDLNNQVYLNSPRVRLLAEIGKTLKDIEPWKDLDIAYFLQRVKDVMHRGSRKMAYSAAVSTFILKHHLYEQYKSFLTGKLMWDSEFISLEKELEFCSLPK

SEQ ID NO: 84682 - protein, 412 aa, Yersinia enterocolitica; identical to SEQ ID NO: 81440

SEQ ID NO: 84683 - protein, 218 aa, Yersinia enterocolitica; identical to SEQ ID NO: 83977

SEQ ID NO: 84684 - protein, 408 aa, Yersinia frederiksenii
MLCSISKINILIPYSRKKADIQLDGMSLIITGGNGCGKTSFITAIYNYLKKGIDDPQNNNRQYLTQQIDYLESQLKSIGRDGGNYNFFSSQSESHKKRLKELNDFNIEIKSIDNKDIRSLLRFHSATRQSAISSPNQAPKHSVLIEENKHFANDIDGSQFFESYLLSLKKNQSYAIAFDKNETEANRIEEWFDKIQTDLRSLFEDSNLILEFDTKDEKFYLHQEGKDRYTFQTLSAGYSSILSIYTDLIMRVEMWGVSPDNIQGIIFIDEIDAHLHVSLQKQILRFFIKSFPKIQFIVTTHSPFVVTSVSNTIIYDLTKNEQIIDVSSYSYGVVMEEIFGVIPESHVLMDKITHIENLTNNITPENIDELEAMISSLASDQENMSNDTQAFLDAARLKLIKTKKTIEK

SEQ ID NO: 84685 - protein, 217 aa, Yersinia frederiksenii
MFNVIRSMPAPESLQSKKKYDNEDVHIALQDCFHEKCYLCETKKPLDINIEHFQPHKGDENKKFSWENLYLVCSRCNNIKLAKYDNLLDCCSISVWDRVKLTPGFSPKAKEFIITPQFCDGKTLETAQLLDEIYNNDNTMNKRLTARSLRAQVVQTTHKLTRHMIAYYNEDSTDEEKQVAISKMKIMIKKSYPYSAFCRWMIKDDEELDKLLSNLMN

SEQ ID NO: 84686 - protein, 472 aa, Yersinia intermedia; identical to SEQ ID NO: 83998

SEQ ID NO: 84687 - protein, 196 aa, Yersinia intermedia; identical to SEQ ID NO: 84009

SEQ ID NO: 84688 - protein, 582 aa, Yersinia pseudotuberculosis; identical to SEQ ID NO: 84012

SEQ ID NO: 84689 - protein, 268 aa, Yersinia pseudotuberculosis; identical to SEQ ID NO: 84013

SEQ ID NO: 84690 - protein, 472 aa, Yersinia intermedia; identical to SEQ ID NO: 83998

SEQ ID NO: 84691 - protein, 196 aa, Yersinia intermedia; identical to SEQ ID NO: 83999

SEQ ID NO: 84692 - protein, 412 aa, Yersinia enterocolitica; identical to SEQ ID NO: 81440

SEQ ID NO: 84693 - protein, 218 aa, Yersinia enterocolitica; identical to SEQ ID NO: 81441

SEQ ID NO: 84694 - protein, 251 aa, Yersinia enterocolitica; identical to SEQ ID NO: 82080

SEQ ID NO: 84695 - protein, 218 aa, Yersinia enterocolitica; identical to SEQ ID NO: 81441

SEQ ID NO: 84696 - protein, 413 aa, Clostridium sordellii; identical to SEQ ID NO: 83656

SEQ ID NO: 84697 - protein, 255 aa, Clostridium sordellii; identical to SEQ ID NO: 82307

SEQ ID NO: 84698 - protein, 413 aa, Clostridium sordellii; identical to SEQ ID NO: 83656

SEQ ID NO: 84699 - protein, 255 aa, Clostridium sordellii; identical to SEQ ID NO: 82307

SEQ ID NO: 84700 - protein, 413 aa, Clostridium sordellii; identical to SEQ ID NO: 83656

SEQ ID NO: 84701 - protein, 255 aa, Clostridium sordellii; identical to SEQ ID NO: 82307

SEQ ID NO: 84702 - protein, 413 aa, Clostridium sordellii; identical to SEQ ID NO: 83656

SEQ ID NO: 84703 - protein, 255 aa, Clostridium sordellii; identical to SEQ ID NO: 82307

SEQ ID NO: 84704 - protein, 423 aa, Ketogulonicigenium vulgare; identical to SEQ ID NO: 81432

SEQ ID NO: 84705 - protein, 228 aa, Ketogulonicigenium vulgare; identical to SEQ ID NO: 81433

SEQ ID NO: 84706 - protein, 527 aa, Pseudomonas amygdali
MLKGPGFYFSGGCVLASAGWMEAGLPPGTKLMATLFVSPFYGLHLVCCPNCNGRCFPYAWPDDETGENIVRLDTLRMQNYRCFGEFEIDFDPHLTILIASNGGGKTTILDAARVALWPFVKGFDLGGQTGKSATIQIEDVRLAQFGSGNMESQVPSVIEAKGVWWESAVESSWVQQRVSLKKSTNTIGDAGSKALTSYGKSLQDRVRSDAHVTLPMVSYLGTSRLWFEGRFSSAAAQTTLDKSEYSRTSAYLNCLSYSSSFKTFTAWYIWMYRSYREAQLIALERDEEMSDAGQRFEKIISAVKEAIDRLIKAPTGWHRLEYSASHQQQLVMHHPDQGVLPVEMLSDGLRNTIAMVADLAFRACKLNPHLGERAPLQTPGIALIDEVDMFLHPFWQQTIVGSLRAAFPAMQFIVTTHSPQVLSTVRRENIRVIGKDAQGRLIASRPLAMTYGEPSNSVLRSVMQVDPQPPVDEKPGLLQLTEWVDKGRYDEPQAILLMQQITEALTEQHPQLQRLQRSIKRQKALRG

SEQ ID NO: 84707 - protein, 240 aa, Pseudomonas amygdali; identical to SEQ ID NO: 80903

SEQ ID NO: 84708 - protein, 452 aa, Pseudomonas amygdali
MEIKSFRLVNVGRFSDLEVALAPTERHASKVTVLVGNNGAGKTTLLKSVATSLSWLVARVRTPKGAGSRIDEGMVQNGTATSSITIRIEDVLISDDEINPLESEWAITATRKGRNATSSTVLSELNRLADGYRSKLTEKSDTSLPLLAFYPVERSVIEIPLKVHARHTFDQLDGYDNALGRGVDFRRFFEWFREREDSENETGISTELLNELSQKILIDTELWKVLTKEHASSRDRQLTAVRTAVEAFMPGFTKLRVKRKPRLHMAIDKEGKTLNVSQLSQGEKSMMALVGDIARRLAMMNPALENPLHGNGIVLIDEVDLHLHPKWQRSLIAQLTTTFPNCQFLLTTHSPLVISDSKDVLVYVMDDGELREQDSLYGLDANQVLSSVMDTDIRNEEIQTVLDKLQHFLMRGELDEARTLYTELADELPANHIELAKASLLIRKLEVRREKD

SEQ ID NO: 84709 - protein, 216 aa, Pseudomonas amygdali
MRKIEKGSLAVLEKWKRANKGKKYADLVGHEDIKDAIRHACVTEQHGLCAYCCCRITAEKGSACNEHVEAQHLAPHRTLDFGNIVASCTKAGRCDAAHGHQTLPLTPLMIECEKELQFELSGLVAGTTPRACASINVLNLGDTRESNRDLVVKRKEMIDTLLFSYSIDPAELAVEADDVLDLLRNDLLEANAQQLLQPFSPVLVNVIIGIQRARQR

SEQ ID NO: 84710 - protein, 421 aa, Pseudomonas amygdali
MRLDHLHLQNFRCYEDAHFDFQPGFNLVVGVNGSGKTSLLLGVAGCFGNLLGSIGVHQPSIAESDVRFALVKFEDRIRFERSYPLVLTAQGGAFERQEWHVSLERSSLQTNFSALNSLAFSENLISIDVSTHGDLPVFAVYQANRRWLTMSVTAELAAQSKPSRLDAYTSWFDAASNLKNFETWFIGKTLERFQRLSRAGSSSVFNDELTWINSAIQCALPDAKGIEYDMELRALVVDMDDRKIPFNDLSDGQRGMVALFADIARRICLLNPHMGKDVLSKTNGIIVIDELDIHLHPGWQRTIAPALKKAFPSIQFIAASHSPQVIGSLQPGEVILLNNHDGSHPRATYGLDSSTILEEVMGVPQREPEIEALLDELFSTLENNELEKARLQLDALKQKAPDLPEFAGAEALLKRKELIGR

SEQ ID NO: 84711 - protein, 227 aa, Pseudomonas amygdali
MRRVIKGTEPASFTEWKASANEDWTPTYATLQNPQRRDLHNSLLQEQNFLCCYCGADTDLDNSHIEHFRPQERYQPLALEYSNLHASCLRGTNKGTLLHCGHRKRSWFDEQLHISPLEDDCEQRFRYLPNGKIQSNHPADAPAATMIEKLALDIAYLTKRRQEAITRAFDEQILASISDTELTLLVQGLRSGDANKQLAFGHVVARYAEQFLASLNPPPEKSPVGNT

SEQ ID NO: 84712 - protein, 507 aa, Pseudomonas syringae pv. atrofaciens
MWLRWGLGQQVDYGFRRRSGDLMGTQDNMASAGINSLRLSRLRLRDFRSFETIDIDFHPRLTVLVAANGTGKTSILDAIAVAFGPYVGAFDEAVGKHLEPSDIRQFRARRTTTNEMEYAPQGARIEATGVIPGSLPDQLSDDLLPTIWRRHLSSTTKTKTSIKDAKELVNYGKRMQEAARTPDTEVVLPLIAYYGTGRLWQQKKLTDAKNIQRTSRTVGYTDCLDPASSYKSFVQWFRYWSLNAKEAQLKALEAGVSIAKTEFDDYIQSVSRAVNACIQPAGWSGIQYSFTRDTLVARHEQFGELPVEWLSDGIRNMIGMVADIAFRATKLNGHLGAQAAQETPGVLLIDEVDMHLHPEWQQVVLLNLTEAFPAMQLIVTTHSPQVLSTVSSNSVRILRTEIDPETSSRITSVSEPQWQTRGVASSDLLARIMGVDPVPNVPEASWVSDYQALIQQNLHEQPEGVELRTKLESHFGADHPIIRECERQIRLQAIKQRLPRDLGNREY

SEQ ID NO: 84713 - protein, 214 aa, Pseudomonas syringae pv. atrofaciens
MRRLCRQDEPPSGLRRYRHGKDKWTRTCPTQEERDGIWASLELMQGPRCAYCEGPIAPQNRHIEHFRQRDRYPQGTYDWNNLFGSCERVSTCGKAKDRCGIYPPEVLIKPDIEDPDAFLVFTPGGTVEPRAGLSAGDHLRACETIRILGLGGALNEIRRAELSGYLQTLEYFVEIAEAFPEDEEWIQELQQEVSNAAQLPYATAIRHVLTRQSE

SEQ ID NO: 84714 - protein, 441 aa, Pseudomonas cannabina
MNLTRLCLKNYRRFAEFDIEFDPQLTIISARNGQGKTSVLEAIVAALGPFVGSFDQGVSRHIERTDARYARVGEGFESEQQFPVVISAEMSNPAKRWQRALNGPKSRTTTKEADPLAAWGKELQSMLRSDSAISLPVVRYYSSRRLWVSHKNVSSKAVLTESRTAGYEDCLSAFSTYAQLQEWMRKATLAVIQQKQQAGYEHSNLEPRLQGIRNAVNEVMADEGWSDFHYSLTFEELSMSHPDHAALPLGLLSDGVRAMITLVADLALRCSRLNGHFKELASLQTTGVVLIDEVDLHLHPAWQQRVIGSLRKAFPKIQFIVSTQSPQVLSTVKRECIRMVFQDANENWQAAYPPQEVKGVESAVALNDIMGVNPIPPVDEACWVAEYMAKIESGTHEDRDGLALRKKLLDFYGAQHQVLLDADRLVRFQAFKLQKHSNSKG

SEQ ID NO: 84715 - protein, 226 aa, Pseudomonas cannabina
MLKLDRASVDAPPCLADYDHLTHTWSDFRGTCKKQLRFALVQLQGILGVTTEDAAEYGVRCAYCERAIFHDGHIEHFRRKNPAHYPELTFAWSNLFLACGSPQHCGHHKDRRSAPAYDPGLLIKPDEHDPEHYLHFHSSGKVLARNNLNDHENSCATETIRVFSLDHPALEGARANAVRSYRNLHDADLYEIASWSDADRNDYFRQEIEATRWLPYATTIRHFLQK

SEQ ID NO: 84716 - protein, 452 aa, Pseudomonas syringae pv. coriandricola; identical to SEQ ID NO: 84532

SEQ ID NO: 84717 - protein, 216 aa, Pseudomonas syringae pv. coriandricola
MRKIEKGILVVLEQWARSNKGKKYEDLVDRDDIKDAIRHACVREQHGLCAYCCRRITLEKTSAHNEHVEAQRLAPHRTLDFKNIVASCNQPGRCGKAHGHQLLRLTPLMVECETELQFELSGLVRGNTDRAQDCINVLNLGSDQASNKWLISERKAMIDNLLYSQGMNSSGLGLESDDVLDLLHDELLVPDEQQQLQAFSPVLVNVIRRLKALQAS

SEQ ID NO: 84718 - protein, 458 aa, Pseudomonas syringae pv. coriandricola; identical to SEQ ID NO: 84534

SEQ ID NO: 84719 - protein, 240 aa, Pseudomonas syringae pv. coriandricola
MRSVHKRGSGPYQLARSHCSPPTTSDTSTSRWSSFGYKAQVLGCLLEEQYGLCCYSEIRPDRLGLSFHIEHVENKSQHPQRTFDYNNLAACALDSQSDLEVLKIQGAEVFGGHASGKSKGVDMARFVSCHMPDCSRFFAYLSDGRVVPADGLTLDEVDRAGYTIDLLNLNSPYLQDLRQSWWDELETLFEDHVDQDMSLHCLAGIDLIPVGASLSQFFSITRNFFGGIAEEVLAQEAGRC

SEQ ID NO: 84720 - protein, 439 aa, Pseudomonas syringae pv. coriandricola
MSQGTLAHPPVLVKETDMRLDHLHLQNFRCYEDAHFDFQPGFNLVVGVNGSGKTSLLLGVAGCLIPYGNAMGQGQEILSKEDVRFVIDRHEGRSRFERKFPVFIRADGDIFDLPNWRAVRLLEPWEGGVDPSSLSHLSAVLARNNAGEQIDFPVLAFYRANRRWSSARISAEFAAQQRTSRFDGYANWFDAVADLRDFESWLIARTLERLQDRLDSTPTVEREDELEWVNRAIRLAIPDAHDLRYDLRLQSLLVDMGEGNAVPFHELSDGQRSLIALIADIARRMCVLNPHIGKDVLANTGGIVIIDELDIHLHPAWQRNIAPTLKKAFPKVQFIATSHSPQVIGSLQPGEVILLKNGDSSHPRATYGLDSSTILEEVMGVPQREPEIEVLLDELFSTLENNELEKARLQLDALKKKAPDLPEFAGAEALLKRKELIGR

SEQ ID NO: 84721 - protein, 214 aa, Pseudomonas syringae pv. coriandricola; identical to SEQ ID NO: 84531

SEQ ID NO: 84722 - protein, 443 aa, Pseudomonas syringae pv. coryli
MAHRVSQGTLAHPPVLVKETDMRLDRLHLQNFRCYEDAHFDFQPGFNLVVGVNGSGKTSLLQGVAACLVPYGNAMGQKDKYLSDEDIRFVIDRYEGRIRFERQFGVFIKAEGNMFGLPHWGTISLNASWDPAADPAVGLHLDDVLAKNQAGERVDFPVLAFYRANRRWSSARISAEFAAQQRASRIDGYANWSDAVTDLRDFESWLIARTLERLQDRLDSSPNTEPEDELEWVNRAIRLALPDAHNLRYDLRLQSLLVDMGRDNAIPFHELSDGQRSLIALIADIARRMCVLNPHMGKDVLTNTGGIVIIDELDIHLHPAWQRTIAPTLKKAFPKVQFIATSHSPQVIGSLQPGEVILLNNHDGSHPRATYGLDSSSILEEVMGVPQREPEIEELLDQLFSTLENNELEKARSQLDALKKKAPDLPEFAGAEALLKRKEIIGR

SEQ ID NO: 84723 - protein, 215 aa, Pseudomonas syringae pv. coryli
MRRIIKGTEPASFTEWKASANEDWTPTYPTLQNPQKRDLHDRLLQEQNFSCCYCGREIELDSSHIEHFRPQDHYLPLALEFSNLHASCLRETTPGSPLHCGHYKGNWFDEDLHISPTEYDCEQRFRYLLTGKIQSTSHTDLPATTMIEKLALDIAYLTKRRQEAITGVFDEQFISSASDAELANLVDSLRSGTANTSIAFGHVVARYAEQLLTQR

SEQ ID NO: 84724 - protein, 421 aa, Pseudomonas syringae pv. castaneae
MRLDHLHLQNFRCYEDAHFDFQPGFNLVVGVNGSGKTSLLLGVAGCFGNLLGSIGVHQPSIAESDVRFALVKFEDRIRFERSYPLVLTAQGGAFERQEWHVSLERSSLQTNFSALNSLVFSENLISIDVSTHGDLPVFAVYQANRRWLTMSVTAELAAQSKPSRLDAYTSWFDAASNLKNFETWFIGKTLERFQRLSRAGSSSVFNDELTWINSAIQCALPDAKGIEYDMELRALVVDMDDRKIPFNDLSDGQRGMVALFADIARRICLLNPHMGKDVLSKTNGIIVIDELDIHLHPGWQRTIAPALKKAFPSIQFIAASHSPQVIGSLQPGEVILLNNHDGSHPRAIYGLDSSTILEEVMGVPQREPEIEALLDELFSTLENDELEKARLQLDALKQKAPDLPEFAGAEALLKRKELIGR

SEQ ID NO: 84725 - protein, 227 aa, Pseudomonas syringae pv. castaneae; identical to SEQ ID NO: 81187

SEQ ID NO: 84726 - protein, 526 aa, Pseudomonas savastanoi pv. glycinea
MKGPGFYFSGGYVLASAGWMEAGLPPGTKLMATLFVSPFYGLHLVCSPNCNGRCFPYAWPDDETGENIVRLDTLRMQNYRCFGEFEIDFDPHLTILIASNGGGKTTILDAARVALWPFVKGFDLGGQTGKSATIQIEDVRLAQFGSGNMESQVPSVIEAKGVWWESAVESSWLQQRVSLKKSTNTIGDAGSKALTSYGKSLQECVRSDAHVTLPMVTYLGTSRLWFEGRFSSAAAQTTLDKSEYSRTSAYLNCLSYSSSFKTFTAWYIWMYRSYREAQLIALERDEEMSDAGQRFEKIISAVKEAIDRLIKAPTGWHRLEYSASHQQQLVMHHPDQGVLPVEMLSDGLRNTIAMVADLAFRACKLNPHLGERAPLQTPGIALIDEVDMFLHPFWQQTIVGSLRAAFPAMQFIVTTHSPQVLSTVRRENIRVIGKDAQGRLIASRPLAMTYGEPSNSVLRSVMQVDPQPPVDEKPGLLQLTEWVDKGRYDEPQAILLMQQITEALTEQHPQLQRLQRSIKRQKALRG

SEQ ID NO: 84727 - protein, 240 aa, Pseudomonas savastanoi pv. glycinea; identical to SEQ ID NO: 80903

SEQ ID NO: 84728 - protein, 421 aa, Pseudomonas amygdali pv. hibisci; identical to SEQ ID NO: 81088

SEQ ID NO: 84729 - protein, 227 aa, Pseudomonas amygdali pv. hibisci
MRRVIKGTEPASLTEWKASANEDWTPSYPTLQNPQKRDLHNCLLQEQNFSCCYCGREIELDSSHIEHFRPQDHYLPLALEYSNLHASCLRETTPGNPLHCGHYKGNWFDEDLHISPTEDDCEQRFRYLLTGKIQSTSHTDLPATTMIEKLALDIAYLTKRRQEAITRVFDEQILASISDTELTLLVQGLRSGDANKQLAFSHVVARYAEQFLASLNPPPEKSSVGNT

SEQ ID NO: 84730 - protein, 421 aa, Pseudomonas amygdali pv. eriobotryae
MRLDHLHLQNFRCYEDAHFDFQPGFNLVVGVNGSGKTSLLLGVAGCFGNLLGSIGVHQPSIAESDVRFALVKFEDRIRFERSYPLVLTAQGGAFERQEWHVSLERSSLQTNFSALNSLVFSENLISIDVSTHGDLPVFAVYQANRRWLTMSVTAELAAQSKPSRLDAYTSWFDAASNLKNFETWFIGKTLERFQRLSRAGSSSVFNDELTWINSAIQCALPDAKGIEYDMELRALVVDMDDRKIPFNDLSDGQRGMVALFADIARRICLLNPHMGKDVLSKTNGIIVIDELDIHLHPGWQRTIAPALKKAFPSIQFIAASHSPQVIGSLQPGEVILLNNHDGSHPRATYGLDSSTILEEVMGVPQREPEIEALLDELFSTLENDELEKARLQLDALKQKAPDLPEFAGAEALLKRKELIGR

SEQ ID NO: 84731 - protein, 227 aa, Pseudomonas amygdali pv. eriobotryae
MRRVIKGTEPASLTEWKASANEDWTPTYPTLQNPQKRDLHNCLLQEQNFSCCYCGREIELDSSHIEHFRPQDHYLPLALEYSNLHASCLRETTPGNPLHCGHYKGNWFDEDLHISPTEDDCEQRFRYLLTGKIQSTSHTDLPATTMIEKLALDIAYLTKRRQETITRVFDEQILASISDTELTLLVQGLRSGDANKQLAFSHVVARYAEQFLASLNPPPEKSSVKNT

SEQ ID NO: 84732 - protein, 452 aa, Pseudomonas amygdali pv. lachrymans; identical to SEQ ID NO: 81086

SEQ ID NO: 84733 - protein, 216 aa, Pseudomonas amygdali pv. lachrymans; identical to SEQ ID NO: 81151

SEQ ID NO: 84734 - protein, 421 aa, Pseudomonas amygdali pv. lachrymans; identical to SEQ ID NO: 81088

SEQ ID NO: 84735 - protein, 227 aa, Pseudomonas amygdali pv. lachrymans; identical to SEQ ID NO: 81089

SEQ ID NO: 84736 - protein, 507 aa, Pseudomonas syringae pv. lapsa; identical to SEQ ID NO: 84712

SEQ ID NO: 84737 - protein, 214 aa, Pseudomonas syringae pv. lapsa; identical to SEQ ID NO: 84713

SEQ ID NO: 84738 - protein, 421 aa, Pseudomonas meliae
MRLDHLHLQNFRCYEDAHFDFQPGFNLVVGVNGSGKTSLLLGVAGCFGNLLGSIGVHQPSIAESDVRFALVKFEDRIRFERSYPLVLTAQGGAFERQEWHVSLERSSLQTNFSALNSLVFSENLISIDVSTHGDLPVFAVYQANRRWLTMSVTAELAAQSKPSRLDAYTSWFDAASNLKNFETWFIGKTLERFQRLSRAGSSSVFNDELTWINSAIQCALPDAKGIEYDMELRALVVDMYDRKIPFNDLSDGQRGMVALFADIARRICLLNPHMGKDVLSKTNGIIVIDELDIHLHPGWQRTIAPALKKAFPSIQFIAASHSPQVIGSLQPGEVILLNNHDGSHPRATYGLDSSTILEEVMGVPQREPEIEALLDELFSTLENNELEKARLQLDALKQKAPDLPEFAGAEALLKRKELIGR

SEQ ID NO: 84739 - protein, 210 aa, Pseudomonas meliae
MRRVIKGTEPASLAEWKASANEDWTPTYPTLQNPQKRDLHNCLLQEQNFSCCYCGREIELDSSHIEHFRPQDHYLPLALEYSNLHASCLRETTPGNPLHCGHYKGNWFDEDLHISPTEDDCEQRFCYLLTGKIQSTSHTDLPATTMIEKLALDIAYLTKRRQEAITRVFDEQILASISDTELTLLVLGMPTNSSPLATLSPAMRSSFWRL

SEQ ID NO: 84740 - protein, 507 aa, Pseudomonas amygdali pv. mori
MEAGLPPGTKLMATLFVSPFYGLHLVCCPNCNGRCFPYAWPDDETGENIVRLDTLRMQNYRCFGEFEIDFDPHLTILIASNGGGKTTILDAARVALWPFVKGFDLGGQTGKSATIQIEDVRLAQFGSGNMESQVPSVIEAKGVWWESAVESSWVQQRVSLKKSTNTIGDAGSKALTSYGKSLQDRVRSDAHVTLPMVSYLGTSRLWFEGRFSSAAAQTTLDKSEYSRTSAYLNCLSYSSSFKTFTAWYIWMYRSYREAQLIALERDEEMSDAGQRFEKIISAVKEAIDRLIKAPTGWHRLEYSASHQQQLVMHHPDQGVLPVEMLSDGLRNTIAMVADLAFRACKLNPHLGERAPLQTPGIALIDEVDMFLHPFWQQTIVGSLRAAFPAMQFIVTTHSPQVLSTVRRENIRVIGKDAQGRLIASRPLAMTYGEPSNSVLRSVMQVDPQPPVDEKPGLLQLTEWVDKGRYDEPQAILLMQQITEALTEQHPQLQRLQRSIKRQKALRG

SEQ ID NO: 84741 - protein, 240 aa, Pseudomonas amygdali pv. mori; identical to SEQ ID NO: 80903

SEQ ID NO: 84742 - protein, 421 aa, Pseudomonas savastanoi pv. nerii; identical to SEQ ID NO: 81186

SEQ ID NO: 84743 - protein, 227 aa, Pseudomonas savastanoi pv. nerii; identical to SEQ ID NO: 81187

SEQ ID NO: 84744 - protein, 441 aa, Pseudomonas syringae pv. philadelphi
MNLTRLCLKNYRRFAEFDIEFDPQLTVISARNGQGKTSVLEAIVAALGPFVGSFDQGMSRHIERTDARYARVGEGFESEQQFPVIISAEMSNPAKRWQRALNGPKSRTTTKEAEPLAAWGKELQLLLRSDSAISLPVVRYYSSRRLWVSHKNVSSKAILTESRTAGYEDCLSAFSTYVQLQEWMRKATLAVIQQKQQPGYEHSNLAPRLQGIRNAVNEVMAEEGWSDFHYSLTYEELSMSHADHSALPLGLLSDGVRAMITLVADLALRCSRLNGHLKEQASLQTTGIVLIDEVDLHLHPAWQQRVVASLRKAFPNIQFIVSTHSPQVLSTVKRECIRMVFQDADENWQAACPPQEVKGVESAIALNDIMGVNPIPPVAEALWVAEYTAKIENGSHEDHNGLALRKKLLDFYGAQHQVILDADRLIRFQTFKLQKHSNTKG

SEQ ID NO: 84745 - protein, 226 aa, Pseudomonas syringae pv. philadelphi
MLKLDRTSVDAPPCLADYNHPTHEWSDFRGTCKKQLRFALVQLQGIDGVTTEDAAGYGVRCAYCEGAIFHEGHIEHFRRKNPDHFPELTFAWSNLFLACGSTQHCGHHKDRRSAPAYDPDLLIKPDEHDPEHYLYFHSSGKVLARNNLSDHENSCATETIRVFGLDNPALEGARANAVRSYRKMHDADLSEIASWSDAERDAYFRGEIEATRCLPYATTIRHFLQK

SEQ ID NO: 84746 - protein, 455 aa, Pseudomonas savastanoi pv. phaseolicola; identical to SEQ ID NO: 84556

SEQ ID NO: 84747 - protein, 240 aa, Pseudomonas savastanoi pv. phaseolicola; identical to SEQ ID NO: 80903

SEQ ID NO: 84748 - protein, 438 aa, Pseudomonas savastanoi pv. phaseolicola
MSQGTLAHPPVLVKETDMRLDHLHLQNFRCYEDAHFDFQPGFNLVVGVNGSGKTSLLLGVAGCVGNLLGSIGVHQPSIAESDVRFALVKFEDRIRFERSYPLVLTAQGGAFERQEWHVSLERSSLQTNFSALNSLVFSENLISIDVSTHGDLPVFAVYQANRRWLTMSVTAELAAQSKPSRLDAYTSWFDAASNLKNFETWFIGKTLERFQRLSRVGSSSVFNDELTWINSAIQCALPDAKGIEYDMELRALVVDMDDRKIPFNDLSDGQRGMVALFADIARRICLLNPHMGKDVLSKTNGIIVIDELDIHLHPGWQRTIAPALKKAFPNIQFIAASHSPQVIGSLQPGEVILLNNHDGSHPRATYGLDSSSILEEVMGVPQREPEIEALLDELFSTLENNELEKARLQLDALKQKAPDLPEFAGAEALLKRKELIGR

SEQ ID NO: 84749 - protein, 214 aa, Pseudomonas savastanoi pv. phaseolicola; identical to SEQ ID NO: 80905

SEQ ID NO: 84750 - protein, 463 aa, Pseudomonas savastanoi pv. phaseolicola
MCSGSIPSGTFMEIKSFRLVNVGRFSDLEVALAPTERHASKVTVLVGNNGAGKTTLLKSVATSLSWLVARVRTPKGAGSRIDEGMVQNGTATSSITIRIEDVLISDDEINPLETEWGITATRKGRNATSSTVLSELNRLADGYRSKLTEKSDTSLPLLAFYPVERSVIEIPLKVHARHTFDQLDGYDNALGRGVDFRRFFEWFREREDSENETGISIELLNELSQKILIDTELWKVLTREHASSRDRQLTAVRTAVEAFMPGFTKLRVKRKPRLHMAIDKDGKTLNVSQLSQGEKSMMALVGDIARRLAMMNPALENPLHGNGIVLIDEVDLHLHPKWQRSLIAQLTITFPNCQFLLTTHSPLVISDSKDVLVYVMDDGELHEQDSLYGLDANQVLSSVMDTDIRNEEIQTVLDKLQHFLMRGELDEARTLYAGLTDELPANHIELAKASLLIRKLEVRREKD

SEQ ID NO: 84751 - protein, 206 aa, Pseudomonas savastanoi pv. phaseolicola; identical to SEQ ID NO: 80907

SEQ ID NO: 84752 - protein, 379 aa, Pseudomonas syringae pv. aceris
MAGCFGNLLGSIGVHQPSIAESDVRFELVKFEDRIRFERSYPLVLTAQGGAFEHQEWHVSLERSSLQTNFSALNSLVFSENLISIDGATHGDLPVFAVYQANRRWLTMSVTAEHAAQSKPSRLDAYTSWFDAASNLKNFETWFIGKTLERFQRLARTGFPGILTDELTWINSAIQCALPESKGIEYDMEMRGLMVDIDDRKTPFNDLSDGQRGMVALFADIARRICLLNPHMGKDVLSKTNGIIVIDELDIHLHPGWQRTIAPALKKAFPSIQFIAASHSPQVIGSLQPGEVILLNNHDGSHPRATYGLDSSSILEEVMGVPQREPEIEELLDQLFSTLENNELEKARSQLDALKKKAPDLPEFAGAEALLKRKEIIGR

SEQ ID NO: 84753 - protein, 215 aa, Pseudomonas syringae pv. aceris; identical to SEQ ID NO: 81083

SEQ ID NO: 84754 - protein, 460 aa, Pseudomonas syringae pv. aceris
MCSGPIPSGTFMEIKSFKLVNVGRFSDLEVALAPTENHASKVTVLVGNNGAGKTTLLESLSTLLTWLIARIRSERGAGKKVALERIKNNADFSEVSILLSESFPFADRAQFGWQLSSVRPGRKVESRTNLIHLALLADGYRTLLTDSGATSLPLIAYYPAERSVVDIPLEAPFRPPYRQLDGYEDALSRGVDFRQFFEWFRDREDRENENGVSSDTLMRAQQKHGPDSIEYEVLLRLNESSRDRELTAVRSAIYAFMPAFANLRVRRQPQAHMTIDKHGETLNVLQLSQGEKSMMALVGDIARRLAMMNPALENPLQGNGIVLIDEVDLHLHPKWQRSLIAQLTTTFPNCQFLLTTHSPLVISDSKDVLVYVMDDGELREQDSLYGLDANQVLSSVMDTGIRNEAVQTCLDEMQHFLIRGELDEARTLYGVLADQLPADHIELARASLLIRKLEIRREKD

SEQ ID NO: 84755 - protein, 216 aa, Pseudomonas syringae pv. aceris; identical to SEQ ID NO: 81085

SEQ ID NO: 84756 - protein, 142 aa, Pseudomonas syringae pv. broussonetiae
MQRLPKWQRRIVPALEDLFPNCQFIATTHSPFVIQAAGRQRITFIEPHSSARLLDGGNSLEDIAEDIQGISQPQRSVRAEILGTAAKRYFTLLELKAVDAQQVAPAELRDAEKSYRDASEPFTSDPAVHALLKVLMMEGNEQ

SEQ ID NO: 84757 - protein, 228 aa, Pseudomonas syringae pv. broussonetiae
MRPVTRGGAPNVYAKYQDAIGDLEDCFGRYCSYCERRFPALLAVEHVSPKSSDAARATDWTNFLIGCVNCNSTKGHTPTNDQDFLWPDKDNTLTAIEYREGGLVQPASGLDPMIVPKAAALIDLVGLDRHPGQPAEKQPTDRDKRYLDREENWKLAQDMRVRLKRNDNEDYREALVNLAKTSGFFSIWIAAFDDDPDMRRRLVETHVGTARECFETDWTLKARVGGHI

SEQ ID NO: 84758 - protein, 452 aa, Pseudomonas syringae pv. broussonetiae
MEIKSFKLVNVGRFSDLEVALAPTERHESKVTVLVGNNGAGKTTLLKSVATSLSWLVARVRTPKGAGSRIDEDMVQNGTATSSITIRIEDVLISDDEINPLESEWAITATRKGRNATSSTVLSELNRLADGYRSKLTEKSDTSLPLLAFYPVERSVIEIPLKVLARHTFDQLDGYDNALGRGVDFRRFFEWFREREDSENETGISTELLNELSQKILIDTELWKVLTREHASSRDRQLTAVRTAVEAFMPGLTKLRVRRKPRLHMAIDKEGKTLNVSQLSQGEKSMMALVGDIARRLAMMNPALENPLHGNGIVLIDEVDLHLHPKWQRSLIAQLTTTFPNCQFLLTTHSPLVISDSKDVLVYVMDDGELREQDSLYGLDANQVLSSVMDTDIRNEEIQTALDKLQHFLMRGELDEARTLYTELADELPANHIELAKASLLIRKLEVRREKD

SEQ ID NO: 84759 - protein, 216 aa, Pseudomonas syringae pv. broussonetiae; identical to SEQ ID NO: 81063

SEQ ID NO: 84760 - protein, 426 aa, Pseudomonas caricapapayae
MVKETDMRLDHLHLQNFRCYEDAHFDFQPGFNLVVGVNGSGKTSLLQGVACCFGKFLANMGAGNSLITESDARFNLVKSENSVHFERIFPLKLAARGDAFGFQDWYVSLKRDGSNHNSSNLESVISPENPHVSESLEIDMPVFAVYRASRGWLTMNIAAEHAAQSKLSRLEAYTNWFDAASNLKNFETWFIGKTLERFQRISRYGLSGVFTDELTWINSAIQCALPESKGIEYDMEMRGLMVDMNDQKVPLNDLSDGQRGMVALFADIARRICLLNPHMGKDVLSKTNGIIVIDELDIHLHPGWQRTIAPALKKAFPNVQFIAASHSPQVIGSLQPGEVILLNNHDGSHPRATYGLDSSSILEEVMGVPQREPEIEELLDQLFSTLENNELEKARSQLDALKKKAPDLPEFAGAEALLKRKEIIGR

SEQ ID NO: 84761 - protein, 213 aa, Pseudomonas caricapapayae
MRRVIKGTEPVSFTEWKASANEDWTPTYPTLQNPQKRDLHNRLLQEQNFSCCYCGREIELDSSHIEHFRPQEHYLPLALEYSNLHASCLRETAPGNPLHCGHYKGSWFDEDLHISPTEDDCEQRFRYLLTGKIQSTSHTDLPATTMIEKLALDIAYLTKRRQEAITGVFDEQFLSSASGAELNHLRDRLRSQADNNPISFGHVIARYAEQLLA

SEQ ID NO: 84762 - protein, 445 aa, Pseudomonas congelans
MPFVHKLSFSDWSGRLKEVVFSSPQDSLKEKGFHTTIITGQNGSHKSTILKELVSAIVLIDGEAKIQYGAHSNFSPHVICVSGSVADRFPLKEKPGGGSTEFDVPDYVYLGQRVGPNLLSKKRPLETLLISALDNRKGDRYKWGFFRKAHQFAGIKMSVKFELAIERAFSEDSFHLRDAIVERTIGRGSERGAPMRRLSPSTAKWLLNEFSDRDFEDFERFLDNGRKRVTVLLSDNGAICESIPIAMLRLGLLADVVGLKDVLVRSSINNSEFSIYELSSGEYHMYSSILGVGFGVEDSSIVLIDEPENSLHPQWQQDFMSAVFDIGSQGLALGHIIICTHSPLIVGAAPEGATIIDLKNEVAPSESSTFGGSSDEILLSQFGLASSRNRVVVDIIQRAVSLVERGDFGGEEFDLMKPVLASLREKMRPHDPIMQILDALLEEAE

SEQ ID NO: 84763 - protein, 240 aa, Pseudomonas congelans
MNIGYDRIAPSPSYPIGTTKLDYLGFEWGDQHNIIKDFKSELKKSLREAQRGRCAYCRRTLYDDISTHMEHFVEKRQYVSYTFEILNISLSCGTCNTQKNAYHSSFNSMLKKRAERHKKAPITRCPTLSREIASGNPFPNTADQYRWVHPHFDLYSENITIDKGWIFVGSSIKGARTISGLKLNALAAIEKRALDERLSMRGGLLSTLVCALSEMSHHRADEIAGVVVKVLRRRRASVLR

SEQ ID NO: 84764 - protein, 420 aa, Pseudomonas syringae pv. cunninghamiae
MRLDHLHLQNFRCYEDAHFDFQPGFNLVVGVNGSGKTSLLQGVACCFGKFLANMGSGNSLITELDARFTLVRSENSVHFERVFPLKLTARGDAFGFLDWHVSLKRDGSNDNSSNLESVTSPQNPHLSESFEIDMPVFAVYRANRGWLTMNIAAEQAAQSKPSRLEAYTNWFDAASNLKNFETWFIGKTLERFQRISRHGFSDVFTDELTFINSAIQCALPESKGIEYDMEMRGLMVDMDDRKIPFNDLSDGQRGMVALFADIARRICLLNPHMGKDVLSKTNGIIVIDELDIHLHPGWQRTIAPALKKAFPSIQFIAASHSPQVIGSLQPGEVILLNNHDGSHPRATYGLDSSTILEEVMDVPQREPEIEALLDELFSTLENNELEKARLQLDALKQKAPDLPEFAGAEALLKRKELIGR

SEQ ID NO: 84765 - protein, 213 aa, Pseudomonas syringae pv. cunninghamiae
MRRVIKGAEPASFTEWKASANEDWTPTYPTLQNPQKRDLHNCLLQEQNFSCCYCGREIELDSSHIEHFRPQDHYLPLTLEYSNLHASCLRETTPGNPLHCGHYKGNWFDEDLHISPTEDDCEQRFRYLLTGKIQSTSHTDLPATTMIEKLALDIAYLTKRRQEAITGVFDEQFLSSASDAELRHLLESLRSQAANNPISFGHVIARYAEQLLA

SEQ ID NO: 84766 - protein, 458 aa, Pseudomonas syringae pv. maculicola; identical to SEQ ID NO: 84592

SEQ ID NO: 84767 - protein, 240 aa, Pseudomonas syringae pv. maculicola
MRSVHKRGGGPYQLTRSHCSPPTTSDTSTSRWSSFGYKAQVLGCLLEEQYGLCCYSEIRPDRVGLSFHIEHVENKSQHPQRTFDYNNLAACALDSQSDLDVLKIQGAEVFGGHASGKSKGVDMARFVSCHMPDCSRFFAYLSDGRVVPADGLSLDEVDRAEYTIDLLNLNSPYLQDLRQSWWDELEALFEEHVDQDMSLHCLAGIDLIPVGASLSQFFSITRNFFGGIAEEVLDQEAGRW

SEQ ID NO: 84768 - protein, 441 aa, Pseudomonas syringae pv. maculicola; identical to SEQ ID NO: 84594

SEQ ID NO: 84769 - protein, 226 aa, Pseudomonas syringae pv. maculicola; identical to SEQ ID NO: 84745

SEQ ID NO: 84770 - protein, 452 aa, Pseudomonas amygdali pv. mellea; identical to SEQ ID NO: 84708

SEQ ID NO: 84771 - protein, 216 aa, Pseudomonas amygdali pv. mellea; identical to SEQ ID NO: 84709

SEQ ID NO: 84772 - protein, 421 aa, Pseudomonas amygdali pv. mellea; identical to SEQ ID NO: 84710

SEQ ID NO: 84773 - protein, 227 aa, Pseudomonas amygdali pv. mellea; identical to SEQ ID NO: 84711

SEQ ID NO: 84774 - protein, 458 aa, Pseudomonas amygdali pv. mellea
MRLDTLRMQNYRCFGEFEIDFDPHLTILIASNGGGKTTILDAARVALWPFVKGFDLGGQTGKSATIQIEDVRLAQFGSGNMESQVPSVIEAKGVWWESAVESSWVQQRVSLKKSTNTIGDAGSKALTSYGKSLQDRVRSDAHVTLPMVSYLGTSRLWFEGRFSSAAAQTTLDKSEYSRTSAYLNCLSYSSSFKTFTAWYIWMYRSYREAQLIALERDEEMSDAGQRFEKIISAVKEAIDRLIKAPTGWHRLEYSASHQQQLVMHHPDQGVLPVEMLSDGLRNTIAMVADLAFRACKLNPHLGERAPLQTPGIALIDEVDMFLHPFWQQTIVGSLRAAFPAMQFIVTTHSPQVLSTVRRENIRVIGKDAQGRLIASRPLAMTYGEPSNSVLRSVMQVDPQPPVDEKPGLLQLTEWVDKGRYDEPQAILLMQQITEALTEQHPQLQRLQRSIKRQKALRG

SEQ ID NO: 84775 - protein, 240 aa, Pseudomonas amygdali pv. mellea; identical to SEQ ID NO: 80903

SEQ ID NO: 84776 - protein, 421 aa, Pseudomonas syringae pv. solidagae
MRLDRLHLQNFRCYEDAHFDFQPGFNLVVGVNGSGKTSLLLGVAGCFGNLLGSIGVHQPSIAESDVRFELVKFEDRIRFERSYPLVLTAQGGAFEHQEWHVSLERSSLQTNFSALNSLVFSENLISIDGATHGDLPVFAVYQANRRWLTMSVTAEHAAQSKPSRLDAYTSWFDAASNLKNFETWFIGKTLERFQRLARTGFPGILTDELTWINSAIQCALPESKGIEYDMEMRGLMVDIDDRKTPFNDLSDGQRGMVALFADIARRICLLNPHMGKDVLSKTNGIIVIDELDIHLHPGWQRTIAPALKKAFPSIQFIAASHSPQVIGSLQPGEVILLNNHDGSHPRATYGLDSSSILEEVMGVPQREPEIEELLDQLFSTLENNELEKARSQLDALKKKAPDLPEFAGAEALLKRKEIIGR

SEQ ID NO: 84777 - protein, 215 aa, Pseudomonas syringae pv. solidagae; identical to SEQ ID NO: 80909

SEQ ID NO: 84778 - protein, 204 aa, Pseudomonas syringae pv. solidagae
MPAFANLRVRRQPQAHMTIDKHGETLNVLQLSQGEKSMMALVGDIARRLAMMNPALENPLQGNGIVLIDEVDLHLHPKWQRSLIAQLTTTFPNCQFLLTTHSPLVISDSKDVLVYVMDDGELREQDSLYGLDANQVLSSVMDTGIRNEAVQTCLDEMQHFLIRGELDEARTLYGVLADQLPADHIELARASLLIRKLEIRREKD

SEQ ID NO: 84779 - protein, 107 aa, Pseudomonas syringae pv. solidagae
MRKIEKGTLAVLEKWKRANKGKKYADLVGHDDLKDAIRHTCVIEQHGLCAYCCCRITVEKGSACNEHIEAQHLARTARWTSTILLRVAPRPDGVTMPMVVSLYRLHR

SEQ ID NO: 84780 - protein, 441 aa, Pseudomonas syringae pv. solidagae
MNLTKLCLKNYRRFAEFDIEFDPQLTVISARNGQGKTSVLEAIVAALGPFVGSFDQGVSKHIERTDARYARVGEGFESEQQFPVVINAEMSNPAKRWQRALNGPKSRTTTKQAEPLAAWGKELQSMLRSDSATSLPVVRYYSSRRLWVSHKNVSSKAILTESRTAGYEDCLSAFSTYVQLQEWMRKATLAVIQQKQQPGYEHSNLEPRLQGIRDAVNEVMAEEGWSDFHYSLTFEELSMFHTDHSALPLSLLSDGVRAMITLVADLALRCSRLNGHLKEQASLQTTGIVLIDEVDLHLHPAWQQRVIASLRKAFPNIQFIVSTHSPQVLSTVKRECIRMVFQDANENWQATCPPQEVKGVESAVALNDIMGVNPIPPVNEAHWVADYAAKIENGTHDDHDGLTLRQKLLDFYGAQHQVILDADRLIRFQAFKLQKHSNTEG

SEQ ID NO: 84781 - protein, 226 aa, Pseudomonas syringae pv. solidagae
MLKLDRASVDAPLCLADYVHPTHQWSDFHGTCKKQLRFALVQLQGIHGVTTEDAGEYGARCAYCEGAIFREGHIEHFRRKNPRHYPELTFEWSNLFLACGGTQHCGHHKDRRSAPPYDPDLLIKPDEHDPEHYLYFHSSGKVLARNNLSHHENSCATETIRVFGLDNPALEGARANAVRAYRKLREEDLCEIASWSDADRTAYFRQEIEATRWHPYATTIKHFLQK

SEQ ID NO: 84782 - protein, 441 aa, Pseudomonas syringae pv. syringae
MNLTKLCLKNYRRFAEFDIEFDPQLTVISARNGQGKTSVLEAIVAALGPFVGSFDQGVSKHIERTDARYARVGEGFESEQQFPVIINAEMSNPAKRWQRALNGPKSRTTTKQAEPLAAWGKELQSMLRSDSATSLPVVRYYSSRRLWVSHKNVSSKAILTESRTAGYEDCLSAFSTYVQLQEWMRKATLAVIQQKQQPGYEHSNLEPRLQGIRDAVNEVMAEEGWSDFHYSLTFEELSMFHADHSALPLSLLSDGVRAMITLVADLALRCSRLNGHLKEQASLQTTGIVLIDEVDLHLHPAWQQRVVASLRKAFPKIQFIVSTHSPQVLSTVKRECIRMVFQDANENWQAACPPQEVKGVESAVALNDIMGVNPIPPVDEALWVSEYTAEIESGTHEDRNGLALRKKLLDFYGAQHQVILDADRLIRFQAFKLQKHSNTEG

SEQ ID NO: 84783 - protein, 226 aa, Pseudomonas syringae pv. syringae
MLKLDRASVDAPPCLADYDHPTHTWSDFRGTCKKQLRVALVQLQGIPGITTEEATEYGVRCAYCETRILHEGHIEHFRRKNRDHYPELTFDWSNLFLACGSTTHCGHHKDRRTTLPYDPNVLIKPDEHESEYYLYFHSSGKVHARNHLNAEENHRATETIRVFGLHEPALEGARANAVRSYRKMHDADLCEIASWSDADRGEYFRQEIEATRWLPYATTIRHFLQK

SEQ ID NO: 84784 - protein, 421 aa, Pseudomonas amygdali pv. tabaci; identical to SEQ ID NO: 81088

SEQ ID NO: 84785 - protein, 227 aa, Pseudomonas amygdali pv. tabaci; identical to SEQ ID NO: 81089

SEQ ID NO: 84786 - protein, 463 aa, Pseudomonas amygdali pv. tabaci
MCSGSIPSETFMEIKSFRLVNVGRFSDLEVALAPTERYASKVTVLVGNNGAGKTTLLKSVATSLSWLVARVRTPKGAGSRIDEGMVQNGTATSSITIRIEDVLISDDEINPLESEWAITATRKGRNATSSTVLSELNRLADGYRSKLTEKSDTSLPLLAFYPVERSVIEIPLKVHARHTFDQLDGYDNALGRGVDFRRFFEWFREREDSENETGISTELLNELSQKILIDTELWKVLTREHASSRDRQLTAVRTAVEAFMPGFTKLRVKRKPRLHMAIDKEGKTLNVSQLSQGEKSMMALVGDIARRLAMMNPALENPLHGNGIVLIDEVDLHLHPKWQRSLIAQLTTTFPNCQFLLTTHSPLVISDSKDVLVYVMDNGELHEQDSLYGLDANQVLSSVMDTDIRNEEIQTVLDKLQHFLMRGELDEARTLYAGLTDELPANHIELAKASLLIRKLEVRREKD

SEQ ID NO: 84787 - protein, 216 aa, Pseudomonas amygdali pv. tabaci; identical to SEQ ID NO: 81151

SEQ ID NO: 84788 - protein, 443 aa, Pseudomonas syringae pv. tomato
MAHRVSQGTLAHPPALVKETDMRLDHLRLQNFRCYEDAHFDFQPGFNLVVGVNGSGKTSLLLGVAECLIPYGNAMGQGQEILSKEDVRFVIDRHEGRSRFERKFPVFIRADGDIFDLPNWRAVRLLEPWEGGVDPSSLSHLSAVLARNNAGEQIDFPVLAFYRANRRWSSARISAEFAAQQRTSRFDGYANWFDAVADLRDFESWLIARTLERLQDRLDSTPTVEREDELEWVNRAIRLAIPDAHDLRYDLRLQSLLVDMGEGNAVPFHELSDGQRSLIALIADIARRMCVLNPHIGKDVLANTGGIVIIDELDIHLHPAWQRNIAPTLKKAFPKVQFIATSHSPQVIGSLQPGEVILLKNGDSSHPRATYGLDSSTILEEVMGVPQREPEIEVLLDELFSTLENNELEKARLQLDALKKKAPDLPEFAGAEALLKRKELIGR

SEQ ID NO: 84789 - protein, 214 aa, Pseudomonas syringae pv. tomato; identical to SEQ ID NO: 80883

SEQ ID NO: 84790 - protein, 442 aa, Pseudomonas amygdali pv. ulmi
MADRVSQGTLAHPPVLVKETDMRLDHLHLQNFRCYEDAHFDFQPGFNLVVGVNGSGKTSLLLGVAGCFGNLLGSIGVHQPSIAESDVRFALVKFEDRIRFERSYPLVLTAQGGAFERQEWHVSLERSSLQTNFSALNSLVFSENLISIDVSTHGDLPVFAVYQANRRWLTMSVTAELAAQSKPSRLDAYTSWFDAASNLKNFETWFIGKTLERFQRLSRAGSSSVFNDELTWINSAIQCALPDAKGIDYDMELRALVVDMDDRKIPFNDLSDGQRGMVALFADIARRICLLNPHMGKDVLSKTNGIIVIDELDIHLHPGWQRTIAPALKKAFPSIQFIAASHSPQVIGSLQPGEVILLNNHDGSHPRATYGLDSSTILEEVMGVPQREPEIEALLDELFSTLENNEREKARLQLDALKQKAPDLPEFAGAEALLKRKELIGR

SEQ ID NO: 84791 - protein, 227 aa, Pseudomonas amygdali pv. ulmi
MRRVIKGTEPASLTEWKASANEDWTPTYPTLQNPQKRDLHNCLLQEQNFSCCYCGREIELDSSHIEHFRPQDHYLPLALEYSNLHASCLRETTPGNPLHCGHYKGNWFDEDLHISPTEDDCEQRFRYLLTGKIQSTSHTDLPATTMIEKLALDIAYLTKRRQEAITRVFDEQILASISDTELTLLVQGLCSGDANKQLAFSHVVARYAEQFLASLNPPPEKSSVKNT

SEQ ID NO: 84792 - protein, 422 aa, Pseudomonas syringae pv. viburni
MRLDHLHLQNFRCYEDAHFDFQPGFNLVVGVNGSGKTSLLLGVAGCLIPYGNAMGQGQEILSKEDVRFVIDRHEGRSRFERKFPVFIRANGDIFDLPNWRAVRLLEPWEGGVDPSSLSHLSAVLARNNAGEQIDFPVLAFYRANRRWSSARISAEFAAQQRTSRFDGYANWFDAVADLRDFESWLIARTLERLQDRLDSTPTVEREDELEWVNRAIRLAIPDAHDLRYDLRLQSLLVDMGEGNAVPFHELSDGQRSLIALIADIARRMCVLNPHIGKDVLANTGGIVIIDELDIHLHPAWQRNIAPTLKKAFPKVQFIATSHSPQVIGSLQPGEVILLNNHDGSHPRATYGLDSSSILEEVMGVSQREPEIEALLDELFSTLENNELEKARLQLDALKKKAPDLPEFAGAEALLKRKELIGR

SEQ ID NO: 84793 - protein, 214 aa, Pseudomonas syringae pv. viburni
MKRIIKGTEPASFIEWKASANEDWMPTYPTLQNPQKRELHNCLLQEQQFSCCYCGREIELDSSHIEHFRPQEHYLPLALEYSNLHASCLRETKPGNPLHCGHHKSNWFDETLHISPLADDCEPRFRYLLNGKIQSNPPEDLPATTMIEKLALDIAYLTRRRQEAITGIFDEQFILSASEAELTHLVQSLRSGDAGKQVAFGHVVARYAEQLRAS

SEQ ID NO: 84794 - protein, 452 aa, Pseudomonas syringae pv. viburni
MEIKSFRLINVGRFSDLEVALAPTERHASKVTVLVGNNGAGKTTLLKSVATALSWLVARVRTPKGVGSRIDEDTIQAGAVTSSILIDAYDDLILHPLVSGPEYHWGITTTRKGRNPTSSTVLNELNWLADGYRSKLTSKSDASLPILAFYPVERSVLDVQPKIYGKRTFDQLDGYDNALGRGVDFRRFFEWFREREDSENETGISTELLIELSQKILVDTELWKVLTREHASSRDRQLTAVRTAVEAFMPGFTKLRVKRKPRLHMAIDKDGKTLNVSQLSQGEKSMMALVGDIARRLAMMNPALENPLHGNGIVLIDEVDLHLHPKWQRSLIAQLTTTFPNCQFLLTTHSPLVISDSKDVLVYVMDDGQLREQDGLNGLDANQVLLSVMDTDIRTEAVQTALDELQHFLIRGELDEARTIYGVLAGELSADHIELAKASLLIRKLELRRAKD

SEQ ID NO: 84795 - protein, 213 aa, Pseudomonas syringae pv. viburni
MRKIEKGSLAVLEKWKRANKGKKYADLVGREDIKDAIRQACVTEQHGLCADCCCRITLKKTSAHNEHVEAQRLAPRRTLDFQNIVASCNQPGQCGKAHGHQLLRLTPLMAECEAELQFELSGLVGGKTERAQDCIKVLNLGGDQAANRGLIGERKAMINTLLCPHGMDASGMSLEGDDLLELLHDELLLVDESQQLQAFSPVLVNVIRRLKAW

SEQ ID NO: 84796 - protein, 422 aa, Pseudomonas syringae pv. theae; identical to SEQ ID NO: 82148

SEQ ID NO: 84797 - protein, 214 aa, Pseudomonas syringae pv. theae; identical to SEQ ID NO: 82149

SEQ ID NO: 84798 - protein, 452 aa, Pseudomonas amygdali pv. sesami; identical to SEQ ID NO: 84588

SEQ ID NO: 84799 - protein, 216 aa, Pseudomonas amygdali pv. sesami
MRKIEKGSLAVLEKWKRANKGKKYADLVGREDIKDAIRHACVTEQHGLCAYCCCRITAEKGSACNEHVEAQHLAPHRTLDFGNIVASCTKAGRCDAAHGHQTLPLTPLMIECEKELQFELSGLVAGTTPRACASINVLNLGDTRESNRDLVVKRKEMIDTLLFSYSIDPAELAVEADDVLDLLRNDLLELDAQQLLQAFSPVLVNVILGIQNARQP

SEQ ID NO: 84800 - protein, 421 aa, Pseudomonas savastanoi pv. savastanoi; identical to SEQ ID NO: 81186

SEQ ID NO: 84801 - protein, 227 aa, Pseudomonas savastanoi pv. savastanoi; identical to SEQ ID NO: 81187

SEQ ID NO: 84802 - protein, 770 aa, Pseudomonas syringae pv. tagetis
MEYDEGRELTRLIAEEMIAVASGFPSIPLEMITLLAGFHLINGLTLEGRYRRVFDEAYSEVADQCLKDYDDTDISAVFNAKLEELHDELALPLDREIRVKTATYLIDRYIMDNYQIPYDHPAVVGALVGSIHLSLRSPVIEFAPITGELSMAMDKTQTAVTMLYPSSRALKALITLKLIINKVFTTFVHGQIPDVLAGSQPSYLFDSVSHISFVTATGMTSMSSFASKYSQPARFMVIIPSARAQLGSLLKELSPALQEGLRLDTAICFSISEGRGAKSDQILLVFSQGIHLMHKPYLYIDVSSANKSLEQLDLQERAILAGQIFNIHESREGHDHRKNLPPKVSTIINAQFGDGYRNVKTLCIEDEALPWKPLKIYSPRNFIRANSTEGTTFNATANPQSILKLLNDAFEPVCIYIIGNNGAGKTRLLCDLIERVRGMDRRAVGISTGVHDRFPFGRSGQVGHFEYQGARSTAETISPSKLRKTVTARAAQVLGDQRMLEALKECQQCLGFATRFYFMLKPEMALHNDPRDIRLIRMSDNAADNHVPEPLSHYEFGVVRPGNEEHRERIVSYSSLSSGEQNINQMLLSIITTAERNTVFLVDEPEISLHLKWQQTLPRVFHLLSQRFGCSFVVATHAPTLISNANDLGSHSFMLDLGKLPELSAKQRYSVESIILGGFGTYTPHNRAVHEACARIVAKTMEAQGNRQAEAFSPLEELDDMLEKMRVSQGAYTPPGLQEDIDLINKASTAVQLLLKDQGLVDSASSKAGK

SEQ ID NO: 84803 - protein, 293 aa, Pseudomonas syringae pv. tagetis
MTEYFVLDEADLLPRYEEYKSLCHTEERFHKVIMFNLLRYHATTLRRFAKRLGGETVEARNLWNEFSNPAKKKSDAQNVATPAKAAAAGKPAVKPKRKRGKAKPLISDIKGAFRSYIEKQQHNRCCYCRRWLCNSGYSKPIEHILPRKTYEQYSFHFWNLSVACVDCNGLKNETDWASPDKHGAKDYPLPSAFTEMFHPRFHRFDEHVRFIRVQTNDHTITLYRGITPQGKKLCDDLLTTIAGKEVLVNANAALKSSMETIERFDVKEGSDLESALKSLVGALSERSIDLLKH

SEQ ID NO: 84804 - protein, 737 aa, Pseudomonas syringae pv. aptata
MRVLIKLKKLSNPKPVEISTKNTLYVREMAKLRAYFKLNPTERARTRPPFDKDVLDAQSVLQELKRIQHSKCAYCETILEHNPSRFVSHYRPLSNAFDPHQDAEHLECYAWFAYEWRNLMLICKDCDNHKLNFFPIAGRTAIALSSWRAAQLREMPLLLNPFEDNPSDHLMFDTDGVACSTSAAGKETINILNLNRPALCIKRKEQIGAGLKIILGNSNEHALREALREYTDHEVLHGGAVRNCLGHVCRILQTQIRHGRYSAHTDLIKKIIRLRNEFSVHDWEEAISRCKSNDLAFVIQNNELGELQPRRYAYINRIEIGRFKGVEHFTLDLDAGPTGQSRSETSCTMLLGENATGKSSILQAIALALMPSGERQRLRLDQKSIIPYGIDDTFMPPLQPAVTLRFSNGEAVAISMNLQTGRLKSVGSPHNVVFGYGSRRYFVLGKSTKAQTCPNRTLFNQAANLPDPTNWLLNLKEEKKFDAVARALASLLSLRAGEFVGRDDHSIFIQRHTSPLPIEHLSDGYKSLFAMAVDIMREMLKHWDSLEFAQGIVLIDEIENHLHPRWKMRVMRALRDSFPRVQFITSTHDPLCLRGMLEGEVQVLYRDRVGHLQRVEQLPNVANLRIEQILTSDYFGLATTEDPLRQHALEQLAKYAAHGDSDLTQTERRHRDDLLENYGSLPMIGDTLDRQIIAQALTRHIRDADIATPFEHASAREASVRAIIEVLERNRKKYGTR

SEQ ID NO: 84805 - protein, 303 aa, Pseudomonas syringae pv. aptata
MVPVNRSLVEKPASLTAPNGAGHREHLRADIHYQNPHTTAYGFSHYKEPDVVMALNTLFHNKCAYCEGKITNTGPIDVEHFRPKGRVAGVLNHPGYWWLATEWTNLLASCIDCNRSRNQTLLGSEDDQQLTQGERLSGKHDHFPVSGPRATCATDDHALEAPLLIDPTSVDPREHIYWKVMVDQPLAVAVSQNGQASIDLLGLNRSKLAEARRELQLKLDEEFLCLKATISKIADEPTNEGVRGWMPVLQMLIDKFFRHTEANNEYSAFARHIVESRYDKVSKMMDALLARVAADSPVESAAR

SEQ ID NO: 84806 - protein, 645 aa, Pseudomonas syringae pv. aptata
MVQFNSAEFAGISIMTPELKARQQIDPKLEKAGWVIQDMKELNLSAGVGVAVRECPTDTGPADYMLFVNRVAVGVIEAKKDSAGENLTVTEIQTERYATSSLKWRKDDTPLRFLFEATGQIIRFTDNADPVPRSREIFNFFKPEALATWLAQPETLRRRLAEQMPALPELNLRDCQISAVTGLEQSLALNKPRALVHMATGAGKTFTAITSVYRLLKFGGAKRILFLVDMYEVFSPYLESYDSKLRNGIDPGLKRLFYAMPVHSQFVLLAFMIQQSDVVRAFLDDHLGIDPDDGIESVLFVLRQPPWKSKAPDGDPRFWNARGVVRDFLSRLHDIALAPIEISRQVSTSIWNKTKLQFKYLYVKDIAALRRLVGNQAPAQFFRDLESTYVSELIEEVRIRIRLKKNDGSVTFRELSEGEQQLLTVLGLLRFTAEDESLFLLDEPDTHLNPRWSVDYISYLKQFIANGTKQEETSHILLTTHNPLAVAELDREQVQILRMSKQEGQRQILACYPEVAPRGMGYAAIVTSDMFGIASSMDASTQLQLEKQRALGAKPDLSVTEQGALDEINDDLNRLGFRFFHPDDEFSRYLRLRNEALKARFGVIDPLDLAEKAVTMTRQEREDLATDLITKLVEDENEELGGPSR

SEQ ID NO: 84807 - protein, 267 aa, Pseudomonas syringae pv. aptata; identical to SEQ ID NO: 81081

SEQ ID NO: 84808 - protein, 463 aa, Pseudomonas syringae pv. alisalensis
MCSGSIPSGTFMEIKSFRLVNVGRFSDLEVALAPTERYASKVTVLVGNNGAGKTTLLKSVATSLSWLVARVRTPKGAGNRIDEGMVQNGAATSSITIRVEDVLISDDEVNPLESEWEITTTRKGRNATSSTVLSELTRLADGYRSKLTSKSDSSLPLLAFYPVERAVIEIPLKVLARHTFDQLDGYDNALGRGVDFRRFFEWFREREDSENETGISTELLNELSKKILVDTELWKVLTREHASSRDRQLTAVRTAVEAFMPGFTKLRVKRKPRLHMAIDKDGQTLNVSQLSQGEKSMMALVGDIARRLAMMNPALENPLHGNGIVLIDEVDLHLHPKWQRSLIAQLTTTFPNCQFLLTTHSPLVISDSKDVLVYVMDDGELREQDSLYGLDANQVLLSVMDTDIRNAAVQKRLDRLQELLMAGDLEEVRSLYKKLAIDLPSGHIELAKASLLIRKLELRRAKD

SEQ ID NO: 84809 - protein, 216 aa, Pseudomonas syringae pv. alisalensis; identical to SEQ ID NO: 81067

SEQ ID NO: 84810 - protein, 507 aa, Pseudomonas syringae pv. alisalensis
MEAGWPPGTKLMATLFVSPFYGLHLVCCPNRNGRCFPYAWPDDETGENTVRLDTLRMQNYRCFGEFEIDFDPHLTILIASNGGGKTTILDAARVALWPFVKGFDLGGQTGKSATIQIEDVRLTQFGSGNMESQVPSVIQAKGVWWENAGDSSWLQQRVSLKKSTNTIGDAGSKALTLYGKSLQDSVRSDAHVTLPMVTYLGTSRLWFEGRFSSAAAQTTLDKSEYSRTSAYLNCLSYSSSFKTFTAWYIWMYRSYREAQLIALERGEEMSDTGQRFEKIISAVKEAIDRLIKAPTGWHRLEYSASHQQQLVMHHPDQGILPVEMLSDGLRNTIAMVADLAFRACKLNPHLGELAPLQTPGIALIDEVDMFLHPFWQQTIVGSLRAAFPAMQFIVTTHSPQVLSTVRRENIRVIGKDAQGRLIASPPLAMTYGEPSNSVLRSVMQVDPQPPVDEKPGLLQLTEWVDKGRYDEPQAILLMQQITEALTEQHPQLQRLQRSIKRQKALKG

SEQ ID NO: 84811 - protein, 240 aa, Pseudomonas syringae pv. alisalensis
MRSVRKRGSGPYQLARSHCSPPTTSDTSTSRWSSFGYKAQVLGCLLEEQYGLCCYSEIRPDRVGLSFHIEHVENKSQHPQRTFDYNNLAACALDSQSDLDVLKIQGAEVFGGHASGKSKGVDMARFVSCHMPDCSRFFAYLSDGRVVPADGLSLDDVDRAGYTIDLLNLNSPYLQDLRQSWWDELEALFEEHVDREMSLHCLAGIDLIPVGASLSQFFSITRNFFGGIAEEVLDQEAGRC

SEQ ID NO: 84812 - protein, 451 aa, Pseudomonas syringae pv. alisalensis
MRTSFSQKRPMNLTRLCLKNYRRFAEFDIEFDPQLTIISARNGQGKTSVLEAIVAALGPFVGSFDQGVSRHIERTDARYARVGEGFESEQQFPVVISAEMSNPAMRWQRALNGPKSRTTTKEAEPLAAWGKELQSMLRSDSAISLPVVRYYSSRRLWVSHKNVSSKAVLTESRTAGYEDCLSAFSTYAQLQEWMRKATLAVIQQKQQAGYEHSNLEPRLQGIRNAVNEVMADEGWSDFHYSLTFEELSMSHPDHAALPLGLLSDGVRAMITLVADLALRCSRLNGHFKELASLQTTGVVLIDEVDLHLHPAWQQRVIGSLRKAFPKIQFIVSTHSPQVLSTVKRECIRMVFQDANENWQAAYPPQEVKGVESAVALNDIMGVNPIPPVDEACWVAEYMAKIESGTHEDRDGLALRKKLLDFYGAQHQVLLDADRLVRFQAFKLQKHSNSKG

SEQ ID NO: 84813 - protein, 226 aa, Pseudomonas syringae pv. alisalensis
MLKLDRASVDAPPCLADYDHLTHTWSDFRGTCKKQLRFALVQLQGILGVTTEDAAEYGVRCAYCEGAIFHDGHIEHFRRKNPAHYPELTFAWSNLFLACGSPQHCGHHKDRRSAPAYDPGLLIKPDEHDPEHYLHFHSSGKVLARNNLNDHENSCATETIRVFGLDHPALEGARANAVRSYRNLHDADLYEIASWSEADRNDYFRQEIEATRWLPYATTIRHFLQK

SEQ ID NO: 84814 - protein, 441 aa, Pseudomonas syringae pv. antirrhini; identical to SEQ ID NO: 84744

SEQ ID NO: 84815 - protein, 226 aa, Pseudomonas syringae pv. antirrhini; identical to SEQ ID NO: 84745

SEQ ID NO: 84816 - protein, 441 aa, Pseudomonas syringae pv. berberidis; identical to SEQ ID NO: 84744

SEQ ID NO: 84817 - protein, 226 aa, Pseudomonas syringae pv. berberidis; identical to SEQ ID NO: 84745

SEQ ID NO: 84818 - protein, 376 aa, Pseudoalteromonas sp. P1-13-1a
MIRKEHLADLEPSHVAVIIGENGSGKSTLLSQLSRKYLEQGRKVIAIANSIHDKFNSRSRNFSLLAYRSGRKISQRTIKKALLNLGNEDLVKTNRIGQILEYVGYQNEIGFKVNFLRVVKQYEIEEVEFLPPNELQDIVTLINKLYENSSNEIHWIRLDEFRYDKMNSSTITRLLKHEKLLKKLNFISTVEVFLRKNWEPINLSEASSGELSFITSLVFISTMISEDSVILIDEPENSLHPRWQREYIAKLMDIFYLHQPTVVCATHSPIVVSGAEVSEESLSIFKSQNNQLEKLPQNSNNLEQLLWEMFGIATPENRYLSNLITNTLNELAENQIDLAQAQRLFKLLENEVYDPKQKDVLASVRKLADKIEQRKV

SEQ ID NO: 84819 - protein, 207 aa, Pseudoalteromonas sp. P1-13-1a
MRPYVLTIDDHQSIITAIQEGGNIWSSGHLNEFKRNLKDFYRNEQKQQCCYCKRVTVGEFRMVLDIEHILPKGTPAYRRYMFEPKNLSIACKRCNMEIKKQDTSFISNTANFAPDFSDSNNYLFIHPHTDNYWDHIHYSMVVENDYMLIQYTVESPNGKGQYTYDYFKLNDLEVDAINNAQGIESQPISEEIDEDIALEIQQSLMAL

SEQ ID NO: 84820 - protein, 370 aa, Vibrio cholerae
MQNINIYVGENGAGKSRKLAEIAQEAISAGRAVIAIATSLNDKYPKRRADKPYYYMGPRLGRSLAKQAIKSSIAKLNDKNGLLRLNTLLSILEYTNLKPQIGLKVKGFDENFDDSIDSIEFENVREKELVTTLCYQIRQFYDESREEVQWISNYSRFEYGLSGEVLSDLIKHEKLLIHYKLLRSTELYIHNQELILPIEKMSSGQLSLISTTFFIAAHLEDNTIILIDEPENSLHPDWQRQYIGNLKNLFPYQDFECHIATHSPMLIAGAVDEKSVEVFRHDGNKFKQIISDTKNIEDAYLDQFGIVTPENNALSERCIDIINNVDFGVISKSEAFKKIEEYKRKSYDIKQQEFLDGVYVIIKELEVHSG

SEQ ID NO: 84821 - protein, 201 aa, Vibrio cholerae
MAKLTFTANEIKKMQAASAKGYNGWNDKKLDGIKRKIKDHKRIDTCDLCCYCQRDITAEFNMSLDIEHIIPKSARVKHMFTMKNLSVSCKKCNMKIKNEDLSFLVDDIVNLPSNIFKSRYYKFIHPNLDNVFRHLQRNCIQQGRVRLVKYHFPTNSDKGKYTYEYFKLKEFEMEKANQAQGRRKNKINNQKIEEAFRKLTQ

SEQ ID NO: 84822 - protein, 370 aa, Vibrio cholerae; identical to SEQ ID NO: 84820

SEQ ID NO: 84823 - protein, 201 aa, Vibrio cholerae; identical to SEQ ID NO: 84821

SEQ ID NO: 84824 - protein, 370 aa, Vibrio cholerae; identical to SEQ ID NO: 84820

SEQ ID NO: 84825 - protein, 201 aa, Vibrio cholerae; identical to SEQ ID NO: 84821

SEQ ID NO: 84826 - protein, 370 aa, Vibrio cholerae; identical to SEQ ID NO: 84820

SEQ ID NO: 84827 - protein, 201 aa, Vibrio cholerae; identical to SEQ ID NO: 84821

SEQ ID NO: 84828 - protein, 541 aa, Vibrio metoecus
MQLRYLAIPQFRNLRNLEVSFASELESVSSTPGNTPAKRIRSHALIGQNGTGKSNLIEALITLFRDVDLDREAAFDYTLEYEIRGHIVRIQADTAKQKRPYVWVDGKSESQGFLVKHAREYLPSHVFAYYSGKNERIETLFRTHQERYKQLLRQDDDDLMRRLFYCRGGHSQLVLLACLLSDDPVFKKLLSNLNIEAIESALFVLKKPYSARDLDEKDIELGDSRFWFRRGTVVNGFLDKLWQIAWAPVQETRLAAIDFRRRPEKQELLYLFVPDNKRLKKLGEEVGTPERFFRYAEAAYIGDLLEEVRITVKKSKGHGGDVEFKQLSEGELQMLTVLGLMRITREDHCLFLLDEPDTHLNPIWKLRYFDDIEGVLSSEKDSLVQGESQILITTHDPMMVGSLKREQVHILRKHGDRSVIESPDEHPQGMGVTGLLKSELFGLSSTLDIETERRLFRRNELFVKAERTPEEDAELSRLSTELADLGFSTADFRDPDYALFVRKMAQHRKFRKPVLTPEEQAEQDRIADEIISEILREEARE

SEQ ID NO: 84829 - protein, 285 aa, Vibrio metoecus
MIFIDLENKLPTDHDIPNWVPWTPEKWNAWLAKSNQLVGKLATLEAAGKRDERNALIDANSAHWGELKQWLLALSGGKCWFSDVRELYSHYDVEHFRPKKEAKAIDGSERDGYWWLAFDYMNFRACGNVGNRKKGGWFPLQQGSLCSTYAAPCEESEARYLLDPIDDDDVSLIAFDEEGKVVPVPSASDWEKQRVEETVKRLKLNEHVPLAEERRKVWQRVDALIKEFHKAKSRCSAGNNPAAKAKLIEVRARMREMTSPAAELSSVARWCLLLRNDPQLSRLVG

SEQ ID NO: 84830 - protein, 370 aa, Vibrio cholerae; identical to SEQ ID NO: 84820

SEQ ID NO: 84831 - protein, 201 aa, Vibrio cholerae; identical to SEQ ID NO: 84821

SEQ ID NO: 84832 - protein, 370 aa, Vibrio cholerae; identical to SEQ ID NO: 84820

SEQ ID NO: 84833 - protein, 201 aa, Vibrio cholerae; identical to SEQ ID NO: 84821

SEQ ID NO: 84834 - protein, 391 aa, Vibrio cholerae O16 str. 877-163
MKVKSIEINGIGGIENINIEFNDHMNFICGPNGIGKTTLLECVAHSFSVNSTNILKRNVSMESGSFKSTIDIEGTDQQSNVVIADFDPGKESYINGLHQHAPKLLSLKVSRTFQYQPLAAVSKDIDKNSNTSYQEAKSGVNINEVKNWFVNRYLYSAHEGALTEQQLNNLELAKRSFSLLNESFSFSKVLAASNEIMVNTPNGDIYYEYLSSGFKSCLSIIFGIIKDIEFRFKNPCINALDFDGVILIDELELHLHPEWQAKIAKILVQVFPKAQFITATHSPHILQGANPNEIIALASENGKVYRRNLDGGKYGYQGWTVEEILVDVMGMSDTRTDTYYQELNKFETAINKDDFLSAEAAFIELDNLLHPNNHMRKLLKLELASVKGCAE

SEQ ID NO: 84835 - protein, 247 aa, Vibrio cholerae O16 str. 877-163
MIKLTRVGKPAFLSDEKVLELTNKFKSTKLSVWNNDHIKEPLLKSSNGKCAYCECPLTSESNYMEVEHFEDKMHNEDKVVFWENLLPSCKKCNGSKGTHNVTQEPIINPYVDEPKDHLALRLYRFRGKTAKGTTTIEVVNLNHSSRLVLSRFEIGEKIDQLVDTAWERYSNFIEKRDTRSRNKLINIVEGLLEECQPESDYSASTATNLLSDSKFTELVSLMRAEEAWTEELEALINNALGLVLDCA

SEQ ID NO: 84836 - protein, 382 aa, Acidovorax sp. SD340
MSTTWGDLQWDYWRPSGGGKGKKPAETWGETALKEHLHAITASYKTDAPALTPVFAYYGASRGHIEVPERLRSAKHNYEHPTAALVDCFNPRSDFREMLAWFDQEESAELRKNKGVTSEDYTPLESLEALRATVVSLLGEAYRNPHFNARHKFMLERSSDGAELLVNQLSQGYQSMLALAMDFARRLAIANPHLEYGNQFASQQLLMQVVSVLEGQDPGIFEPFQHALAMSAPAIMLVDEIDLHLHPTWQQRVLGDLMRTFPLTQFIVTTHSPQVLTTVPRENIRVLDQDENGLMRVRTPDFSPLAHESGDALAKIMGTHREPPLPLQEEIRRYEQLVRVGQEQTEEGQTLRAALDAAGYQFHESDLTTWRFLAARKAGGAN

SEQ ID NO: 84837 - protein, 196 aa, Acidovorax sp. SD340
MVELQHRAIPTPALTAFVAAHPGAAVADFDSEAFAPVKRAVKADLNQDQDGLCVYCESPLEPTGGQVEHIKPKAGGNGHPHLCFAYTNYAHSCINPKTCGQRKGNGLLPIEPGPGCNTQWTLSTDGTIEPIVGLTRKQLHPVRQTRDMLGLNADSNLVDERQRWLRNALVVLQQAPGDIHTFLQSAPYRHMLATVV

SEQ ID NO: 84838 - protein, 533 aa, Pedobacter sp. PACM 27299
MKVKKLWISKYKNVEDIRLSFNTELTSLLVGKNGLGKSNLIEALTIIFSNLDLIENVDEIKLFSSRYFDFDVEYTCYDNLMRIRINDGHLSIGLKNKCMKDADPFERIEFNDFKKNRNNKYLPKYIIGYYSGENKRLKDINSQHENIQKNALRNWHRGKEKEQVDDLRKLFFTENHHGQLLLLTLAIYRYHEDFSVHIGKLFNEYLEIDHLIDFEIVFNNPDWKYNNIDGIDKSAEYLLANIGAKKPVHYPFWNLKGKIDLLLTTFYNYQIDHGSEPLIYPSEGVSKKYIKEYIEFSRIELEPFSNIVFENFKHPIDFFNALESTEVVGIFNRIGVNVKKVNLDFAIGFEQLSEGEQQLITVLGLLLITGKDDCLFLLDEPDTHLNPNWQRNYIRLLEEFNLNDDNSHVFVATHSPLLVQAVEGKYDILLYHLNENGKIQIDNDPNIIKNWRIDQVLASKYFDLVSTRPLVLDDLMKKRLDMIRSGIISEEDKFLLNKYKNEIGYLPTGETIEELESMIYIKKMADTLKNDKN

SEQ ID NO: 84839 - protein, 262 aa, Pedobacter sp. PACM 27299
MIKISKAGFEIPKVLVEDGLLLRDEYVLMYTNSPGGFHLDDDKIRTKFSFCSKIYGHEDVKDLLKHVQNDKCCFCEAKISHIAYGDVEHFRPKAAYKNGENSDYVYPGYYWLCYDWGNLYFSCQICNQRFKGNYFPISDSGIRACSIVRDISFEDPLFLDPGGTDDPEHHIYFDGAIPGSNTVKGKTTIKYLGLDREELNEDRLTSLERLRCLERIVWLTADSMNAVVARRAFLDQLETCVSNWSEYSSMFKSNFSKYLKEI

SEQ ID NO: 84840 - protein, 393 aa, Escherichia coli; identical to SEQ ID NO: 84458

SEQ ID NO: 84841 - protein, 248 aa, Escherichia coli; identical to SEQ ID NO: 84459

SEQ ID NO: 84842 - protein, 418 aa, Lachnospiraceae bacterium TF01-11
MRLKQIKLTNFRAIDDAIIEFDGKSTVIFGINGTGKSSILRSVNLLFANIINQVVNRKELKQNYAIQLEDIMYGKSGTSIHATIEFEGTEFEYSKNMVRSSGRKTHNKKALNEIVEIFHEKYISDEKQNDIPIFANYGTNRLVLDIPLRIRTHHTFDIYSAFEKAIENKIDFRTFFEWYRNQEDYENEQKVETGDLERKDKALQAVRKAILSMLDGCSNLRVVRKPRLEMKINKANISLNVSQMSDGEKCTLALFGDLARRLTLANPNKENPLLGEGIVLIDEVELHMHPSWQRKVLSVLRDTFPNIQFIITTHSPIVLSEADENYNLFFIDNSDGKINIQKNKQLNGYDANAVLEQFMDTSSINEKIKSFIDSIYDDINSRLFEQAEVKINALAEITSENHPDVITARMELKRRRYI

SEQ ID NO: 84843 - protein, 189 aa, Lachnospiraceae bacterium TF01-11
MIYIEKSEEPEFLSEFKRKNPDKTYDSEEFAHYRGILTDVLIKEQKGICAYCCGRIKKENVHNEHIEPRNPGKYVSKRSLDYSNLVASCNTIRTCGRKKENKYDSDKFVSPLEQECEKKFIYYGNGTIVGDEYTINLLNLNDYELREARRAVYQQLQHLDKETIKLVYMNEQDEEYQPYYNVIKWYVNG

SEQ ID NO: 84844 - protein, 421 aa, Lachnospiraceae bacterium TF01-11
MNLSNVKIKNFRNIEELDIKFKPGFNLIKGKNGKGKTSVLEAIAVGLGGFIGGIADVSTRHFNIDEVRTEYLKIGDGSYSKKYHVPTEVTIEAQLYGEKYQWTRGKSSIKASRSTTQPRDICRKAEEMAEDDNVELPILAYIGAGRVWNQMRQKWENPFRKHYFRTVGYTDALIEASNEKLLMSWCVKMEQISWQKEKKIAEYEAVKAAVAKFMDFMEEKEGHIVFYDKQEEQMMYKSDELIQPIEHLSAGYQSLIWTVFDIAYRMAVLNPSKLDKIAETAGVVLIDEIDMHLHPRWQWNVVGALISTFPNVQFIAATHAPILFASHKNIWIIDVDEEEVRYSESHYGMDVNTSMQYYQNTREIPEKVRQKVELFNEKMDDEKYEEAEVILKQLEIETAPAHPLLVELRTRFEFESTDWEK

SEQ ID NO: 84845 - protein, 216 aa, Lachnospiraceae bacterium TF01-11
MIYIKKGKEPASLTKYKKQKFAYYDGYKEKDDLRKMLLKEQGYLCAYCMRRIDIEHMKIEHWFPENELSDIERLDYRNMLGSCEGHIDGTNGKKDDTCDSHKSGDKITVNPLDRSTLCSIKYNSDGEIYSDNEIIEKDIDVVLNLNSEKHLLKLNRKSMLKQVREELCKMQKRGIWGRSVLEKVKNKYINADENGYKKEYAGVAIWYIDKKLNSTT

SEQ ID NO: 84846 - protein, 427 aa, Acinetobacter baumannii; identical to SEQ ID NO: 81756

SEQ ID NO: 84847 - protein, 222 aa, Acinetobacter baumannii; identical to SEQ ID NO: 81757

SEQ ID NO: 84848 - protein, 514 aa, Acinetobacter baumannii; identical to SEQ ID NO: 82756

SEQ ID NO: 84849 - protein, 213 aa, Acinetobacter baumannii; identical to SEQ ID NO: 82749

SEQ ID NO: 84850 - protein, 454 aa, Acinetobacter baumannii; identical to SEQ ID NO: 82758

SEQ ID NO: 84851 - protein, 213 aa, Acinetobacter baumannii; identical to SEQ ID NO: 82749

SEQ ID NO: 84852 - protein, 435 aa, Acinetobacter baumannii
LTIIIGNNGVGKTSILNAIRKHIMWIAASIRKDNASGGTISPDEINNKSSDNNNGAYIDCAFNIGSKNTVRGRIARVKDTSTIPLKSELTNYREIGQKIRDLNEYRDTNFPLFAFYGIDRLSSKKNLSSDLVFNKVDGYEESLNKVSNFNIFLEWLIQILKMSEGILSEQQEYLLHDLKALELGGANNSSSPLHPMYLKLKKSFEDQTSQQFNHNTNKLLEIINSVYRQIYQDFIRLELVNNDDGKDKVRMVLKDDSLFLHQLSDGQRVFLGMIGDIARRLILLNDSSDNPLMGQGIIIIDEVELHLHPKWQQKIIGVLRKCFPNIQFIVSTHSPQILGEVESKHLRILTLQDTREIKVTIPEQSYGLTSSEIVEELMGGNGRNQDIKKKIDHIFKLIDQENLVEAENKIEELQSELNGEIPELIEAKSLILMMK

SEQ ID NO: 84853 - protein, 213 aa, Acinetobacter baumannii; identical to SEQ ID NO: 82749

SEQ ID NO: 84854 - protein, 514 aa, Acinetobacter baumannii; identical to SEQ ID NO: 82756

SEQ ID NO: 84855 - protein, 213 aa, Acinetobacter baumannii; identical to SEQ ID NO: 82749

SEQ ID NO: 84856 - protein, 507 aa, Acinetobacter baumannii; identical to SEQ ID NO: 82026

SEQ ID NO: 84857 - protein, 223 aa, Acinetobacter baumannii; identical to SEQ ID NO: 81791

SEQ ID NO: 84858 - protein, 434 aa, Acinetobacter baumannii
TIIIGNNGVGKTSILNAIRKHIMWIAASIRKDNASGGTISPDEINNKSSDNNNGAYIDCAFNIGSKNTVRGRIARVKDTSTIPLKSELTNYREIGQKIRDLNEYRDTNFPLFAFYGIDRLSSKKNLSSDLVFNKVDGYEESLNKVSNFNIFLEWLIQILKMSEGILSEQQEYLLHDLKALELGGANNSSSPLHPMYLKLKKSFEDQTSQQFNHNTNKLLEIINSVYRQIYQDFIRLELVNNDDGKDKVRMVLKDDSLFLHQLSDGQRVFLGMIGDIARRLILLNDSSDNPLMGQGIIIIDEVELHLHPKWQQKIIGVLRKCFPNIQFIVSTHSPQILGEVESKHLRILTLQDTREIKVTIPEQSYGLTSSEIVEELMGGNGRNQDIKKKIDHIFKLIDQENLVEAENKIEELQSELNGEIPELIEAKSLILMMK

SEQ ID NO: 84859 - protein, 151 aa, Acinetobacter baumannii
MLNITRLHEPSSLTIYRYQPDAKYDGPLFTTVKSDIREALVISQGYLCAYCMQRIYNDRSTTKIEHWQCQDTYSQRQLDFTNMFAVCLGTTQDQLHCDSSKGNKQITIDPASRSQLVESYIRYTNSGEIYVQNNELLNKELNIILNLNHSR

SEQ ID NO: 84860 - protein, 427 aa, Acinetobacter baumannii; identical to SEQ ID NO: 81756

SEQ ID NO: 84861 - protein, 222 aa, Acinetobacter baumannii; identical to SEQ ID NO: 81757

SEQ ID NO: 84862 - protein, 521 aa, Acinetobacter baumannii
MRIFNAKLNNKNFNFLKEKDLIDNNNKYTIILGENGTGKSELLRQIINNLLRIKILNISPEHNELGKFSYRDLLDSYLSNKYKSNLVEKSISTSLNLYLHDDADIYLSYEKSNSQRKIKNFKGEEISISDGQFRHKTRLDSHGFILLDTILAINIIAISESIHIKFPIIQDDSSLSYYYPGYLKESDSDYFFSNINTNKNINQKEKSIILSILLASLRSENIDLKSIFDLLKFDFKIKIDVNSQTDIDVKLKRLHDFRFNSIGIEKISNFNDINEAVNWYSNTKSNINEDIFKKNIQENYTFFLDLLKDNESINYLYHLISYNLIDVSNIYFYKSSEDLIEIPIQDMSSGQLCLISSFSSIAAHIRNGSLIFIDEPEISLHPLWASQYIELLQNKFSSFQRCHFLIATHSPHIVSNLPDDNAYVITIKNDGTSKCIESNVFNFKSVDFQLAEIFDFPGNRNEYLIRVIMVILTKISENESLNVDDLKTIDHLKQFIPKLKPNDPVKHLINQISVLTSNEQS

SEQ ID NO: 84863 - protein, 214 aa, Acinetobacter baumannii; identical to SEQ ID NO: 81675

SEQ ID NO: 84864 - protein, 440 aa, Acinetobacter baumannii
NFDKELTIIIGNNGVGKTSILNAIRKHIMWIAASIRKDNASGGTISPDEINNKSSDNNNGAYIDCAFNIGSKNTVRGRIARVKDTSTIPLKSELTNYREIGQKIRDLNEYRDTNFPLFAFYGIDRLSSKKNLSSDLVFNKVDGYEESLNKVSNFNIFLEWLIQILKMSEGILSEQQEYLLHDLKALELGGANNSSSPLHPMYLKLKKSFEDQTSQQFNHNTNKLLEIINSVYRQIYQDFIRLELVNNDDGKDKVRMVLKDDSLFLHQLSDGQRVFLGMIGDIARRLILLNDSSDNPLMGQGIIIIDEVELHLHPKWQQKIIGVLRKCFPNIQFIVSTHSPQILGEVESKHLRILTLQDTREIKVTIPEQSYGLTSSEIVEELMGGNGRNQDIKKKIDHIFKLIDQENLVEAENKIEELQSELNGEIPELIEAKSLILMMK

SEQ ID NO: 84865 - protein, 213 aa, Acinetobacter baumannii; identical to SEQ ID NO: 82749

SEQ ID NO: 84866 - protein, 435 aa, Acinetobacter baumannii; identical to SEQ ID NO: 84852

SEQ ID NO: 84867 - protein, 213 aa, Acinetobacter baumannii; identical to SEQ ID NO: 82749

SEQ ID NO: 84868 - protein, 514 aa, Acinetobacter baumannii; identical to SEQ ID NO: 82756

SEQ ID NO: 84869 - protein, 213 aa, Acinetobacter baumannii; identical to SEQ ID NO: 82749

SEQ ID NO: 84870 - protein, 435 aa, Acinetobacter baumannii
TAIIIGNNGVGKTSILNAIRKHIMWIAASIRKDNASGGTISPDEINNKSSDNNNGAYIDCAFNIGSKNTVRGRIARVKDTSTIPLKSELTNYREIGQKIRDLNEYRDTNFPLFAFYGIDRLSSKKNLSSDLVFNKVDGYEESLNKVSNFNIFLEWLIQILKMSEGILSEQQEYLLHDLKALELGGANNSSSPLHPMYLKLKKSFEDQTSQQFNHNTNKLLEIINSVYRQIYQDFIRLELVNNDDGKDKVRMVLKDDSLFLHQLSDGQRVFLGMIGDIARRLILLNDSSDNPLMGQGIIIIDEVELHLHPKWQQKIIGVLRKCFPNIQFIVSTHSPQILGEVESKHLRILTLQDTREIKVTIPEQSYGLTSSEIVEELMGGNGRNQDIKKKIDHIFKLIDQENLVEAENKIEELQSELNGEIPELIEAKSLILMMK

SEQ ID NO: 84871 - protein, 213 aa, Acinetobacter baumannii; identical to SEQ ID NO: 82749

SEQ ID NO: 84872 - protein, 514 aa, Acinetobacter baumannii; identical to SEQ ID NO: 82756

SEQ ID NO: 84873 - protein, 213 aa, Acinetobacter baumannii; identical to SEQ ID NO: 82749

SEQ ID NO: 84874 - protein, 514 aa, Acinetobacter baumannii; identical to SEQ ID NO: 82756

SEQ ID NO: 84875 - protein, 213 aa, Acinetobacter baumannii; identical to SEQ ID NO: 82749

SEQ ID NO: 84876 - protein, 442 aa, Acinetobacter baumannii
KINFDKELTIIIGNNGVGKTSILNAIRKHIMWIAASIRKDNASGGTISPDEINNKSSDNNNGAYIDCAFNIGSKNTVRGRIARVKDTSTIPLKSELTNYREIGQKIRDLNEYRDTNFPLFAFYGIDRLSSKKNLSSDLVFNKVDGYEESLNKVSNFNIFLEWLIQILKMSEGILSEQQEYLLHDLKALELGGANNSSSPLHPMYLKLKKSFEDQTSQQFNHNTNKLLEIINSVYRQIYQDFIRLELVNNDDGKDKVRMVLKDDSLFLHQLSDGQRVFLGMIGDIARRLILLNDSSDNPLMGQGIIIIDEVELHLHPKWQQKIIGVLRKCFPNIQFIVSTHSPQILGEVESKHLRILTLQDTREIKVTIPEQSYGLTSSEIVEELMGGNGRNQDIKKKIDHIFKLIDQENLVEAENKIEELQSELNGEIPELIEAKSLILMMK

SEQ ID NO: 84877 - protein, 213 aa, Acinetobacter baumannii; identical to SEQ ID NO: 82749

SEQ ID NO: 84878 - protein, 454 aa, Acinetobacter baumannii; identical to SEQ ID NO: 82758

SEQ ID NO: 84879 - protein, 213 aa, Acinetobacter baumannii; identical to SEQ ID NO: 82749

SEQ ID NO: 84880 - protein, 514 aa, Acinetobacter baumannii; identical to SEQ ID NO: 82756

SEQ ID NO: 84881 - protein, 213 aa, Acinetobacter baumannii; identical to SEQ ID NO: 82749

SEQ ID NO: 84882 - protein, 447 aa, Acinetobacter baumannii
IITNLKINFDKELTIIIGNNGVGKTSILNAIRKHIMWIAASIRKDNASGGTISPDEINNKSSDNNNGAYIDCAFNIGSKNTVRGRIARVKDTSTIPLKSELTNYREIGQKIRDLNEYRDTNFPLFAFYGIDRLSSKKNLSSDLVFNKVDGYEESLNKVSNFNIFLEWLIQILKMSEGILSEQQEYLLHDLKALELGGANNSSSPLHPMYLKLKKSFEDQTSQQFNHNTNKLLEIINSVYRQIYQDFIRLELVNNDDGKDKVRMVLKDDSLFLHQLSDGQRVFLGMIGDIARRLILLNDSSDNPLMGQGIIIIDEVELHLHPKWQQKIIGVLRKCFPNIQFIVSTHSPQILGEVESKHLRILTLQDTREIKVTIPEQSYGLTSSEIVEELMGGNGRNQDIKKKIDHIFKLIDQENLVEAENKIEELQSELNGEIPELIEAKSLILMMK

SEQ ID NO: 84883 - protein, 213 aa, Acinetobacter baumannii; identical to SEQ ID NO: 82749

SEQ ID NO: 84884 - protein, 446 aa, Acinetobacter baumannii
ITNLKINFDKELTIIIGNNGVGKTSILNAIRKHIMWIAASIRKDNASGGTISPDEINNKSSDNNNGAYIDCAFNIGSKNTVRGRIARVKDTSTIPLKSELTNYREIGQKIRDLNEYRDTNFPLFAFYGIDRLSSKKNLSSDLVFNKVDGYEESLNKVSNFNIFLEWLIQILKMSEGILSEQQEYLLHDLKALELGGANNSSSPLHPMYLKLKKSFEDQTSQQFNHNTNKLLEIINSVYRQIYQDFIRLELVNNDDGKDKVRMVLKDDSLFLHQLSDGQRVFLGMIGDIARRLILLNDSSDNPLMGQGIIIIDEVELHLHPKWQQKIIGVLRKCFPNIQFIVSTHSPQILGEVESKHLRILTLQDTREIKVTIPEQSYGLTSSEIVEELMGGNGRNQDIKKKIDHIFKLIDQENLVEAENKIEELQSELNGEIPELIEAKSLILMMK

SEQ ID NO: 84885 - protein, 213 aa, Acinetobacter baumannii; identical to SEQ ID NO: 82749

SEQ ID NO: 84886 - protein, 411 aa, Acinetobacter baumannii
MDIDFHPNVTIITGANGSGKSTILKLLSKHFGWYQPFLGTPILSKEQGVFYYKTVFRPLNKEYQTSHYGHNIHILGNIFYSNDASSDIFIHEQIYSDAQFDLQFGGNIPVVKGVHISSHRPIPKYERLQNIPTNPMDASQAFNSYFQETVNLFNNNYTQHTPIYRMKEAIVSMAAFGPGNQFVQKNEKIEKQFSDFKDILKQILPADLGFKDLSVRIPDLVLETETGDFLLDASSGGIMSIIDLAWQIFLYSHDKDEFVVTIDEPENHLHPSMQRSLLNDFVKAFPKAQFIVVTHSPFIVSSIRESNVYALKHEKNNVSDQQSGWAKKVVSYKLDLNQKAATASEILRDVLGVPVTLPKWADDELQKICSTFTVQDITTDGLSRLRAELNNAGLGEFYPEALSNIVGESGL

SEQ ID NO: 84887 - protein, 222 aa, Acinetobacter baumannii; identical to SEQ ID NO: 81757

SEQ ID NO: 84888 - protein, 461 aa, Acinetobacter baumannii
KDLFLSNMEISNYKIITNLKINFDKELTIIIGNNGVGKTSILNAIRKHIMWIAASIRKDNASGGTISPDEINNKSSDNNNGAYIDCAFNIGSKNTVRGRIARVKDTSTIPLKSELTNYREIGQKIRDLNEYRDTNFPLFAFYGIDRLSSKKNLSSDLVFNKVDGYEESLNKVSNFNIFLEWLIQILKMSEGILSEQQEYLLHDLKALELGGANNSSSPLHPMYLKLKKSFEDQTSQQFNHNTNKLLEIINSVYRQIYQDFIRLELVNNDDGKDKVRMVLKDDSLFLHQLSDGQRVFLGMIGDIARRLILLNDSSDNPLMGQGIIIIDEVELHLHPKWQQKIIGVLRKCFPNIQFIVSTHSPQILGEVESKHLRILTLQDTREIKVTIPEQSYGLTSSEIVEELMGGNGRNQDIKKKIDHIFKLIDQENLVEAENKIEELQSELNGEIPELIEAKSLILMMK

SEQ ID NO: 84889 - protein, 213 aa, Acinetobacter baumannii; identical to SEQ ID NO: 82749

SEQ ID NO: 84890 - protein, 433 aa, Acinetobacter baumannii
IIIGNNGVGKTSILNAIRKHIMWIAASIRKDNASGGTISPDEINNKSSDNNNGAYIDCAFNIGSKNTVRGRIARVKDTSTIPLKSELTNYREIGQKIRDLNEYRDTNFPLFAFYGIDRLSSKKNLSSDLVFNKVDGYEESLNKVSNFNIFLEWLIQILKMSEGILSEQQEYLLHDLKALELGGANNSSSPLHPMYLKLKKSFEDQTSQQFNHNTNKLLEIINSVYRQIYQDFIRLELVNNDDGKDKVRMVLKDDSLFLHQLSDGQRVFLGMIGDIARRLILLNDSSDNPLMGQGIIIIDEVELHLHPKWQQKIIGVLRKCFPNIQFIVSTHSPQILGEVESKHLRILTLQDTREIKVTIPEQSYGLTSSEIVEELMGGNGRNQDIKKKIDHIFKLIDQENLVEAENKIEELQSELNGEIPELIEAKSLILMMK

SEQ ID NO: 84891 - protein, 213 aa, Acinetobacter baumannii; identical to SEQ ID NO: 82749

SEQ ID NO: 84892 - protein, 178 aa, Acinetobacter baumannii
MSLRRASSGEQCMLALMLGIAGHITNDSLIFIDEPEISLHPKWQEEFMPLLIKIFSNYSNCHFLIATHSPQIISQLEDDNCFITSLTENIIYHAKDFRNMSSDFQLAELFGAPGTKNEYITRLAFSLLSKLKSNKKVNNQLAEDLFKLRSFMNILPADDPTKELIQTVNEVYEFYASH

SEQ ID NO: 84893 - protein, 220 aa, Acinetobacter baumannii
MNFMPLINEPYIFDPELKKKLKSKVTDPNFNHENWGDEEFSDLRSLIRAHYRTKQGALCAYCKARISLVSASNAHIEHIVPKAIHLEYIFEPKNLCVICADCNTIKRNQETINDIKNPLVNIISRYPRSSNAFKIIHPHFDDYDLHIAIKGKIYIDLTPKGNFTIGACKLNRYFQKFGIDQDFIDDSVLIEIFQKFMDSDNTAEKAYLINELKTILICNF

SEQ ID NO: 84894 - protein, 429 aa, Acinetobacter baumannii
MKLNSIKISEWQQFLKVEIDFHKNVTILTGANGSGKTTILKFISNHYGWSNIILATPILEKQQGAYVYKSNFKPIKNETGEKITYDDDAILGEITYSNNRTGYILLPSQQQNNQGPIQFFNIFNRQNIDGLHVNSHRPPPKYSKMESIPVDPMNAEQAFNIYDIQNKRIYLSEYTDKTPLLKMKEALISMAAFGQGNNFIENNKNIESLFINFNNILKQVLPEDLGFQDIIIRIPNVLLKTETGEFLLDACSGGILSIIEMAWQIFLYSQDKNEFVVTLDEPENHLHPSMQRTLLNDFTAAFPNAQFIVATHSPFIVSSVKDSNVYALKYSDLGNESSLESGKRKVKAYKLDLTQKAATAQDILHEVLGVPVTLPKWADAELQRICSQFGSTDITTEGLERLKQQLKIAGLEEFYPDAIKSIVENTFND

SEQ ID NO: 84895 - protein, 214 aa, Acinetobacter baumannii
MIKLTKLPEPPILKNNAEKWTAQHLKNISEGKESTNYLKTRYSHKDIKEVILRETSEKCAYCESKFRHVHHGDIEHISPKTLDESKRFEWENLTLACEICNQNKSTTPIELMVDPYKMDPSEHLHFAGTIILEKTDNGYFAKQILDLNRSELLENRKVRLETVCSALRSLFNRDIPLDKRQILLDALKKQQCSKSSEYSAMFIEYIKSIEAAME

SEQ ID NO: 84896 - protein, 442 aa, Acinetobacter baumannii; identical to SEQ ID NO: 84876

SEQ ID NO: 84897 - protein, 151 aa, Acinetobacter baumannii; identical to SEQ ID NO: 84859

SEQ ID NO: 84898 - protein, 437 aa, Acinetobacter baumannii
KELTIIIGNNGVGKTSILNAIRKHIMWIAASIRKDNASGGTISPDEINNKSSDNNNGAYIDCAFNIGSKNTVRGRIARVKDTSTIPLKSELTNYREIGQKIRDLNEYRDTNFPLFAFYGIDRLSSKKNLSSDLVFNKVDGYEESLNKVSNFNIFLEWLIQILKMSEGILSEQQEYLLHDLKALELGGANNSSSPLHPMYLKLKKSFEDQTSQQFNHNTNKLLEIINSVYRQIYQDFIRLELVNNDDGKDKVRMVLKDDSLFLHQLSDGQRVFLGMIGDIARRLILLNDSSDNPLMGQGIIIIDEVELHLHPKWQQKIIGVLRKCFPNIQFIVSTHSPQILGEVESKHLRILTLQDTREIKVTIPEQSYGLTSSEIVEELMGGNGRNQDIKKKIDHIFKLIDQENLVEAENKIEELQSELNGEIPELIEAKSLILMMK

SEQ ID NO: 84899 - protein, 213 aa, Acinetobacter baumannii; identical to SEQ ID NO: 82749

SEQ ID NO: 84900 - protein, 457 aa, Acinetobacter baumannii
LSNMEISNYKIITNLKINFDKELTIIIGNNGVGKTSILNAIRKHIMWIAASIRKDNASGGTISPDEINNKSSDNNNGAYIDCAFNIGSKNTVRGRIARVKDTSTIPLKSELTNYREIGQKIRDLNEYRDTNFPLFAFYGIDRLSSKKNLSSDLVFNKVDGYEESLNKVSNFNIFLEWLIQILKMSEGILSEQQEYLLHDLKALELGGANNSSSPLHPMYLKLKKSFEDQTSQQFNHNTNKLLEIINSVYRQIYQDFIRLELVNNDDGKDKVRMVLKDDSLFLHQLSDGQRVFLGMIGDIARRLILLNDSSDNPLMGQGIIIIDEVELHLHPKWQQKIIGVLRKCFPNIQFIVSTHSPQILGEVESKHLRILTLQDTREIKVTIPEQSYGLTSSEIVEELMGGNGRNQDIKKKIDHIFKLIDQENLVEAENKIEELQSELNGEIPELIEAKSLILMMK

SEQ ID NO: 84901 - protein, 213 aa, Acinetobacter baumannii; identical to SEQ ID NO: 82749

SEQ ID NO: 84902 - protein, 451 aa, Acinetobacter baumannii
SNYKIITNLKINFDKELTIIIGNNGVGKTSILNAIRKHIMWIAASIRKDNASGGTISPDEINNKSSDNNNGAYIDCAFNIGSKNTVRGRIARVKDTSTIPLKSELTNYREIGQKIRDLNEYRDTNFPLFAFYGIDRLSSKKNLSSDLVFNKVDGYEESLNKVSNFNIFLEWLIQILKMSEGILSEQQEYLLHDLKALELGGANNSSSPLHPMYLKLKKSFEDQTSQQFNHNTNKLLEIINSVYRQIYQDFIRLELVNNDDGKDKVRMVLKDDSLFLHQLSDGQRVFLGMIGDIARRLILLNDSSDNPLMGQGIIIIDEVELHLHPKWQQKIIGVLRKCFPNIQFIVSTHSPQILGEVESKHLRILTLQDTREIKVTIPEQSYGLTSSEIVEELMGGNGRNQDIKKKIDHIFKLIDQENLVEAENKIEELQSELNGEIPELIEAKSLILMMK

SEQ ID NO: 84903 - protein, 213 aa, Acinetobacter baumannii; identical to SEQ ID NO: 82749

SEQ ID NO: 84904 - protein, 449 aa, Acinetobacter baumannii
YKIITNLKINFDKELTIIIGNNGVGKTSILNAIRKHIMWIAASIRKDNASGGTISPDEINNKSSDNNNGAYIDCAFNIGSKNTVRGRIARVKDTSTIPLKSELTNYREIGQKIRDLNEYRDTNFPLFAFYGIDRLSSKKNLSSDLVFNKVDGYEESLNKVSNFNIFLEWLIQILKMSEGILSEQQEYLLHDLKALELGGANNSSSPLHPMYLKLKKSFEDQTSQQFNHNTNKLLEIINSVYRQIYQDFIRLELVNNDDGKDKVRMVLKDDSLFLHQLSDGQRVFLGMIGDIARRLILLNDSSDNPLMGQGIIIIDEVELHLHPKWQQKIIGVLRKCFPNIQFIVSTHSPQILGEVESKHLRILTLQDTREIKVTIPEQSYGLTSSEIVEELMGGNGRNQDIKKKIDHIFKLIDQENLVEAENKIEELQSELNGEIPELIEAKSLILMMK

SEQ ID NO: 84905 - protein, 213 aa, Acinetobacter baumannii; identical to SEQ ID NO: 82749

SEQ ID NO: 84906 - protein, 438 aa, Serratia marcescens; identical to SEQ ID NO: 83288

SEQ ID NO: 84907 - protein, 245 aa, Serratia marcescens
MRPVRKGVSPNDNIDFDDYKKAFPHLVGRIGSYCSYCERRIATNLAVEHIQPKDGQYGHPGLTGRWSNFLLACVNCNSTKGAKEVILANLLLPDWDNTFFAYVYSADGKVAPATQLSPEQQVMAQKTLSLTGLDKKISQILDENGKAVALDRESQRMQVWGQAQTALADVNSAPDNERLKHWIIEAAKATGFFSIWVTVFAGNPDMCLRFIAAFEGTAESGCFDAAGIPVVPSQNPDGWQSGAKA

SEQ ID NO: 84908 - protein, 376 aa, Vibrio furnissii
MIHIYVGENGSGKSKKLGEIATNLIAKGETVIAISTAPNDKFPRRTPHKPYHYMGSRLGRFVAREAIKSAISYSYGHEDKLFSSIFNILNYAGFSQKFGLTINGLRENIESELMNHLLDSDSESGVYENYDVISNSFRYIRSTLKPDHTFWVDQETPLSKTSGGEALVNLVKHEKLCKKIKLFRSIDIVVQKKDIVFPLIQASSGELSLISTAVFIASNLHDSNARYNILIDEPENSLHPEWQQKYITNLQNLFPYYKTNFYIATHSPLLVAGGLTEKNVSVYRASQDQFIEAPAQVKNIEDALIDQFGIVTPESNALSERCIELIHKVEIGQLTKEDATESLDSFYQQSYDTKQREFLIGVRNIILELEMVNAKD

SEQ ID NO: 84909 - protein, 199 aa, Vibrio furnissii
MPKISFTNAEISLMKSATQLGHTEWSNKNLAAIKAKIKHQKKQQTLQLCCYCQRDINSEFNFVLDIEHIIPKSSRLRHMFTMKNLSVSCKRCNMSIKGAKTDFLSIPIASLPRRAFKSRYYRFIHPNLDFPFKHLVRTHLQQGPIRLIKYHRYSDKGEYTYSYFRLHEFEVESANLAQGRRKVRKVSAESLSKFAKLQQ

SEQ ID NO: 84910 - protein, 410 aa, Vibrio furnissii
MNRYVEKIYGVVPNTNKEIDIKLNGRNLIITGGNGSGKTCLLREFDRKTDLLIAQKKMADRKTIEKNIKHYEESLKTRQKGTSQYQRDQKNRDNYQKQIDDIDSGLNIAFTDYLSFSSNLDDRKAVLCLFEAQRKSEISSANTAKGLETEKAQIRKNDKNQRLGNNLEQHLVNLRNRRSLAITEDKNHSLADKIDHWFTEFEEDLRQLLEDNTAKLKFNSDTLKFTISQGSKPEYTFQSLSSGYQAIFDIYADLLMRTEYFDITPKELTGIAFIDEIDAHLHVSLQRLIFPFFTKSFPNIQFIVTTHSPFVLMSAKDTIIFDLTKNEQIDEDISLYSHTAVIQGLLGTKTTSARLEEYVNEIATIVNTDNINYERLEVLVRKLRSVENTLDSQSKAFYLMGENALLDKEQ

SEQ ID NO: 84911 - protein, 218 aa, Vibrio furnissii
MFKVERTGDAPICLASNEYNTPEVVERLYDIFHGKCYLCEQADLDAPEVEHFEPHMGDDTLKYDWENLYYSCARCNSIKGTRHRNLIDCCSSEINVVRAIKRKPPTMPDSNMEITAVIEDPRVHNTVELLDRCFNEDNTALRGITRANLSENLFKHYTKLLSHRLVIVNRESTDRDIQDAVERIEIMLRDTYEFSAFWRWCVMEDRQLREKLEHALHF

SEQ ID NO: 84912 - protein, 372 aa, Vibrio furnissii
MLLGNIPPGKVAIIIGENGSGKSTRLNHLSKEYLSQGREVIAIANSIHDKFRSRSKRFNLLGHRSGRKVSLKTIKRAFLNISNEDLLKTRRIGQILDYVGYDSEIGFRFEFIKDIRKYELEEYEFSNNDEKYEISTLLNKLYYNELSGIHWVNLDNFSFDKINSSTVTRLLRFEKTLKKLGAINEVDILLKKNGHAIDLMDASSGELSFITSLMFISTTITKCPVILIDEPENSLHPKWQREYITKIMDIFYYHEPTIICATHSPIIVSGAESSEDSSLHVYKSDSEGIERLTIESGNLEQMLWEFFGVATPENRFFSQLVMSKLNALAENRISIIEVERFLGELKDAVYDGKQKNILTTALHLANKIESRK

SEQ ID NO: 84913 - protein, 207 aa, Vibrio furnissii
MQPYVLTREDVNNIGAAIKEGGNIWSSEHIADFKQNLKSHYRTAQNEQCSYCKRVIRGEFKMVLDIEHILPKGERAFKKFMFDPKNLCVSCKRCNMEIKGSDTSFIVDGTSFEDEFYASDKYLFLHPHSDNYWDSINYSVAIENDIQLIQYTVVNDCPKGLYTYNYFKLEQLEIDIVDEAQGVETESISPAIDEDLALEIQELFQDP

SEQ ID NO: 84914 - protein, 542 aa, Escherichia coli
MEQNLPSRITKLIKKSESGDFASSYQLYKVFGSKEYGVEPDEKMSDYFKELSAKQLEGGQLRVADIHLENYKGFESLIMDFSMKKNSTILVGNNGCGKSTILDAIQKGLTHLSSRLSTRSHNGDGIEKHELRKGQNYASIAINYDYMGIRFPMIIATTEPGYEDRVKSNYSGINELGSIFKTAHSINPNVSFPLIAMYTVERANDVSTRDIENSEEIKEAQIWDKFKAYNKSLTGKADFKLFFRWFKELIEIENSDNADITALRAEIRAKEKDLDNPLLKALLAENKNSETTKKLLEDHQNSLKVLKEKLNSYYSVNSKTLHTVEDAMYSFLPGFSNLKLQRAPLDLIVDKNNVSLSVLQLSQGEKTILALIADIARRLTLLNPNSVNPLDGTGIVLIDEIDLHLHPSWQQNIIPRLEKTFKNIQFIVTTHSPQVCHTIDSQNIWLLKNGQKFKAPKGVRGAISSWVLENLFEVAQRPPEDKYTKLLQEYKNLVFSEKYASEDARKLGATLSQHFGPDDETLVELKLEIEKRIWEDDFEKDQ

SEQ ID NO: 84915 - protein, 260 aa, Escherichia coli
MILKRINKTAEDQFLINFKAQNPNGTWDEFRNHEQGILYKRLKQHICNDQMYLCAYCEIDLDRENEHEIKVEHFKSKSGSLPGGSNWHLEWSNLLAVCLGGTNTGDDFELPANLSCDSYKSHYEDKNKINDKDWTGKILLPLTLPDAHNFFTFEKVTGKLLPNESYCNTISIDGKPAAETLSIVTKTIEVLNLNCSRLNNARRKLLFHFNNCARERNLRKLHNLLLQWNQGEPKFFQTTRDIIIRDDRICQGLLNGTIRY

SEQ ID NO: 84916 - protein, 434 aa, Chryseobacterium aquaticum
MIIRKIDLINFRNFENSTFHFSTQFTVVIGENGKGKSSILQGLRVAAGTFLMGIDEAERYHIQKEDVRRIDLENRFVPQRGCSVKAYGTINDENIEWKRSKTASRTDYRNAYDLINIAEVLNHQVNVELNENIDLPVINFFSTSRLWVEPKQTVKLKKKGSKLRDGYARCIDSRTDKTSPMEWIKSAYWKRLKGKTESVLLDAVFEAIDTCIPNWSPQEWDEDSDDLGGILKDEDGKESFIPLFYLSDGLRTMAAMVAEIAYRCVVLNSHYGRDAVKKSKGIVLIDEIDMHLHPKWQQGVVNDLKTAFPNIQFIATTYSPFIVQSLKVEELINLDAVVEEDPDKMSIEEVTSHIMKVEPRSLDFQKTFDKTTYYLELLNDITFGDNFGTKREKSGELDKIEKEAEINDPAAAAFLRMTRLATLGPDRKSKKEEE

SEQ ID NO: 84917 - protein, 233 aa, Chryseobacterium aquaticum
MRPVERGPVPLEADGSNKVFTSYGNARRDLIDRMGQYCAYCNQKLPSSLAVEHVQPKSLNPTLELEWSNFLLGCTNCNSTKGAQPVNLPDYLWPDVHNTHMAFSYTPDGKIDVNPALSDALKVKAQKMLDLVGLQNYPDNATASDRRWLNRKEAFVKANLALLLYQSASAKGAAEECEKLLGFWACDNGFFSIWMQVFNAYPTVKRQIVLSFKGTADTCFDTDVNPLQRTAEL

SEQ ID NO: 84918 - protein, 299 aa, Chryseobacterium aquaticum
MWSNSTGWFSCAFGPFRRFTGGEKEWMKVYYSDPRAAAHLSVFGEDVALTEALDWLIDLHIKNLESNSLKSDTAFILDALKSFLNEGGLLPHNSRLDSISSEGVFFIDGNGSKIDVTQMSDGYRSILSLTFELIRQLVRSYGSKKVFRNFNQNQYFIDMPGVVLIDEIDAHLHPTWQAKIGQWFTKVFPKIQFIVTTHSPLICRAAETGTIWRLRAPGTDQESAEVLGIDRERLLFGDLLDAYGTELFGNNVTQSESGQELSAELASLTLKSFKGIINSDENLRLSKLKSMMPSNDTTN

SEQ ID NO: 84919 - protein, 270 aa, Chryseobacterium aquaticum
MIQLIDSGLEDFAISKLADYQKLIDDKPTYPERVVEAKKKFKSSNTTKNRAFIEVKKKLSLMCCGPDRCNYCEDSKADEVEHIYPKDWYPEKCFVWMNYCYACGTCNGPKNNKFAVLKRIDGTVVELIRDKDSDIIEPEEGETVLINPRLENPLDYLFLDISNTFFFTSMDDDTASEASIRAEYTIKILGLNSRSYLVKARKLAFSNFESRLSDYITKRNAGANQNQLNNMIENIKGEHHQTVWSEMKRQKDIIPVLQNLFMDAPEALLW

SEQ ID NO: 84920 - protein, 384 aa, Acinetobacter baumannii; identical to SEQ ID NO: 83046

SEQ ID NO: 84921 - protein, 246 aa, Acinetobacter baumannii; identical to SEQ ID NO: 83047

SEQ ID NO: 84922 - protein, 514 aa, Acinetobacter baumannii; identical to SEQ ID NO: 82756

SEQ ID NO: 84923 - protein, 213 aa, Acinetobacter baumannii; identical to SEQ ID NO: 82749

SEQ ID NO: 84924 - protein, 408 aa, Pseudomonas sp. Leaf15
MALGVQKKIEGKRFLYLGQRATNGMAGISQSQRTLMAALFLNSDPSGNGKHLFESVFNSIGFRAELGISLRLGKTLLSHYKTWLSARVHVQHMAKDVIEDYAKKIVSDYLESAPIEEHAPRIRAVLMRIAHFDFRINGIFKLLRWFNSESERPALRFEDGVIGFVTNPWHDWGLDELETFIRMGLIEIDKVTFLKCNVSSDSSSPSNTVTGDDIQLSGEDLSSGQWGWIAGFAGLCAHIDKNSLVLVDEPENSLHPIWQQKYVPVLNSILREFPGSQAIVVTHSPMIASGVDPQWGGVEALIDHGVNEKGQQVVRSEPAGSTFGWRASDVYEEAFGLTSSRAPSFTRMADIALALIRSRKIIGNDEYDVFKRELTLDLNSLPLADPLRNVLASIIKDLESRFMARENN

SEQ ID NO: 84925 - protein, 289 aa, Pseudomonas sp. Leaf15
MFETISPDDLDEALLKAVRRHQGKAWSSNADVVSFRTRLLELQNFRCAYCQGLIDLDEVGHRELDHIFPKSATENCSEVKGQSNEFEERQHTFGYPQFTYEPLNIIVACKICNSYKKNFDPLLNRTVQLVGDDYPAANSILWFYPYVHHYSQHIERSDNWTYTQLSTQGEVVIKVCKLDQASVLASRFSARALIRAKQSENLRSAAMVMAADINDGLISRNHAIDALVLALEVNQEVAVEIVQLWLDYVTGGSVDAIAKFEELLMSVVGEESFDIDRAQASIENSLEAL

SEQ ID NO: 84926 - protein, 587 aa, Chryseobacterium sp. Leaf201
MLDLVEVHEELYLYLLEQRKRNSELKFTFRKSNHANRLEEGYWFYGNENYLAISFWEGMDWKNRTPNICFIIDSKGKCTLEINVSDSILKKEFIERYFLERTLNLEKIGRKYVITYDGGFSEYSNRLYDMNDYKSVFDFFLHTDKENIDDIIRSNSDFFATMESSENEISFISSEEFLKRHNKIRQYRKRKQEIDNEDEFLIKEDKPWKLFSVNIRDYGLINDLSIEIKNKKNQWIFLTGENGSGKTNLLRAMATTLGNRMLSKNELEENPNFKVIANFIYKNKLQEYNRIGNGEVKGKRKPYIQGLAMYGPYRLDMVVDKMNKAKFKKELNKEESFKSLFKVGTPLLSIDKQFEFWRSGSKREKNLFQKREYYIKSLIIDVVSNLVDIRFTIENNKKITKYIFTNDQNQEYSLVWEKLSSGTKSTIAMLGDILIRLFNQQSDILDPAELRGIVIIDEIDVHLHPKAQKDLVVNLSRTFPNIQFIVSSHSPIPFIGAPEESVFITVERDQNNNIKATILDIDISNLLPNTILSSPIFGFDSIINVQHHPNENLVTENNYQEAAFYKILNRKITERTIQLGIDDDSDN

SEQ ID NO: 84927 - protein, 303 aa, Chryseobacterium sp. Leaf201
MMIRITKKDYNDVPEPLTRPGTYRQIERAVAATDGNKYNTNYYKDEIVVNKLKAFSVHKDNLDQHDKPKCYYCESYVDHVATLQVEHFRPKAKVDEIDNNSLSHSGYYWLGLEWSNLLLSCPSCNGKNAKGNRFPLLDFNNRTRAINPIRNPPLSFDRAHCIANQSPLLDEEPLLINPEYEDPTPYLTFNNVGQIYGVGEKGEKTVEILKLCRDSLLAARQTKLNDIIKNIDLACAAREMSRINYDGFKVWLEAECTKVLELDNVTNEYCLWGRYIIANFESCVVSRIPIYKDELRDAFQQVK

SEQ ID NO: 84928 - protein, 456 aa, Sphingobium sp. Leaf26
MSVPIDQPDSLHFLALELENVRAFAGRQRLDLADESGKPNRWCLILGENGVGKTTLLQALAVLRPVPAMASGHGGEGTDDGVPTMSEPELAGRQNAEVERFVRRYASGAAMAATLQDPAGKSFAMSVRMSIEAGVLKDFSFPKARYALHSEGPLVLSYGAARHIGHGNKGTVSEREMSSALFADAVDLYDAEELLEELEHAAAKGPSELRTRDRARLRAVYKAIASLLEGLKPSDIEFRGPRVPGRTPAQCGVHVKTPSGVVPLADLSLGYQAMFAWTVDLAYRLLEAYPASTAPMKEAAIVLVDEIDLHLHPRWQRDLRRHMLQHFPKIQFIATTHSPITAQDAIAEGGTVAVVRWCDGAAEVLNNPLPREQWRIDQLVTSELFGFSAPRPRGAEAKLERRVEIIRKKRMTRREKEELAELDEFVAGLPTERSAGEANFERLMMDYARDFPGGAA

SEQ ID NO: 84929 - protein, 256 aa, Sphingobium sp. Leaf26
MIRVEKGAPPRNLAKRASAGHAIHAAQYLADGADYRSGKKSFKPDSTIYGAKAVKTKLRQAHSGKCVYCEEKLDKRTTHGHVEHFRPIAFSKASAGTVEIRPGYYWLAYAWENFLWSCHYCNSTRKGNLFPLADEMVRARLPSDDLALEEPMLVKPDKEDPSLHIGWYKEVPMGLTERGRITIEVLGLDLPVHETRLSHYRRLEQAHAIVSDLTGSPDANAHRHVVSFRAFLLGCCTADQPFSAMATAFLRDNPLP

SEQ ID NO: 84930 - protein, 219 aa, Sphingobium sp. Leaf26
MHALLTFERFLRKDRVLRGIDIHLERRFDDREIELHQASSGELSLMSSMIFLVASIRDNAVVIIDEPENSLHPNWQREYIDTVLTTLRYHDVVIVVATHAPLIVTGAIAQNSGIISVFQVEDGRPKYLKLDDAAGGGSIEEMLWKAFDVVTPASHFVSEELVGAVSKFEAGNATKADVLDLIDRMKSASFDRKQEAFLEAVSQLVDDLDKKLSAAAGIS

SEQ ID NO: 84931 - protein, 215 aa, Sphingobium sp. Leaf26
MTDAYLPPLSDFAFSAEEEAAIVAAMLEDSPWDKVPAAHKDAIKSAKQRIQTYHLTRHNHQCCYCRTILHGGGYFMIDREHVLPKSIYRPFTFAPWNLSVSCKRCNMQFKKDCVAFVIDADGAGPDDTGANYRLVHPNFDAWDHHLLRTAVQAGGNVLVKFTVLTGSAKGAYHHEYFALKELEIDTFDQAQGMEAIAGSIADQIRKLARQHGQAN

SEQ ID NO: 84932 - protein, 416 aa, Pseudorhodoferax sp. Leaf265
MIVTRLKLANVRAVEAAEFSFKPGFNLIIGVNGVGKTSALESLAVSLAAISRHINSLKGPLHGFTSSDIRARTDALTVESEVSIADQRYSYVIHQPREESVAQAGKEGMPREQTVATPAKSAFVGDKPPAADGKKVLRPLAVLFSTRRAVPSDRAPTQSAAKGGHAAAFAEAFSARELRLGEFAAWMRAQAVLAAEMPSSARVLGAFEKAVQRFLPGYANLRVSDEATPRLLIERRGVEIPVRQLSDGERGSLALVLDLTRRLAQVNPGLDDPAAKGPGVVLIDEIDLHLHPQWQREIVRKLPDAFPRLQFIATTHSPQVIGEVEPDRIQVMGRGPVFSPTHSFGVDSSRVLEEIMDAPPRSPEVQELLDRLSRSVADNKLEEASTLVGHLATKLGEDDAEVVHARTLLDFLGGDA

SEQ ID NO: 84933 - protein, 217 aa, Pseudorhodoferax sp. Leaf265
MRAITKGQEPRSLVEHRANAHCNYANYADKDGLRAALVRDQRGLCCYCMTRVEATGTGMKIEHWRCQAHNADLELTYSNLLAACLGGHGQPEALQHCDTRKGEQDLKFSPANGAHRIEQRIRFEMDGTIASSDTEFDAQLNNVLNLNLPMLKNRRKGVLTAILDWWKSEKTRLRGPLPTEQLARERARRAGDGAGHLMPFDPVVIWWLDQRLARSST

SEQ ID NO: 84934 - protein, 454 aa, Pseudorhodoferax sp. Leaf274
MLKELHLVKVGPCEEMKIVFKRRLNLLTGDNGLGKSFLLDIAWWAMTRHWPRTLNKALVSGYVARPDSSKEGSIEFVVEGMSNKGVRYKSQFSARDEEWTGKVGRPYNPGLVLYAMADGGFAVWDPARNYWKTVGGQDVPGRVPAYVFSARDVWDGLKDEGGGLPSCNGLLSDWAGWQKEGGAAFRRLCLVLARLSESETEPLVPGPLTRVSKDDARDIPTLQTAYGKAVPVLHASSGVRRIIALAYLLVWSWQEHQAASALNEEDTAPQVVFLIDEIEAHLHPRWQRMIVSALLDVTRELAGEAQVQLIVATHSPMVMASAEPRFESKVDAWFDLDLVAAGASRPAGVQLVQRPFERLGDVSRWLVSQAFDLGSARSREAEVLIAQAEALAQDPGATASDGEKLTRELENVLGDIDPFWSRWRIAGAQRGWWDLPSPFATTAPVRRNRKGKAP

SEQ ID NO: 84935 - protein, 209 aa, Pseudorhodoferax sp. Leaf274
MGPPAGFATRVVKPAKRWADKNKLVWSAPPPAGWSGRLKDYWRNCLDDLHDGYGATCAYLAVYTHRSLQDTSVDHFEPKSKAPLCKSYDWSNFRLACRPMNTNKDEFQDVLDPFLLPPELFILNLLSGRVQINHRVAPVGTPLHKQAQHTIGRDRLKLNAGPFRDLRLRFIDEYFANRQRPGPRALQEARDLLRLQSPFIWHEVTRQGL

SEQ ID NO: 84936 - protein, 704 aa, Pedobacter sp. Leaf41
MIRIEKQNAPKYLSSSIVDLAIEKMEEFFASKNRSQKRYDWPFNKEIDNELKKNLHVVFHGKCGYCETKIESPEIGTVDRYRPNNGVRDKNEYHQDLYWWLTFDWENLVYCCKECNQYKASYFPIKGIRATDEKSDLATEKRMLLNPYQDIPNQHFLYNVSGEIIPITENGLQTIELLRLNRSDLIRLRLEAKRETEHIIYNILEEVNENNRTLLEELKRIYYEESPDVGFSSYKKWVIENEADTDSRVARLLDFEIYNEPGFRDVDEAKRFISGKLYKNIIRNDYFPIEYIQIRNFKSIDELRVDFKEDDSEKKSWLILLGENGVGKSSILQAISIGLKVDKKVINEDIIRSLIKKRKQTAEIIIKERNSKNIIYTKLTRKTGTIEQDGDFNSYLIGYGSLRLSIEETEIISEKDTSKVSYENLFRPTKALNNVTKWLKSIHKNDITYFNSIAYSIKQLLPDDKSDTELAIKNGEIVLGDSEKLFSELSDGYKSTITLAIDIMMKLSDVQSDMEKMAGIVLIDELGNQLHPRWQMKIVSQLRHVFPNINFIISTHHPLCLRGAEKKEILLLRNLDDQVVITTELPDPASLRVDQILASEFFGLNSLIDPEIEAKFNRYYTLLAKNKGISLNEIREIDELKDFLRNKKQLGASLREELMYTVIDRLLAEKVVFNKNTFSRDSLKEEAVKRVKEVWKNLNLNTDD

SEQ ID NO: 84937 - protein, 318 aa, Pedobacter sp. Leaf41
MINVKRSDCPDILKISSTPQSSGEWETRDAIEYYRDIANHPEKYKKTGANGARIQQAYSIYSDKSVRRILLNMFNGKCAYCESKITAIYNGDIEHFRPKGKIQNANPSRPGYFWLASEWENLLFACPFCNQTNTHEFRHGNNIEEAVFGKLDQFPLETEIHRLKYTHGIIYFTDSLTYNQAFDLEESVRLLLNPCKDDNIEKYFKFNDDGAIISNDGLTTFEGKKAQISILTYALHRLPLTIAREEKIIQIKAQIRRVEIAVINYNKYFDKSDEEKVWFEGIMRDEMAILKKFKDADQEYSGLARYIINKYFAHPNLS

SEQ ID NO: 84938 - protein, 551 aa, Erwinia sp. Leaf53
MTKQIERNARGGNLLSAFELFRQASNDSMPEHHDNAEEWFELCWKYLQNGGDTRDGVYRPENNFCLRSMILTDFRRFSHLPVRFEEDLTIIIGSNGQGKSSILSAIAKTLSWFTASILKEDGSGQRLNEFSDIRNGSENQFTDISSHFSFGKGLKNIQLRLSRSVPGAAQKRDSEIKSAKEIADIWRVVNNKFTINLPVFAFYGVERSYSFTKSRTKFEKREDRFDAYTHALTGAGRFDHFSEWFISLHKISGAQKIADLHQLQEQVSYLEKAVITGISAVKPLLQEAQEKLKAALTEYEAKGSNDTLSAEIKMGIVSDAITSIVPSISRIWVDTSTGSDIIRVINDQLNVTVDQLSDGQRVFLGLIADLTRRIIMLNPLLSNPLAGQGIVLIDEIELHLHPKWQQEVIPNLRSVFPNIQFIISTHSPIVLSTADRRCVREFTTNLAGEDQILDMPSIQTKGSENSEILEQVMNVFSSPQNIAETHLLSEFEASLTADEDNLSQDSQDLYNKIQSHFGLQSSQKHKADSLMRLNKLKNKIRRSKSEGKNQG

SEQ ID NO: 84939 - protein, 211 aa, Erwinia sp. Leaf53
MKALVRPLPGPQHLNDFTGGLHHWNCATKSEIWPFLEEMQGSFCAYCECFLDKRHIEHFRTRNSHPDLTFDWSNLFGSCCGKLRCGTFKENGAGTYNPDHIIKPDIDNPDDYLLFLTTGKVIPAKGLHGQKLIKAQETIRVFNLNGDSALFGRRSTALKLELKNILALNDEENHIPETEFLELLQSEIEDVEQREFSTALRHGWRFNDAYE

SEQ ID NO: 84940 - protein, 509 aa, Acidovorax sp. Leaf78
MAYAGAMRQVAFRSSKRLAKEIGDMSWLGAGWYGSLAAAQRTDHASDEPETIREHVEEYRLDSAEGRRRYKLRRRLLQSIEITNLRGIRSLSLSVSSGTDSVTPWLTLLGENGVGKSTVLQATAIALAGPRYFQRLHEAKLIDVKALIRHRCLTGEVSVRMSGFDAPYRVRFTKTRVEFFGPLGERSHLSISSRAANIVGKVYEAPTVVLGYGAIRLPARTVGSGTYGTSYARIENLFSYEATLVDPRRSLQRMSKQRFEHAAKVIRELLSLRRGASLLVKKEDVVIREHGTDTSLAHLSDGYQGVISLVVDVLEAIYKVWPNVADAEGVVLIDEIGTHLHPGWKMRIVEGLKSGLPGIQFITSTHDPLCLRGLNDGEVAVLRRDAEGQIAALRKLPSPAGYRVDQLLTSDFFGLRSTVDPLMEQAFERYYELLALAKPNARERVELAEVKATLDANRHLGETPRDRMMYAAIDRLIALEEANSPIDSPQLTNQAIAEISQRWNLQFQR

SEQ ID NO: 84941 - protein, 339 aa, Acidovorax sp. Leaf78
MIHIKRTSSTAKVLTDKRLKSTRRPGLTRADLECEKAIEYYTVTLPAEQAKVKAKNAQAALNGGALLDSPKIKFPFSVYGDEHVVKELMTLFHKKCAYCESHFRHVTPADIEHFRPKGAVIINGSLEHPGYYWLGADWDNLFLSCPRCNRKDQLDVPGVQSTVSGGKGNHFPLLDESKRVRKHGLSLADEEAVRLLLNPCIDDPEAVLRYEDDGSILPKRRLRKLNRRRADTSISVYGLWQGELRDKRKELLDQLKLELITIERFLRMIDRMKSAGESPADIQTEQDVLDMHMGVLKGMFEPGAEYLGMLRYQLRQELEPGRAGDRLVRVGLDLTKLLV

SEQ ID NO: 84942 - protein, 484 aa, Acinetobacter sp. Leaf130
MKYIQEISAELEFIQHPININLNGRNLILTGKNGVGKTRFLNQLNNTILNKLIHEIPHISEHHYTQKVNIINILKLELSHLINDIEYTNYTNNKLDHLNLLISLEQLLGQTDCYNPHETTIFIKKATELKDIILKYKDFSQKKDPNLLYTHSEIYHIDHLFNEISSNYNQGNINLVVTGIGNLNQSIQASKVTFNFFQAHRQSQITSTTNTADLNQYINTARHEYSSKLGQHLEQYLLNIRIEKSLALSEENDQKHAEQIDAWFKKFDEDLKFLFEDESTELKFEYKERKFSLKQYHREFTFQSLSSGFTAIFDIYSDLLMRSRLLNILPNELNGVVLIDEIDAHLHISLQKKILPFLTKSFPEVQFIVSTHSPFVITSTNNDTVVYDISTGEFFEEDLSRYSYESVIKGLFHVNPMSSETKESIDTLKHLLNEKPTKYDNIRSTVKDLIELERNDLLDKKLKNLYLQAINLLADHNQLEDLDV

SEQ ID NO: 84943 - protein, 229 aa, Acinetobacter sp. Leaf130
MFKVSKSPRPMDWTTKDYKDPAVVRLLKKDFYAKCYICEQKHFPNLNVEHFIPHLDDETLKLDWSNLYYACSRCNSIKNKYYDNMLDCCNQDHLVEEWIKVYYRMPDEDIEVVNTCPSNHTYHEKAETSKDLITRCFNNANSGIQEVSKEDLREKIIEVHSEFLDLRREFFKNLDNWLEEEKIIEAKKIRHRLKSHYPFSAILRGHMEKDSKWRRVLEEIEKLELQQST

SEQ ID NO: 84944 - protein, 410 aa, Pseudomonas sp. Leaf129
MLDFLSFQGVGPSAALGPIGLAPRLNFITGDNGLGKSFVLDTAWWVLTRTWAAGKPIKARESSALPVIDYRFTGADRSAGQWAWQRDRWTPVGDATPNRSLVVYAHANGTFSAWDPVRNAGELAAYHFDENQLWHGTSMAGQGRLCNGLINDWVRWQRTYGCKAFAALKQVLRALSPSREELLLPGRPCHIGLLDETEYPTLQRPQGRVPLPETSSAIRRVVALAYMLVWTWEGHRRACRLAGVRPSDELVFLVDEVECHLHAQWQRRIVPALMDVVGALTRQRLAVQMIVATHSPLVLASMETQFVEARDALFTLSVEEGQVQLHQQTWAAQGDAVNWLVSQSFGLRQARSVEAEAAIGAAEAWMRGERSGLPEGLDSEAAIESQLLRALPAGDHFWPVWVVAKGGVQA

SEQ ID NO: 84945 - protein, 208 aa, Pseudomonas sp. Leaf129
MIELVHPLPEPHGFDERCRQRGNAWLQDNPDVGRPRDYWSPFRPQLGEGFANRCAFGAMYIPSGTVEHFISCDEDRGMAYEWSNYRYVDAWMNSAKGSKKAEDFLDPFEVREGWFEVLLPSLQLVLTDKVPEAVRARAEYTLKHLPLRDDERVMRVRRQWLRLFKEGKIGLEGLREMAPLIAAAVERQEVRGAAFAADDRSYGATQTP

SEQ ID NO: 84946 - protein, 867 aa, Massilia sp. Leaf139
MKQIVRSSDDKIQQHSLMSERSMEDYRESTIVITRLWEDLFKVAPSSAQPTETYEHGLLLLFLVSAQGAHHARTADRLSVAITGQPSDQLSAQIMGQPYIMHWLEGATDRPYPERIALVFDAVMDALRSFGYVGPQQHIFNVQADWPRRQFDLVVNWAREHGMQRVLDAFDHGQRERIGNQRDVGREDFAAYLALSCTIEPDATVADLGSPTACLPRLAIAAGMARPECIISQAVTDRFTAMRLCMQGIYFHYVDLKGVGSDDPALPIFADFLLLDPTPASGSTTPAQPPGNNAELAMSAIRLAQQLPRLRDRFGLALVVVPHLACTTTHWQRHVREELLAAEMVAAVVDLPASALTGRRRFSAWLITGRRAVVPAHRRKVLFIDAEPLGRLTPARDVQLSADFMGALIAPLFQADGHRNRLLERLEHAEPLLANIFKREFDHTAYEAPGLSRSVSYEAIHERDAILAAKPYLTPVAGDLWERGIDRRQLDALLETAHGVGQRIYIIGNNGEGKSLLLRDIAVESASRRRPTVVIAFNASDRFLRKLAPEAQAFYRYMGARTNTTGINTLQAAVDIGALMLRIHADPQMLEVLHRVLDLVGFASELFMIPRELKANGGQQRGLISGIVRLASQDASDRQLIDTLQASPLLAKKYKLGLRRAHHRDTILPFDELSSGEHQIIMLAAKMISEAKRNVLFLVDEPEISLHVGWQRIVPKLFETVAREFGADVLVATHSPVLVAGADGDGDHCFTVRDRALNALPRQDRNSVETALFEGFRTYTSNNREVHERCAALVAQFIEEANGDDDPRQSAQPILDKLDDMKQVIDHQRRFLAREEMSFDVNLIEQAKSAVREMAALAVEDSGEEDE

SEQ ID NO: 84947 - protein, 257 aa, Massilia sp. Leaf139
MKLMHRPGAEIDGDQQRFLSQPHKTKRLWAEAKTLWLAEQACAETSRLDRWFALTDYKKSFKGEKPREFGKEVIAALRLHLVGLQKGRCCYCRRWLQNVAHARPVEHVLSRKDYPQFSMQYRNLVVCCRDCNQKKSDANWCDLPHTARHYPKVIDDYFHPRLHVYDTHIRYVRIETNDTVVALYHGLTDQGRHLCREHLKTIAQVDGLVSNNKRVSKAFARLQAASDVRDPSKVRELDAFINELHVAMHRVAGTRRP

SEQ ID NO: 84948 - protein, 468 aa, Pedobacter sp. Leaf176
MKITPFYINLLELKGIKTYSRETSLSFCKEDGTISKWTLILGDNGVGKSTLLQCIAWMKPLLPYNMTEVGETFVASPLINDEENEVLEKLVSRKNEGEGTLEIRGHFVANSILGQKAKTGTTDNCETGIKIGVNEHRKLDLVEPSFLAENKNVFYDDEVLVFGYGASRTIGKQNLSNPRLFDTIPQFINERTELYDPEEILHSIRYASLASKKKGDRLKYAKLLDDIKEIIVSTLPDFEEIDKFEILPPRVLLSDPEGGIIVTTKYGKKIPFADLSLGYRTIMSVIIDLSWRLFNKYQAQSSKPLNEPAIVLIDEIDLHLHPIWQGEIMPKFSHHFPNIQFIATAHSPLMLQTALEYNYAVVRFNDSEDAVEILNQPDGVDGWRVDQILTSELFGLESARGIQYDKLIKDRKILLQKKKLTDADSRYLEDIEKKLKKVPVGENPDEIKKRDYISELYNKIQNGEIKFE

SEQ ID NO: 84949 - protein, 255 aa, Pedobacter sp. Leaf176
MIKINRPLAIPLRLSVEGAAADLQNRNDYDASPGSYTSLIIEFEILNKIYGHVSVKSALRAAQFNKCCFCEKDQVEEDGTVEHFRPKMGFREKRKEALVKPGYYWLGYTWTNLLFCCSKCNGARYKGNLFPLRAGSARARTHNDDLSLEDPYLIDPASIDPRAHIYFDDEMVKYRTDYGQETIHILGLDRTTLNDFRKALIQDLKSRIITIKAHRFCTPAQVAEAKQFLRDAQLPSAKFSAAAIDFIAKAGVALD

SEQ ID NO: 84950 - protein, 520 aa, Dyadobacter sp. Leaf189
MNAKSHPIQVVNEWHRIAESIKQQINDSAIKFEIKAHKHFGLKITYKEFRKIYFEISDYEVVQGFMNKMKVLYVVEQVPEDKFTPIDQSLQEARNLHDYEVTSAFKEWIDLIKSFIRLDSIDFTSLFFLEDDELFLQNEPNRYFEENNILDHCLKSLSVSNFQGIKRATIENLPVDTHWVFLVGENGFGKSTVLQSILLGLHGSKDGPYDFDQEENSRIRVEYKSHEDNLINDFRTNPSPLTHIAAYGPVRLNMQSNSSISEISEKQGTLYSLFRTDGDLLNVEFELVKWALKGDKRFQLVRTAFCRLVPYLADIQLNKDTDRIEYIEKDVFNENARYEPLTFEKIASGFRSIVGIAGDMIIRLSNTQKDILDPSDLTGIVIIDELDLHWHPKLQKQIPELFSEVFPKIQFIVSTHSPIPLLGAPKNSTILKVTRTKEEGITIQKVDVDLKTLTPNLLLTSGIFDMDNIFSSQIEELTEVRTEDTFEEMEKNEAIDEFLKEFESSNEQFPDELFEPKTNG

SEQ ID NO: 84951 - protein, 286 aa, Dyadobacter sp. Leaf189
MISIEKDFKNPPQSLATSLTRTSHILDALSRKNKHPFNSKLYRDLTISSLIELYHSKCGYCETDTSAGAPMQVEHYRPKAKVLEDIKHQGYYWLAYEWSNLILSCSKCNNKKRNRFPISGQRISTPGILNMGMPSEEFVLANSKNFLAENPQLLHPEIDKVEDQFLFNHNGEIVGLNERAQQTIIVCDLNRDELIFKRYSLLQEYRTDIKEILSEYLLKHITLDQCRYSLKGIFRRLAQLQLVSKQYSRFGYFMFYKFDVYIANSFEDKQKHAVKKLFELFKAGSL

SEQ ID NO: 84952 - protein, 417 aa, Bradyrhizobium sp. Leaf396
MYAKSLHIYGFKCFGKAELALQYPGRKTGTVSETENINLILGDNGGGKSSVLRALAIAVLAPALLDSGFVPYRLVRRSKSGSEPVTHALLKVAAVPEKEELKPGVSVRKNLEMLARIETRPSGSLDRLHLERTPASPIADVIDDDLSPAFFVAGYGATRRVETADFSSGSERRRRGLRYRRIAGLFEDHVALRPLQNWLPKLRSKNPKLHDEAIAKIDGILPDSIRFRGAFDEQEEQYLFDFEGVPMPFSSLSDGYKAFVGWVGDLVGHLTDVAGQKQIDEVKGIVLVDEIDLHLHPAWQRTVVPTLERAFPSLQFVLTSHSPLIASSVRKENVFVTDTAEDGTSTIKQLEEKVYGRSAEDLLLSSYFGLQTTRPDAFVDESKALFNRAAEGDSAAALTFLEKLAGSPPAKAARGRK

SEQ ID NO: 84953 - protein, 287 aa, Bradyrhizobium sp. Leaf396
MEAAIEALDDKWLSKAAKRTEKFRAIGTFQEKSSIWSDIKPILIDVQRDKCAYCERKFEGVMYGKIEYDVEHFRPKSSVPVWPDCRKHPSLSYSFTTGEEFQTGYWWLAYDIGNYAAACKVCNTIFKLNFFPIAGHRCENADDPLALAAEEQYLCNPIGDDDADPETLVSFVATTAVPAVRRGPRNRRGRVIIDFFGLNLREILHRERAQTIALFGSALEAKARGAATAEDDAIIGRIGDPAIPHASCLRSFHRLWTKDRALGRRTYDLCRSYAVSNAGTAPPDIRR

SEQ ID NO: 84954 - protein, 543 aa, Aureimonas sp. Leaf454
MLDELRSAITSVADLSLDHLLDRERPFAGARLSLTKRLFDGMEIGGRIFEGSTTSLPRQLARALSRLDLRDQKRLFLRIDQLVSEDGALRYDREPNPAAGLAAPSPPGVRLRRERQPVGGISWVDLIEFKGIERLHIEVPRERKRSRGAPCLMLLGENSVGKSSVLQGIALAVIGDGEVRRLRLDPTNLFRAGGGERWDQLTPNDAYVEVSFRLHGDSANFHLDATSRRVVGFDPSSALVLGYGPRRYFDPRKSERPNTDHARVRTLFDSTAALPFPGTWLNELDDWRFNEVAKVLRVVLALSDSDELVRDIDGRICVSLAGNSIPVERLSEGYRSIFALVADIVRELTREFRHLEEAEAIVLIDEIETHLHPRWKMRVMSALRQAFPRVQFIVTTHDPLCLRGMDDGEVVVLQRDDRGRIVTLKDLPSIKGMRADQLLTSDYFGLSSTIDPETELDVARFVSRLGDLPAERADEANEVIQQLVLGDTALEQVVQEALVRFLAERERPSGALRPDVRAEAVQAIIAALEDGDVAERSGRAPGT

SEQ ID NO: 84955 - protein, 303 aa, Aureimonas sp. Leaf454
MIFVERKGEEPVSLGSLATLAQAQAAEQYYATWSIGDPGFDNFTRYREYDIQQALRKLFHGKCAYCEKLIEKGIAEVEHYRPKAGVKGSTHSGYWWLAYKWTNLLPTCPGCNQGLKQHVITVEMTVAEVEAMQATPPQKLLGKATQFPVGATRLVAQDDNHDAEQPHLIDPTRTDPTCELLWRHEADYSVVEAALGATGPSVLGMATIHCVALNRSDLVQSRTAILNRLKAHRTRILGDLEKEAVEIDDPGLLSLHLRAALRRVDDMKLACAPEQPFSAMASAFVDDFRTELRQWASEKAAGG

SEQ ID NO: 84956 - protein, 478 aa, Rhizobacter sp. Root29
MRLDTLRLKNFRCFEDREFRLHPQFNLVIGENGAGKTSFMEAAAIAMGSWLLGFGGHDSRNIRERDVRVLREVVASRYRELPQYPVRVDASGVVQIAVINRQEDGSVRYPPSGEANKPNPWERSVEWSRSLERPRGRTTRTGSADLKKVAETLAQAVMAQTPRVLPLIRYFGAGRLWETVRDSDHKALSKHRGKQPAELSGDADDLDRLLAESMRLAEPFYGYRMSVDKRCNPDDLIRWMGVERRTEIDRGEASVALALVYRTIEKMLPEAESVRFEVASNTLMFNHRNGSKNSFDELSDGYRNVLAIVADLAIKAVMLNPQLADHALDYTPGIVLIDELDLHLHPIWQRRIIEDLRRTFPMLQFICTTHSPFLIQSLRTGEELLVLDGQSAAQLDNMSVEDIARGIMNVENPQTSNRYGEMKGVARNYLEALEEAARSPEDKLEAFKDRLSQGIGPYADNPAFQAFLEMKRAAKLGG

SEQ ID NO: 84957 - protein, 245 aa, Rhizobacter sp. Root29
MRTICRGPSPQPVDFDDYAKAQPILLSRLGAYCSYCERRIPTSLAVEHIQPKGLAAYAHLAGAWINFLLACVNCNSTKKDKDVVLADVLLPDRDHTFAAFEYVKDGRVRPSPAVTAAGLEDMARRTLALTGLERRISEVFDQNGKLVAIDRVSQRMEVWAIALEAKADVDADPGNAAVKRGAVRTAKGYGFFSIWMAVFSGNVDMCNLLIEAFPGTRDSRCFDPVTATVVCPASNPDGLVDGAKF

SEQ ID NO: 84958 - protein, 363 aa, Kitasatospora sp. Root107
MYVSRLEVENLRGFRGVRNVDLDLTRPDGSHAGWTVLAGPNGAGKTTLLAALAAALGEETDPAGWLAPGEDEGGIRLDGAHWRVSRTEDGITARRNGVLGFWAGYPARRELTEGIGWLAGQQLQALERQPGAVELVAGVRALLDDGLLPSGYRIGRIDSDGLQVDCGGTEHPLGGGLAAAVGLVLDLLARIHQAHPEQELVIDGTPPTVPVPGVVLIDEVEAHLHLDWQQRLGEWLVGHFPGLQFIVSTHSPYVCQSADPGGLVRLPGPGEESAPYVLDEDLHQRIVYGSGDDTALTELFGLPSVYSPQAEAERRLLIALERKLYAGHASSAEVAEYRELGARLNASLAARVDEARDRLGGAR

SEQ ID NO: 84959 - protein, 183 aa, Kitasatospora sp. Root107
MTPGLLRCMYCGDNLGTDIDHFEPIARAPLRTFDWHNHLLACAYCNSNQKRDRFPTDPASGTPLLIDPATEDPADHLLLYLESGAYQGLTAKGHATIDVFALNSRAELVRGRRLAFTVVKALLRDWHTRTTAGDHATAAEIADALDLLWQADVVRAVYRLTDNRPLAEVVLGPEAFTALTALT

SEQ ID NO: 84960 - protein, 455 aa, Pseudomonas sp. Root329
MEINRFKVTDVGRFTELDIQLAPTDKHPSNVTVLVGNNGAGKTTLLKSLAISLSWLVARIRTEKGNGNYLAEEDIRNGASSALILIGVVDESHARSSRPDANPQDALFTWGIARGRQGRKAQIHSSLGGVSLLADHYRNELTADDKASLPLIAYYPVERSVLEIPLKIRTKHSFDQLDGYDNSLNRGVDFRRFFEWFREREDSENETGVSDIALAEISKKFGNDSDIWKTLSQLKASSRDRQLTAVRSAIAAFMPGFSNLRVQRKPRLHMAIDKDGVTLNVSQLSQGEKSMMALVGDIARRLAMMNQSLDNPLEGDGIILIDEVDLHLHPKWQRSLIRQLSETFPNCQFVLTTHSPLVISDAKDVLCYVLDDGELQERNGLYGLDANQVLLEVMDTDIRNSEVQQRLNRLLERLQDGDLDDAKNLFSELSLELPEGHLELAKAALLIRKLELRRA

SEQ ID NO: 84961 - protein, 211 aa, Pseudomonas sp. Root329
MRKINKEVEPQALTRWKRSNNALRYKDLPREESRSIRLSCISEQYGLCAYCCQSITIDDAHNEHLEAQDRAPNRTLDFFNIVASCQRPHQCGHGRGTRPLPLTPLMAECETELKFYLSGLVTGQTERARVAIEALNLGHTEESNRGLVGARKQMVDALIYSQSVPPEDLQYEDEEFLDLLLEDLKIPDAAQCLQPFSPVLINVIRHFLAQP

SEQ ID NO: 84962 - protein, 420 aa, Pseudomonas sp. Root401
MLDYLHMKNVGPAPELEVNWAPRINLITGDNGLGKSFLLDLAWWALTRTWANTPALPVNPGKSSIKYVVKGKSGVAQPVVSTYKREDSSWPLKQSRPTMPGIVVYVRIDGGFSVWDPARNYWRSDKDRPAAYHFSADAVWDGLDVNGQRVCEGLERDWVNWQNGRKPQFKALENALRDLSPATEPLCVGAPRRVYLGEGRERPTLTIGNQNVPVTLASAGVRRILGLAYFLVWAWYEHQAAAELLDKKPERRFVILFDEPETHLHPRWQRTLMPSLLQAIKTLRGSHGAEPPQLLVATHSPLVAASLEPIFDEEQDDQIQLSIQDHKVTLTQGHWAAQGDASSWLVSDTFGLEQARSLEAEKAIEAAEAFMRGEKQLPEGLKTRASIHRSLQKLLPAHDEFWPRWLIESGLLTLNGEGNQ

SEQ ID NO: 84963 - protein, 189 aa, Pseudomonas sp. Root401
MIPVTRPKEPADFDKKVRTPGTQWLKDNPGAPRPSPLWNKCSQALADHYANLCAYAAMLDPTGGTVDHYLSYKNFPGLTYEWSNYRFASGTLNSSKKTADDTVLDPYDVGPGWFEIILPSLQMRTTEAIPAAYREKAEYTLKRLKLRDGERVIRWRQSWYNMYKQKKLTLEGLREVAPLIADAVEKAAL

SEQ ID NO: 84964 - protein, 732 aa, Acidovorax sp. Root402
MIKLPQTRPPEFFLSQEALLLRQEAEAFFLRTSSSRAQVRFDFQRIGTRIYPHVRRGFKDQLPAKCAYCETPIENPDIEAFRPKQRATNLDGQVDDGHYWWLMFEWSNYLPACRQCNTLKGQRFPVRGPRAQVGAVGPSLEAEKRLLLDPRIDDPARVLLFLDDGRVTSEDERGRVSIDVLGLNRESLVKARENDLHVLLSLMAKSKPSERHLVGLVGLLAKMTEPDQSFAAMRRQYVKAWAVEISKASPKLHRLTKRFLDFETALVSGLNSRKKEIKDASVGLTTRTVSSESYSIAAENVSDDYYRQARFIERFELRNIRAFENLALRASIGSGKPGEWLVLLGENGCGKSTVLQALACALVGQAGVESTGIKATDLLRRGCSRGQVTVHVTGMSKPIVMTLIRRGNRIKVDPPEPKLMVLGYGATRLLKQDKDGAPSSSRFRINNLFDPYSRLSDGRPWLYEAKKTEFDRFVRSLSALLPRADGAKFTRRGDRIFVETPGVKDTLDTLSSGYQAVLALALDIMSVMRLGWQDMASAEGIVLIDEVDAHLHPRWKMRIVQRLGEVFPRMQFIVTSHEPLTLRGLDREEVAVLKRTLDGKVVAITADSADFPSPQLMRVDQLLTSELFGLNSTEDLAIDTLFEEYYVLLAQRSRTAAQDARLNELRMQLDDGTRLGLTPRERLVFEAADAVIAQSKANFEALSEATQAAAREHLKSLWAEVRNEPPVAGSGT

SEQ ID NO: 84965 - protein, 276 aa, Acidovorax sp. Root402
MIHVDRVPTPASLDGIDAKGVKETKDAILAVKNGIQFEFKAYKEDDVVAALRAMFNKKCAYCEFNYAAGGPEDIEHFRPKGGVIVNGKLAQPGYYWLAAAWSNLLPSCSDCNRKRTKEFVDRATGVSGKANLFPIAEESRRWRSHRSKNREEPLLLNPCDDDPEQHLEFLDKGLVRPALDAVGTPSRKGEASIEVYGLARKDLVEQREKKQTRVRAALQQASEIAAKAQATADPAMRSFLDKQVRTLMQEAQSHLDKTEPYLAAVRAVFREFGLHP

SEQ ID NO: 84966 - protein, 532 aa, Pelomonas sp. Root405
MYLVDLELTNVRAIRHMSVDFRSTKPNEKTRRWTVLLGENGCGKSTVLKSIALLLAGSEALPDLLGAPDQWIHNDAKQATISATICTAEGEERTLTLSLNRGDGRDTVIKRNSNGLRQLDAALRKADRNYFIAGYGAFRRPPDTTRRSSIGSSLEQGRAAQLGSMFSLGHELVSLEQWAMDLDYVVGTEGSSIITEALGKLLPGMHFKGIDKRKRAVVMGTADGDVPLGQLSEGYQAMAAWAGDLLFRMTETFKDRKDPLAARGVMLIDEMDMHLHPVWKRNLVDFLDNAFPNLQIIATTHSPLSIQQCGEGELFVVRRETAGPTLVPFAGDPSRLRLSELFLSPLIGLQTLDSPKVAALREEARSIELKPGSKSALEVAKLRSIQEQLEGTTPMTTEEAPAFAKLIEYQKSQPNLDAAARMMEAEELFGTARVTVEPVAPAVKSSRTVRKSAVPPSSARPRSVSGAKATSSSSSPAVKKAAAPKKPPAKKPVAPKPLPKKPAAEVIPPRVAPAKPRAVVRPAAKPAAKGKP

SEQ ID NO: 84967 - protein, 276 aa, Pelomonas sp. Root405
MIHLKRARDLASLNTGFTGEGLFTKLIALTEARLANPAKIDWEGILGDWKKMKPFLQRDSSEKCAYCEAPTSDVAYGDVEHFRPKSVYWWLAVCVDNYVFSCQLCNQKYKGDRFPIAGAQLTGPKLPATLPKTKAALKRLMATLCPDPATADEATLLADWLAEDPDLPHPYLEDPEPLFAWAAVETNEEVRVMPPDNASPRAKRAVKAAVDYLGLNRETLARQRYIVYRSLVSAVRTWKLGDAPSLDQIKYMCQPKHPFAGMCRYYAHLAGAPITR

SEQ ID NO: 84968 - protein, 413 aa, Acinetobacter sp. Root1280
MSQNYISKFQAENFRQFSKISMKFNDKFNFITGPNGCGKSSILVGIHHCLDYSWQSSRLNQDSSFYIKVFKNDRFYYLGLGKNTFQNTNSYRRISLYTYNLPSVEGETSYTAYTPSNITPENKIFPLFIGTKRSIDYIEVDGIKREETNVESLRQQYSSRGIESNISDVKQWLINRYFIIGKDWAWEEKENWNLLLENLPKIAPFGSNFKFVKIERDLEPIFTLYNQECYLEELSAGFQAIFSIIGNIIEWIEKTNVEGAKNIQHAYGTVIIDELDLHLHPEWQFNIRDGLVALFPNLQFIVTTHSPHLLASAKAGEVIIMDRKTGVTEYFFGPSAKTYSGWSTDQILEDVMGVKSLVNKDYERLIADALEAYNKKDKQELRGLMESLATITHSDDTILQVLKMKMASLELNQ

SEQ ID NO: 84969 - protein, 249 aa, Acinetobacter sp. Root1280
MIKLSRIEKVPQILVDNQKKWTDNLLALVTEHGSYKDIPKPTKDAALVHYRHQDIKDILFSTTSNKCAFCESFPADSGNIEVEHFNPKSLYPHQAFEWTNFLPSCRKCNGAKDDHDTLSEPIINPYDDNPEDYLEIDDIELKGKNEKGNKTIEVCGLSGMRIWRPFADLLVQFKTYESNVKTAIQDYNEAKTQPNKKRKIQLLQNSIDIMNDLRRPNSQYSFFCNQMISKSEIFAQAESLLKEHDASQV

SEQ ID NO: 84970 - protein, 455 aa, Pseudomonas sp. Leaf434
MQVFSLSLTDVGRFADLTIYLAPTSKNPSNVTVLVGNNGAGKTTVLKSLATSLSWLVARIRSEKGVGSPITDDVIRNNSSIAMINVAVIDTCNAQSETLEEWAKEILFSWTVARGKRGRKSASHSVLADATLVADHYRTQLLGDDSASLPLIAYYPVERSVLEIPLKIRTKHSFDQLDGYDNSLNRGVDFRRFFEWFRQREDSENETGISDTALTEISEIFGSNSDVWKTLAELRASTRDRQLIAVRSAISAFMPGFSNLRVKRKPRLHMAIDKDGVTLNVAQLSQGEKSIMALVGDIARRLAMMNQSMENPLHGDGIVLIDEVDLHLHPKWQRSLIRQLSETFPNCQFVLTTHSPLVISDAKEVLVYVLNDGELHEHNGLYGLDANQILLEVMDTDIRNSDVQKRLNQLLKEVQDGNLDKAKLLFAELSSELPEGHIELAKAALLIRKLELRRA

SEQ ID NO: 84971 - protein, 209 aa, Pseudomonas sp. Leaf434
MRKIIKGAEPDSFAKWKLKNKTATYPDLPHEERQTVRAACVTEQFGLCAYCCQSITVDGSHNEHVEAQNRVHNRTLDFTNIVASCENRPHCGHGRGTQPLGLTPFMDECETELKFYLSGLVAGKTARAKDAIETLNLGHTEESNRALIGRRRTLVEALIYKVGVQPGELPEIEDKEILDLLLDDLLLPKAQKLEPFSPVLVNIIRQMPA

SEQ ID NO: 84972 - protein, 422 aa, Streptomyces sp. Root369
MLAGRNGSGKTTLLRSIAIGLAGPKRAGQLDGDLENQLSSGASRGELAVDVLPDPGVDTGAREPDEITAVARWEPEWESEPGQGEPPVEVVFQQDRERSARSVLDYLWSSTPPPGWFHAAYGPFRRLTGTGLYERTPQVPDRTAALRTLFEEQSALTEAFDWLLSLHLRALENKPGAAALKYGVIDFLNDGLLPDPYHIEGVDSDGMWLRPLVGEDSTEGPLIELRRMSDGQRTVVALVLDIVRQMHAAYGELTFRTEHQRTYLPHPGIVLIDEVDAHLHPSWQQRIGDWLKSRFPAVQFIVTTHSPYVCQASDPGGLIRVPGPTDNASPGPVSEELRQRIVYGTGDDAVLSELFGLDTPYSEQARALRQELVELEARVVTGEATDDEEARHAALRARLSSSPRTRAVELQARLKRLGVLDE

SEQ ID NO: 84973 - protein, 192 aa, Streptomyces sp. Root369
MAHGNRCCMYCGDDLSTDIDHFEPIAENPLRTFDWLNHLLACSECNSTHKKDRFPRHPETGAPLLIDPTAEDPFDHLYLGLDTGLYLGRTEKGRQTERVCGLNRDDLPEARCIARDGVVMCVDGWLSGREQGNERKMAVAVRTIRNQPFADVAQFMLRQAMLPRASAAFTFDLGEETLHHLRDPELRAALLV

SEQ ID NO: 84974 - protein, 478 aa, Rhizobacter sp. Root1238; identical to SEQ ID NO: 84956

SEQ ID NO: 84975 - protein, 245 aa, Rhizobacter sp. Root1238; identical to SEQ ID NO: 84957

SEQ ID NO: 84976 - protein, 451 aa, Pseudomonas sp. Root569; identical to SEQ ID NO: 84628

SEQ ID NO: 84977 - protein, 209 aa, Pseudomonas sp. Root569; identical to SEQ ID NO: 84629

SEQ ID NO: 84978 - protein, 367 aa, Pseudomonas sp. Root569
MIDKFPYRQDSIDEDQFYYYLGVRQATNLTTTGSTDRAVAESVIRMLADSTRLEAFGSWIDMVFGNGREIAFGFNRRKLQEIRKFLKIANKFEYIQERLERRMGSRRADMISGEELLAMTGHIEELFTLLENNLQTQLYSKVERATLRLATLQEQDKSNLSRLVIGFLAASRAGISVWPSLLFEGRSWLGFEELSSGQQNLLSVGAKVIAYATPGCLVVIDEPEVSLNVIWQQRYVELLQKSLAGATGSHVIIATHSPHMLSSVAHGLASIVTLGRKSDQIVAEVQDGVFEGWGSESVLYNVLQIPSASNYHLTRELSAVLKHIQDGGKDRDFLNGFMTKISRINYKGIEPLALVVKEVQTYMERLN

SEQ ID NO: 84979 - protein, 208 aa, Pseudomonas sp. Root569
MKRFIVPSYGWKLVKELKHYAITTKAKDPWSHGKQATKNFKQEMTRLMLIEQKRRCAYCGCRLFEKRPHRDHIAPKESYREWMFWPTNLVLSCYTCNTDLKKTFDPILVKGSTYRRSEFSFVHPYFDDLDDHITYTSEDVKVLIQERNGSTKGKKTIDVFELSSTERSKQRAKDYLHDEDAADLYGYHRALLENARAAIETRLLKMND

SEQ ID NO: 84980 - protein, 532 aa, Pelomonas sp. Root662; identical to SEQ ID NO: 84966

SEQ ID NO: 84981 - protein, 276 aa, Pelomonas sp. Root662; identical to SEQ ID NO: 84967

SEQ ID NO: 84982 - protein, 723 aa, Altererythrobacter sp. Root672
MRRVVHGTVRTPEILQSDSAVQARTEIAEFLSRPTEELASRRAPINEKLFRNDEVSQALQVLFYGKCAYCEDMKPQEVDVEQHRPPANAASARKSFPHHYSWLAYEWENLLLVCRKCQERKRSLFPLRGGRAPLLAALDQVRAQESPELLDPGYDRPERHLDFTLDGRCHPRTKRGAATIAILELNRPDLLSSRGAVFGHFAVRVRAANSPDTILSLMLDAGGSHDPFAGAMLILRNHYATAVAERIDHFTFPFDDTRGVLARLHQKADLKTLQAAFDELASPREFGVTPPSKAVAQSPGWQGFSPPIRSVTINNFRAIEELTFEMPPRRPDSSAAACLMLLGENATGKSTILEAVTLALVGAEIANTLGLKPKDYIRRLDPRHSGRDLKPARVHIEFYEGPDAELIVPINGEAFEGTPAPSANVLAYGSRRFFLKGRRRRAHSGGIRGLFDPMWVLPHPDLWLRTLEPVYQFGEVARALREVLALPDEAELLLDEETGVTIKTGDLEVSIEQHSDGYRSLFATAVDIMHGMMGAAADLSEARGVVMIDEIETHLHPRWKMRVMSALRKALPQVQFLVTTHDPLCLRGMENGEVQVMIRDDEQQIERLEELPDVRGLRAEQLLTSDFFGLASTADPEVELALAQQADRTSAEGPPPSAVSPLDKLTGAASLGDTPQEQLAAEAMDSYLKSREGGNNDQRKEARREAVSALKAILEARPASDPA

SEQ ID NO: 84983 - protein, 299 aa, Altererythrobacter sp. Root672
MIFVDRATVAVPPSLIAAMTSANGELALARAHYPPPPDKPKKPYKFTAYKGHDVKIAIETLFKNKCAYCETHHGASGPVDIEHFRPKAAVLDDKAHQGYWWLAMDWNNLLYSCIDCNRMRGQVIVTPGMTHEEAEKERQKVRRTNAGKKDAFPVRGARLQPEQITFATEDATLINPTEVDPVNHVTFAPDAYGRCLAVATGTAAAPDILGQTSINVFGLNRSALVDARSMLWKKLRVQSEFIKEDLDDYAEATTSQAKAKALDRARRRWLEIESWAQPDQAYSSMVSIFLAQLKVDLNW

SEQ ID NO: 84984 - protein, 763 aa, Devosia sp. Root685
MFFFDNARRGTTFPRSLDQDALREPLDQIRRYFELDDKRRSQTDVPTVWKRPFDEDVLQALTNLSHGKCAFCEQQGLVLQPYRFRPPAYAEPRTQSDDKDSYLWLAFSWENLFPICQDCRQSTKSMFPVEGIVREAKPSPMLLDPRARLKFNERPILLSPGERSVSSSAFGIRLDGILVGKGPRSRETVERFDLNRRQLVERRAIALQAELDRISMGSPTQPLRDAEFGGSIFLLQKRLADAMGRPPVPAARIGRVWREAAQGPRFREQFAEAVERLKTQDAGIEVAPAERVKAPRTESPLNRVRIRNFKSLEFIEFDMPKATPVATTTDYTEMAKTPCLLILGENSTGKSSILEAIALASIEEATRRALIPAPRKLTLNPDYMGAQGRRHEPRESNVILDLDDGRLEISIEGNSFIDLGSRARPQVFAYGAHRLYGDKKRSDELRHVDTLFKNDRAVSNPEPWLVELHRRDPKDLDEVASALRHIIQIEGEFRDIEVAKEGGKSRCYININRTRADGTTYVLRQRLDAASSGYRAVLALVCDIFQGLMESQQRSGGKTTRARAARESAAIVLVDEIEAHLHPRWKLQIIAGLRAALPQVTFIITSHDPLCVRGMGKGEVMMLNRYQNAAPDQDRTMPEVVERITEFDDIENFTIEQLLTSELFQLYSTDDRRTEETFARVAKLLAEKRDERELSPAERADLERFRSQIADALPYGRNEVTQLVQEAVAEYLANRRAMDSASANLARTRAKAEVADFLREILE

SEQ ID NO: 84985 - protein, 350 aa, Devosia sp. Root685
MIKANRSTVKTPPNLHKGRPSDGKTELQLVTEHMAGPDAATAYDFTRYKEATVKDALEQLFHGKCAYCESFYAGVHPVDVEHYRPKGEVDGVAGHRGYWWLAMNWENLLPSCIDCNRRRNQKAPKPSKDGRPTLLETGDFDRSKSILMGKQSIFPLAGSHRAAGPGDDVNAEDRLLLDPTRDDPDDHLVFHVDRDHLISIVYPKSLDIGGVAPLPDPIADHESLVSKAAASHVSAKGMVSVQVYGLNRLGLVQARTRVMRDLEFLLALSINLLEAAIELEVRNDRRRAERPTASPDLASRLASDIAIDERIATKLRRYANETREKIRELTEPRAPYSRLARAWVERYLAP

SEQ ID NO: 84986 - protein, 727 aa, Paenibacillus sp. Soil724D2
MISIKRIPEPNIFYSQEFIVEKDLMHNFFQEETLEQFKPNYKLYKIIAKQLAKAFHNKCAFCELKLDNPSVWHVERFRPSINAMNLKGQISSTHYWWLRYDWNNLYLICKECNINKGNLFPVKGKRAQRFQPLESEVRLLLDPCVDNPEEFLLCDYNSGLLFSDTDIGRITIDVFNLNRKTLKDKRKQEIDNLIKLWNSLTKNTRLKRNQHLSNEDILFYQKVEEYLLSIFNNDKDEFLLIKRLFILTKLSENPEVLLTFNYGIKWQEIINKRKSISHESIKKKLNTYVDYVLKTEDYDLLKKTKLENYFTKRLIIQKIEICNFKNIGNLIINFPNQNDENAPWLMILGENSTGKTSILKAIALTLMGSINRARLGLDAKKYLKKGTKRGFVKLYLNNRKAPIELFFDETSSLFKGNIEEPPVLLLGYGSTRLFTEEDEDISYSGDLARCENLFNPRVPLINSEKFLLSLKNERFKDAVAAIKRLFTLTDTYRIYKRKKSNQEAIYTTMFGSGVPLNEMSDGYRTITALACDIMMILQKIWKDSTYAQGIVLIDEIDSHLHPRWKMQIVQRLRSVFPRLQFIVTSHEPLTLRGLKEDEIMVLRRNIKGNIYSLADLPYPEGLRVDQLLTSDYFGLNNTIDPEIEIVFNRYYQLLSKDHLSENEKTELEGNRELLNNLKLLGENQREQLVFEAIDKFISKNKEIIKEGEAENLKQETLSRIVQIWEEI

SEQ ID NO: 84987 - protein, 293 aa, Paenibacillus sp. Soil724D2
MIFIDKSRINAPKCLTKPNSIGVKEREDFIRFYSDENNHQKTYKDYKAYQHEEIKDAFNKLFHKKCAYCESNYAKVQPVDVEHYRPKGGVVIDGILVKPGYYWLASDWENLLPSCIDCNRHRTHKVDDDDEEFLLGKANLFPIANESARAKKVGYEPYEIRLLLNPCIDSPEEHLTFLEDGIILGKSFMGMVSIETYGLRRKDLTDAREAHAKNINKAISDVKFGLSFMDKLINTPGAEALVNIYEEKLKIDLNALKSFLDEKQEYVALARQMIDPFIEAYRARLRTPINSVS

SEQ ID NO: 84988 - protein, 478 aa, Rhizobacter sp. Root16D2; identical to SEQ ID NO: 84956

SEQ ID NO: 84989 - protein, 245 aa, Rhizobacter sp. Root16D2; identical to SEQ ID NO: 84957

SEQ ID NO: 84990 - protein, 421 aa, Rhizobium sp. Root73
MYLERIELRNFRGITRLQVDFDRRLTVIVGANGVGKTSILDAVAIGLSQYIARLSKTAMSARRITDDDVKIDSTGTRIQILAEDGSQKYRWTMVKQDQREKLLRPVSSDYRGVSDLVKRIAERAEGSSTFLAGEAPVIFYNQRRAIIEIPQRKRGKISHEVADAFAESLDVGRIDFRKLTYWFQERETEELRKQRRQKSYLDPQLEAVRKAISSATGLKDPYYRIEAPRGLTFTKGRTELHANQLSTGERIYMALAGDLARRLAIINPNIKNPLLGKGIVLIDEVELHLHPAWQRRIISWLTNTFANVQFIITTHSPQVLGEVQSEVIRVLNVRRNEVKLDYIRASLGRDSNYLLAAAFGADERSPVAKGRIDRIDKALADGRLEDVAEEIRQLRHEVEGADPQIDIAEARLARRTRTASE

SEQ ID NO: 84991 - protein, 225 aa, Rhizobium sp. Root73
MKHSNKMLPPPEFVAWLGKECADWKPTYKGLSGTPMTAVRESLLAEQGHVCCYCGRPLKDGDGHIDHFWPQAHFDGVSGPDFTLNYNNFFRSCGPPGNHGVPKQRPSTCGDSKKNWYDNVASILPSDPGCEERFTFGQSGKIGAARSDDQAALNMIGALSLDDDALDLERAAIIAEVEEVLAAGRTAHEELLRVRARTDGKLPGFGHVVARYLELEFGIQPKSYR

SEQ ID NO: 84992 - protein, 534 aa, Flavobacterium sp. Root935
MKVKSVWVSEYKNLKKIDLKFNSNLITLLVGKNGMGKSNLIEILGLLFKNFDLLNTEEEFVYWEYGTERKRFQYIINYECYDNDILIECNETNFILKIKPVGSSEEVPFEILPFKEFITNRKIKYIPKYIIGYYSGENKRIGSILKEHEHQQKDILKNFHRIKKEEPDSGLRRIFFTENHHSQLFLLTLILFRKHLDFTDKIEDLFTNYLDIESIENFSILFNNPAWDYSNIDGKDKGMDFLISNIGDKEEIKNPFWNLKGKIDKLLTRLYNHQIDNSSEPIYYDNEGEDHRKFVKEFLLFNKIKFDIFIEEVVKYYEHPIDFFDALESATIIDVLKSITFKVKKNNIEDLIEFDQLSEGEQQLLTVLGLLLVAGTDECLFLLDEPDTHLNPDWQRDYIELLKKFNTNGYASHIFVATHSPLIVQSSIDSEILLHRKEGNQVVIDTESHEIKNWRIDQVLQSEYFGLSNVRPTSLDGFMKIREEILSKEIVTKEDIEYLKKIDKEEGLLPSGETLNDFKTIRLLRDMVSKIPKE

SEQ ID NO: 84993 - protein, 258 aa, Flavobacterium sp. Root935
MRKINRDNLPPVDIYEIGINKGVSRWRVAEANVIKAYKSNPLIFNNGEYVFPTHPSYTKWKNELINNQGEKCCFCEKAIKNGVIEHFRPKKGWQQNPGDPISRPGYYWLAYRWRNLLLSCTDCNESGQKGNLFPINGIRAFSPTCSINAENCNLINPYEEDPSTFISYYKSDPISLHSRGRETIEVLKLGTRADIKQNRKDIFDIYDLSFQISKLPHAMGSITKKMIDEANDRVRIKVKKKEPFSGMILENLKNGTLV

SEQ ID NO: 84994 - protein, 363 aa, Kitasatospora sp. Root187; identical to SEQ ID NO: 84958

SEQ ID NO: 84995 - protein, 183 aa, Kitasatospora sp. Root187; identical to SEQ ID NO: 84959

SEQ ID NO: 84996 - protein, 752 aa, Bacillus sp. Soil745
MGFEPNIQIGKSITNKELMNIFRCGGQGGMRRSIKTNTLVLISDFTSDIYKNACKKNDIWHFVGMGTDGDQTLEYRQNATLYKSNENKVDLHLFKKVKKDEYQYINRVLLAGEPECEKEDMNDNNSRTILVFPLLEIGSMEDITNFLLDFPKNELINKKIVDSPRDMLTSNSVYPLIELMKENNVDTLISQGGWFLSNKGYFHNCYATKKMGKINDLLESNYIKLSDVFKRQNKFINPYFKDSSVYNAKKSIIPFMDLQVEKTSQIRIKYLKIKDKQLNQTIKFGTYENIRNNDNFYTSLLIGPNGTGKSLLLSFVQKIFTDLYRLNVSKTPNLVKNIDYHLEYILGDNTYQVKQEKGKIVFLRNNSSISLKEMTLPKKVISCAFTLQDRFSILNNQDQQIIDQYEYLGIKNHIKRGYIEGLSSIVASNIMIASLKDRQFLYNLENITTFLGFEPELQINFKLESGVSIEDTLTETVLVKKQQGLSKKLRDSVSVKDVLDFVSRIKIESNSLTIDEALFYLGKDSLSINFNINNAEKYETLYEDFQFVWHLIDLKLFGSPSILLKKHSGWLPLEKASSGEFQYLSTMINILSKIEPNSIIIMDEPETSLHPTWQYRYMSQLQSIFKDFPTCHFIIATHSHFMVSDLKQDYSSIVTLTRDEEDKEVKVNFLGEMTFGRSVEDILYDVFDLPTTRNHYLANDLDDILLAISLDKIDEKIKKKVGKIKTVQKYLKKSDPLRELIDKISKKVDKNV

SEQ ID NO: 84997 - protein, 445 aa, Bacillus sp. Soil745
MYKQPIKYKLSDYKNIILSKHDWEHDRSSNLRRKIRNHLNSEFEGKCFYCQTKLDQGNAAFEIDHIVHKSKYIWFTYRPENLTLSCRLCNTSKSKKETLNSTLQTTKFKFIDYPQNSCDFSIIHAYIDNYDDHIKLEEDLFYKAKDIKGAKTIEICSLHRLKLAEDKAKALLIKKQERKQASIGLRQSFSKSFDSGTKEQIENIINETLKTLSDETDYLTRLISVTNNTEISDLGKILEKLEVNLINQRDINRLNYLLKYFDLLKVHIDLLYAIEDSKSIKKSIINYLRDTGVTGYDLSTPFLFTRDTFQTIKLASNNDLKIDRRVRTKFIDLINIAPDSEIDFCRLDYFFKHAPILLNISRTIKKILSNNSFMLSYGELSPTLITETKNDLHLLGNKVSHNPQLHSLSKLDIIHKNIHKYDVDSINNLYIVLNKSVKLLDSCKP

SEQ ID NO: 84998 - protein, 429 aa, Acinetobacter pittii
MIFNNILKEDVGGLILTDSDVNNKVEINREVGVNDYCEFSCNLKYGRESRIEGSLVGKLKGSTSKKRNKYDDYKLYGTIWREINGVQEVNLPLFSFYGVNRLTLDKKKAYDKNFKFIDKFDAYNKNLNSSSSFNDFILWLIRNIKQIRGYNDNRNLYKQIMLLKEMSLEKDDPLFQILIEKEKEYNNFFATDYKRENSYFNITIIEDVFKRIYQDFVKIELDMSTGKDEIFLEFINYKVNINQLSDGQRVYLGLLGDIAYKMILLNPKLPDPLKGHGIILIDEIELHLHPKWQQQSVLLLQEIFPNIQFIITTHSPHVLSTVDKSSIRILTEEGLRSVPYQPKGIMSSFVLEMLMDTNAVPDIKEAQDLELINIMIENNEYTTDKFIFLMKQLVNHFGENHPEIIKINSRIKFKELKNNIKIKMELNKK

SEQ ID NO: 84999 - protein, 211 aa, Acinetobacter pittii
MRYLIRNDEPLCLASMQSKYSSWSEVLPSEKSELWISLEQMQQQFCAFCEREMEDDKKHIEHFIARSRNNSLTFIWSNLFGSCDSTENCGRYKDSKVKDYNENNLIKPDQDDPLSFFIFLEDGLIAAKKGLSQIDELKANETIRVFGLNSTLLKASRRIIFMGYKDIAKAYYELLNEFDSNDTETIAEIIDEYKQNLEGQPFFSALFQLIF

SEQ ID NO: 85000 - protein, 427 aa, Acinetobacter baumannii
MKFKKILLNDWRQFQNIDIDFHPNVTIITGANGSGKSTILKLLSKHFGWYQPFLGTPILSKEQGVFYYKTVFRPLNKEYQTSHYGHNIHILGNIFYSNDASSDIFIHEQIYSDAQFDLQFGGNIPVVKGVHISSHRPIPKYERLQNIPTNPMDASQAFNSYFQETVNLFNNNYTQHTPIYRMKEAIVSMAAFGPGNQFVQKNEKIEKQFSDFKDILKQILPADLGFKDLSVRIPDLVLETETGDFLLDASSGGIMSIIDLAWQIFLYSHDKDEFVVTIDEPENHLHPSMQRSLLNDFVKAFPKAQFIVVTHSPFIVSSIRESNVYALKHEKNNVSDQQSGWAKKVVSYKLDLNQKAATASEILRDVLGVPVTLPKWADDELQKICSTFTVQDITTDGLSRLRAELNNAGLGEFYPEALSNILGESGL

SEQ ID NO: 85001 - protein, 222 aa, Acinetobacter baumannii; identical to SEQ ID NO: 81757

SEQ ID NO: 85002 - protein, 479 aa, Acinetobacter pittii; identical to SEQ ID NO: 81176

SEQ ID NO: 85003 - protein, 223 aa, Acinetobacter pittii; identical to SEQ ID NO: 81177

SEQ ID NO: 85004 - protein, 528 aa, Acinetobacter pittii
MSKDSTRYLVGNAKNGHIPSIFTLSGIGDENNQYKYFNEIIEVLDNTTDYRVYLNDINIFNYRKINDLYMDFHDKLTVIIGENGVGKTSILEGIFRNLSVIFNNILKEDVGGLILTDSDVNNKVEINREVGVNDYCEFSCNLKYGRESRIEGSLVGKLKGSTSKKRNKYDDYKLYGTIWREINGVQEVNLPLFSFYGVNRLTLDKKKAYDKNFKFIDKFDAYNKNLNSSSSFNDFILWLIRNIKQIRGYNDNRNLYKQIMLLKEMSLEKDDPLFQILIEKEKEYNNFFATDYKRENSYFNITIIEDVFKRIYQDFVKIELDMSTGKDEIFLEFINYKVNINQLSDGQRVYLGLLGDIAYKMILLNPKLPDPLKGHGIILIDEIELHLHPKWQQQSVLLLQEIFPNIQFIITTHSPHVLSTVDKSSIRILTEEGLRSVPYQPKGIMSSFVLEMLMDTNAVPDIKEAQDLELINIMIENNEYTTDKFILLMKQLVNHFGENHPEIIKINSRIKFKELKNNIKIKMELNKK

SEQ ID NO: 85005 - protein, 211 aa, Acinetobacter pittii; identical to SEQ ID NO: 84999

SEQ ID NO: 85006 - protein, 514 aa, Acinetobacter baumannii; identical to SEQ ID NO: 82756

SEQ ID NO: 85007 - protein, 213 aa, Acinetobacter baumannii; identical to SEQ ID NO: 82749

SEQ ID NO: 85008 - protein, 359 aa, Acinetobacter pittii
MHWNSNIYEKKYIYRGGKIKVNSQKDYLKNKFDQLGASLINFFLRSDRTKDKISILLEAMNLDEKINMYFSFPWPFSPSEIINTPNPKSISDSLSSIRFFKDKGERVTLSQDEEKALTENLKLVLNHYQFKEHHRRENFELELNLLNRSKDENIELLNSLSSLANYDLIELIDIKFSKNNKSFYLTDSSSGELSLIFNLLSIAGEIENNSLILIDEPEISLHPEWQSNFLPLLSKMFSNYQGCHFIIATHSPQILSSTNDKNVYIINLEYSNKLIRSEEISKMSADYQLAYVFKEPGYKNEYLTRIALTTFTNVNKKKIFSEDDINSLELLLENMSHLDKSDPLHQLILSLKEMRDLYV

SEQ ID NO: 85009 - protein, 223 aa, Acinetobacter pittii; identical to SEQ ID NO: 81797

SEQ ID NO: 85010 - protein, 479 aa, Acinetobacter pittii; identical to SEQ ID NO: 81794

SEQ ID NO: 85011 - protein, 223 aa, Acinetobacter pittii; identical to SEQ ID NO: 81177

SEQ ID NO: 85012 - protein, 514 aa, Acinetobacter baumannii; identical to SEQ ID NO: 82756

SEQ ID NO: 85013 - protein, 213 aa, Acinetobacter baumannii; identical to SEQ ID NO: 82749

SEQ ID NO: 85014 - protein, 447 aa, Acinetobacter baumannii; identical to SEQ ID NO: 82924

SEQ ID NO: 85015 - protein, 283 aa, Acinetobacter baumannii; identical to SEQ ID NO: 82925

SEQ ID NO: 85016 - protein, 514 aa, Acinetobacter baumannii; identical to SEQ ID NO: 82756

SEQ ID NO: 85017 - protein, 213 aa, Acinetobacter baumannii; identical to SEQ ID NO: 82749

SEQ ID NO: 85018 - protein, 452 aa, Acinetobacter baumannii
ISNYKIITNLKINFDKELTIIIGNNGVGKTSILNAIRKHIMWIAASIRKDNASGGTISPDEINNKSSDNNNGAYIDCAFNIGSKNTVRGRIARVKDTSTIPLKSELTNYREIGQKIRDLNEYRDTNFPLFAFYGIDRLSSKKNLSSDLVFNKVDGYEESLNKVSNFNIFLEWLIQILKMSEGILSEQQEYLLHDLKALELGGANNSSSPLHPMYLKLKKSFEDQTSQQFNHNTNKLLEIINSVYRQIYQDFIRLELVNNDDGKDKVRMVLKDDSLFLHQLSDGQRVFLGMIGDIARRLILLNDSSDNPLMGQGIIIIDEVELHLHPKWQQKIIGVLRKCFPNIQFIVSTHSPQILGEVESKHLRILTLQDTREIKVTIPEQSYGLTSSEIVEELMGGNGRNQDIKKKIDHIFKLIDQENLVEAENKIEELQSELNGEIPELIEAKSLILMMK

SEQ ID NO: 85019 - protein, 213 aa, Acinetobacter baumannii; identical to SEQ ID NO: 82749

SEQ ID NO: 85020 - protein, 427 aa, Acinetobacter baumannii; identical to SEQ ID NO: 81756

SEQ ID NO: 85021 - protein, 207 aa, Acinetobacter baumannii
MIKIIKKQKPAVLIKNASKWKSQLLDDIKAEKKSTKYLLTRYSHPEIKETLIEETHGKCAYCESKLLHIHHGDIEHIFPKALDQSKRYEWNNLTLSCEICNQNKSNHDPNLNHILNPYIDNPESSLIFFGTFAHGMDNKGEATRFLLELNRTALVERRQERLDKIRLIVKELNNTGLPIVARKAIYQDLIENEGACKLFCVSSIFYK

SEQ ID NO: 85022 - protein, 479 aa, Acinetobacter pittii; identical to SEQ ID NO: 81176

SEQ ID NO: 85023 - protein, 223 aa, Acinetobacter pittii; identical to SEQ ID NO: 81177

SEQ ID NO: 85024 - protein, 514 aa, Acinetobacter baumannii; identical to SEQ ID NO: 82756

SEQ ID NO: 85025 - protein, 213 aa, Acinetobacter baumannii; identical to SEQ ID NO: 82749

SEQ ID NO: 85026 - protein, 429 aa, Acinetobacter pittii; identical to SEQ ID NO: 84998

SEQ ID NO: 85027 - protein, 211 aa, Acinetobacter pittii; identical to SEQ ID NO: 84999

SEQ ID NO: 85028 - protein, 514 aa, Acinetobacter baumannii; identical to SEQ ID NO: 82756

SEQ ID NO: 85029 - protein, 213 aa, Acinetobacter baumannii; identical to SEQ ID NO: 82749

SEQ ID NO: 85030 - protein, 437 aa, Bordetella sp. N
MKLESLSLAHCGGFEQLDIAFEPDVTLIAGVNGVGKSTVLHALAVLLSRAMPEFTPSRSAPLYFTDDDIHRDKGSLEVSARIQIDGQIINAGVQRLRAADDKGDRFMLLRQAKAATDDTDFAHALSTRTLTGELEAGIKETRAALAILKNSSHPPLAVYFSPKRQLPGQPRSLPEAKPFDPSIAYSRALHDREVELREFMHWFRTQEKLGAADEPRRFKVLDALRAVVVELLPEFGNLRIQEQPRLGFVVDKRGQPFYLHQLSDGERGLLALVFDLTRRLAIANPESDNPIAEGVGLVFIDEIELHLHPKWQRDVLQRLRDIFKACQFVVTTHSPLVLGEVPARCVRFLEFVNGKVGVTVPAEAYGMDANRILQEFMGAPVRNRQVDGELKALFELIDQECFNAARAAIAALERKLGEDEPELTRASSLIRFLEGAE

SEQ ID NO: 85031 - protein, 209 aa, Bordetella sp. N
MRTIQKGPEPATLTQHRQQPHADYDNYADKATLRQALVAEQRGLCCYCQSRIRATPKGMKIEHWQCQASYPGRQLDFGNLHGACLGGHGRPEREQHCDTRKGNDGLCFSVCDPPHPIEHKIRFLGDGTIKADDAAIEEALNAVLNLNLPRLVSNRKAVLAAFQQRLQDGRRVDPARELLKWDGSEPGDLPEFAQVVVYWLRKKQARAAV

SEQ ID NO: 85032 - protein, 514 aa, Acinetobacter baumannii; identical to SEQ ID NO: 82756

SEQ ID NO: 85033 - protein, 213 aa, Acinetobacter baumannii; identical to SEQ ID NO: 82749

SEQ ID NO: 85034 - protein, 514 aa, Acinetobacter baumannii; identical to SEQ ID NO: 82756

SEQ ID NO: 85035 - protein, 213 aa, Acinetobacter baumannii; identical to SEQ ID NO: 82749

SEQ ID NO: 85036 - protein, 413 aa, Fusobacterium nucleatum subsp. polymorphum; identical to SEQ ID NO: 82846

SEQ ID NO: 85037 - protein, 194 aa, Fusobacterium nucleatum subsp. polymorphum; identical to SEQ ID NO: 82847

SEQ ID NO: 85038 - protein, 451 aa, Pseudomonas veronii
MQNYRCFGEFEIDFDPHLTILIASNGGGKTTILDAARVALWPFVKGFDLGSQTGKSATIQIDDVRLAHLASGNMEPQIASVIEAWGPWGPDELENNWLQQRTSLKKSTNTLGDTGSKALTGYSKSLQEKVRRDEPVVLPLITYLGTSRLWFEGRFTSAAAQTTLDKTEYSRTSGYLNCLSYSSSFKTFTAWYGWIYRSYREAQVIALERNAELSDLGIRFGQIIRSVKEAIDRLIQGPTGWHSLEYSESHQQQLIMHHPEQGILPVEMLSDGLRNAIAMVADLAFRACKLNPHLGDQAPSQTPGIALIDEVDMFLHPHWQQTILGSLRAAFPAMQFIVTTHSPQVLSTVRRENIRVIGKDVHGNLIASPPLAMTYGEPSSSVLHSVMQVDPQPPVIEKPELLQLTEWVDKGRYDEQPAVELMERLTAALSEQHPQLQRLQRSIKRQRALKR

SEQ ID NO: 85039 - protein, 190 aa, Pseudomonas veronii
MCCYSEIRPDLIGLGLHIEHVENKSQNPQRTFDYSNLAASSLDSETDLHTFKGQASEVFGGHALGKSSAVDINRFVSCHQSDCSRFFAYLSDGRIVAADGLSAQEKDRAKYTIDLLNLNSPFLQELRYQWWSELEALFNEHIDQDMSLHCLAGIDLAPRGTQLSPFFSITRNFFGNIAEEVLEQEAPDLK

SEQ ID NO: 85040 - protein, 436 aa, Pseudomonas veronii
MALYLSHLQFSNIRGFKNFSLSFDAGKKHRQWTILIGDNGHGKTTILRAIALGLGDEVTSSELLALLPGQFIRMNKRGTYTSSSEIIVTLRDSESKQLITITTELKLDEHGGVRISKNVNESAFKWSDIFVCGYGSNRGIGGRMHSQYALRNSLLTLFNDRAGLLEPESILRDFALMAAQRKRGTDDPMKEMKSYLWKLWGLNPNHALDISAEQVVIHGPWGGMPFHALGDGYRGTGSWLLDLMGNCVKAGRWNSPQKLAGIVLLDEMDEHLHPKWQRTLVPTLRRLLPNIQFITTTHSPLAIVNTRPGELFATRLHNAVAELIPDSLPSPDGRGANELLLGEWFGLTSTLDSASEKLLKRYRDAFQNGDQKLLEELEPKVRQRIKSFLPSQLDNKAQEDLDKRQRSQVDSLTPEQEKKLVAQAARKRLDTLRKSK

SEQ ID NO: 85041 - protein, 119 aa, Pseudomonas veronii
MLINPFVVDPEPHFQFDAVTGQIRGLTPRGVATIDVCGLDRRSLEIQRATKGAKLNKRYREYLGALDQGNVLAQNNAMRALIDECRSKEPFAAVARYFVKQHLKISYYDLLEMKRKRLI

SEQ ID NO: 85042 - protein, 422 aa, Pseudomonas sp. DSM 28142
MRLDQLHIQNFRCYEDATFDFQPGFNLVVGVNGSGKTSLLQAVASSLYNFSTAMGNRDAQITDQDVRFTIQQYDDRYRFEHLYPLKLNAKGSAFGLDNWEIFKERKDQGQSYNHVVHTTVSTQLDNLDSKGQMDLPIIAFYRANRRWASPNVTAEFAATQKSSRLDAYANWSDAAINLTNFESWFIGKTLERLQRMSRSEAKNSFDDELLWVNLALKSVLPDSKGIEYDLGLRTLLVQLNQNKTLPFSSLSDGQRGLFSLIADIARRMCLINPHMGSKVLEKTNGIIVIDELDIHLHPGWQRSIVSTLKKAFPKIQFIAASHSPQIIGGLMPNEIMLLNDGDASHPRVSYGLDSSRVLEEIMGVSEREPEVETLLSELFSTIEDNNLVEAKAQLKALRKVAPDLPEFAGAQALIRRKEILGK

SEQ ID NO: 85043 - protein, 214 aa, Pseudomonas sp. DSM 28142
MKQIFKGSEPASFTQWKASTNEEWEPTYSTLQNPQKRDLHNSLLLEQGYFCCYCGRDIDATSSHIEHFRPQETFDDLALAYQNLHASCIRETKPGAPLHCGHAKENWFDEAEHISPLEENCEQRFRYLLTGQIQAASTSDSAATKMIEVLALDIAYLNNRRQDAIERVFDPSFIEAANVEDFKTLMAVLRYTPLGEQQAFDHVIARFAEQLIDT

SEQ ID NO: 85044 - protein, 428 aa, Bradyrhizobium pachyrhizi
MADNQFRHLEIGLWRQFDSVSIDFHPRLTVITGANGAGKSTLLSLLAQHFGWSRHYLGVPKATSDGTLSFISGLVTDLLKRFVFRTQQPNSIGYIDYTDTTRCTLIVNDNNSVQYAIAFMGQQAVQGLLIDSHRPNSIYSQVGSVPLQPMTAAQSYNNYNNEMHARYQGGHTGQSPIYRMKESIISMAIFGEGNRTLGGSNKGLLDTFNGFNEVLRNLLPPSLGFERISVRSPEVVLVTRSGEFMLDASSGGIMTLIDVAWRIFMFSRDKSEFVVLMDEPENHLHPSMQRTLMRRLINAFPKAQFIIATHSPFMVSSVRDSNVYVLRYRQDATSANISSDVGLAANRKVFSEPLPLTNKAASAGDVLREVLGVPATMPEWVEEDLDDVINRYRNQKLTSELLDSFRTELTRLGFDEYYPEALANLARQ

SEQ ID NO: 85045 - protein, 217 aa, Bradyrhizobium pachyrhizi
MIRLHKGPEPQVLIDNAAAWEQVLRDHESNNTEPTKTELNRYGHPEIKTALMRETHEKCAYCESIFRHVYPGDVEHIIPKRNGIEYRFQWSNLTIACSTCNTNKGVKEGLVDPYVDDPEGAFQIAGPAMLAEPTDGKAHATEVALQLNRSALVERRAKRLSGLHLMLRVALQQTDQNYRQILFDELRREAAESAEFAAMSRWYVNDLIQKGILPPSN

SEQ ID NO: 85046 - protein, 391 aa, Bradyrhizobium pachyrhizi
MLLGENSVGKSSILQGIALGLIGEREARRLKIDPSDLLHADHDGRWDQLTPDDASVRIDFRLSGRSTEFVLNSMTRRVHGDRRPVGLVLGYGPHRYFDPRRSDRPDADYARVRTLFHPTAALPYPSTWLNALDSHKFNEVAKVLRVVLALNDADEVVRDVDGRICVALDGAPVPVERLSEGYRSIFAMIVDIARELMRDFRYLEDAEAIVLIDEIDTHLHPRWKMRVMGALRRALPRVQFVVTTHDPLCLRGMEDGEVIVLQRDEAGQIISLPDLPSIKGMRADQLLTSDFFGLSSTVDPETELDVARFVEAVGDLPAARVEEANRLVRQLVLGDDALEQVVQEALAQFLSERERPTGALRTDVRAQAVQTILDALRSDGARGTDAETLGS

SEQ ID NO: 85047 - protein, 319 aa, Bradyrhizobium pachyrhizi
MIFVERGDNEPPSLSSYATIAQARAASEYYHHWVTGDPGFGAFTRYREYDVQQALRVLFHGKCAYCEKLIEKGSAEVEHYRPKGAVEGCDHPGYWWLALKWSNLLPTCPGCNKALKHHVVTADMTVAEVETIQATEPRTLLGKATQFPVGAPRLVAVCDDHFAEQPHLIDPTRTDPASELLWRHHADYSVVEAAPRAGGRSILGSETIRCVALNRLDLVQSRTAVLNRLKANRTKIIEDLESDVAVTLDPALIALHLKSALRRIGDMKRSCAPEQPFSAMARAFVDAFEAELEAWMQARLARGVSGADHEQKCEAGPRG

SEQ ID NO: 85048 - protein, 268 aa, Roseovarius atlanticus
MVVRALREVFNIEGSFEVLERDGDRIYVVVSPENTTDGPLLRTPIELVSSGFRAVLAMLCDIMQGLMDKRVNHGFTSLENATALVLIDEVEAHLHPRWKMSIMTGLRKALPGVTFIATSHDPLCLRGMKKGEVMVLERISGDQASTSLPVFTHSLVDLPDNDNWTIEQLLTADFFQMRSTESLEAERRAARMEDRLAQGANPAEDPELRDYLAELSADLPIGHTEVHRLVQQAIADFLRERRQASDEKLRGLREQTRRSILNALRSVG

SEQ ID NO: 85049 - protein, 315 aa, Roseovarius atlanticus
MRRVERSEAIPEDLNEKGAAELEKAIQHFESNPPNPDSFSFQRYKLKSVKDALERIFHGKCAYCETFYASTQPLDVEHFRPKGAVAGETGHRGYWWLAADWDNLLPSCIDCNRKRNQITPKGETSQVRLLEDTVGFSAAVTVGSGKKDSFPIAPTGARARSRTDPIAAEKPLLLNPCEDDPEQHLTYFFDREHPVSFVLAKHLAGDPDFSGDDGLSLKGATSVHVYGLNRLRLVQARTRLLRRLEFLADLAIDLKQLAENLKQKADPEVVRAGQQVDAFGDRTLAELVGMCAEDQPYSAMAKAWMRDFQNRLEAA

SEQ ID NO: 85050 - protein, 727 aa, Lysobacter antibioticus
MKRLATPPSLRRPELLDWAREITAFYSRPAEERQRQRAPFERYEPLFLGEDVYAALDAQFKSKCAYCESGLQMHESRIDPFRPILAAADPRTREESPDHYGWLAFEWRNLMYACNECVSAKRNLFPVDTPRALPMTAWRQTVASENALLIDPCRDDPARHLAFLPDGGLVGKTDKGAASIEVLNLNRPRLVEARRQWIFDLLSTVHQAIDPEAEPVTIGLIDELDNLRHSGAIRSALDAVAKETARRAGLKPIVGFRPSRDIPRLAGHHEVWDRVAYEYLSGADKTPISESLRSAVGEYYELRPRLDPSHVERVRIFNFKGIDTLELEFAHAQASDSNASGVMLLGENAAGKSTVLQALALALMDERLRKGSRVEGADFLPRQRESWEVLTDRPYVEVLLSSGDTRRIEIDSLGRIETYSDAVPSMVLAYGARRFFRSHERIHKNAVNRSLFDPFAKLEDPSPWLVEASRQHFNAVARAMREVLSLHEDDDIFRGPGGHVMVRAHGRVTPVERMSDGYRSLFAMAVDIMRRMVDAWGNLEYAQGIVLIDEIDVHLHPRWKIEVMSALRRAMPKVQFIVTAHDALCLRGMRDGEVHVLYRDQHDRIRPREDLPNIELLRSDQLLTSDFFGLASTARPQTDAALHRYAYLLGKPALDAGEQRERGALAAQLAGLPLGDTPVEQLVGEATQRYLNDRRRRGGAERAAMREDALEEIVALLSAGAAAGAHE

SEQ ID NO: 85051 - protein, 305 aa, Lysobacter antibioticus
MDRKSVRAPASLVDPDGAGRRELEKASKHYLDPKAETFAFKAYKRPDVKEALRELFKKKCAYCESLHEATSSADIEHYRPKAGVDGEPGHRGYWWLAADWDNLLRSCIGCNRVEGHRIAEAGMTAAQLAAQKVQSVGKGNAFPVSAVRAFKPGDDCDREDPLLIDPTRRDPGPHLAWHTDTDLSLLSPSFHGAVADAYGEHTIRIMALNRQALVEARTRHLQRLNDLSFDIAEALDEAAVAAPAQRARPLQRAARKRAQLLAMAGADEEFTAMTRAFVIVAEGELLARYRELLESKAEQADAVGA

SEQ ID NO: 85052 - protein, 458 aa, Salmonella enterica subsp. enterica serovar Infantis
MLNFRCFRQLDITFDEHITILVAPNGAGKTTVLDAIRLALFPFIRGFDASLYVKDKSLAIRTEDVRLVFRPEALNMEMSSPAMITATGEWESGKTATWMLDKRGEQPPHEDKTAAQLTRWGEQLQTLVREEHNLQQVELPLMLYLGTARLWYQERYEAQPTEQRLDNSAFSRLSGYDDCLSATSNYKQFEQWYSWLWLSYREHQITQLESPSAKLKEGVRVQRMKEAIQAIQQAINCLTQEVTGWHDLEYSSSHNQQLVMNHPQHGKIPLSQLSDGLRNAVAMVADIAFRCVKLNPHLRDEAALKTQGIVLIDEVDMFLHPAWQQQIIQSLRSAFPLIQFIVTTHSPQVISTVKRESIRLLEQDENGNGKALMPLGATYGEPSNDVLQSVMGVDPQPPVKEKADLQKLTAWVDQGKYDEPEAQQLMAALQAALGDQHPQLQRLQRSIARQNMLKGKAQ

SEQ ID NO: 85053 - protein, 198 aa, Salmonella enterica subsp. enterica serovar Infantis; identical to SEQ ID NO: 83961

SEQ ID NO: 85054 - protein, 727 aa, Lysobacter antibioticus
MKRLATPPSLRRPELLDWAREITAFYSRPAEERQRQRAPFERYEPLFLGEDVYAALDAQFKSKCAYCESGLQMHESRIDPFRPILAAADPRTREESPDHYGWLAFEWRNLMYACNECVSAKRNLFPVDTPRALPMTAWRQTVASENALLIDPCRDDPARHLAFLPDGRLVGKTDKGAASIEVLNLNRPRLVETRRQWIFDLLSTVHQAIDPEAEPVTIGLIDELDNLRHSGAIRSALDAVAKETARRVGLKPIVGFRPSRDIPRLAGHHEVWDRVAYEYLSGADKTPISESLRSAVGEYYELRPRLDPSHVERVRIFNFKGIDTLELEFAHAQASDSNASGVMLLGENAAGKSTVLQALALALMDERLRKGSRVEGADFLPRQRESWEVLTDRPYVEVLLSSGDTRRIEIDSLGRIETYSDAVPSMVLAYGARRFFRSHERIHKNAVNRSLFDPFAKLEDPSPWLVEASQQHFNAVARAMREVLSLHEDDDIFRGPGGHVMVRAHGRVTPVERMSDGYRSLFAMAVDIMRRMVDAWGNLEYAQGIVLIDEIDVHLHPRWKIEVMSALRRAMPKVQFIVTAHDALCLRGMRDGEVHVLYRDQHDRIRPREDLPNIELLRSDQLLTSDFFGLASTARPQTDAALHRYAYLLGKPALDAGEQRERGALAAQLAGLPLGDTPVEQLVGEATQRYLNDRRRRGGAERAAMREDALEEIVALLSAGAAAGAHE

SEQ ID NO: 85055 - protein, 305 aa, Lysobacter antibioticus
MDRKSVPAPASLVDPDGAGRRELEKASEHYQDPKAETFAFKAYKRPDVKEALRELFKKKCAYCESLHEATSSADIEHYRPKAGVDGEPGHRGYWWLAADWDNLLRSCIGCNRVEGHRVAEAGMTAAQLAAQKVQSVGKGNAFPVQAKRAFQPGDDCNGEDPLLIDPTRRDPAPHLAWHTRNDLSLLSPSFHGAVADAYGEHTIRIMALNRQALVEARTRHLQRLNDLSFDIAEALDEAAVAAPAQRARPLQRVARKRAQLLAMAGADEEFTAMTRAFVVAVEGELLARYRELLESKAEQADAVGA

SEQ ID NO: 85056 - protein, 723 aa, Lysobacter gummosus
MRKVKRIATPRSLRRRELLDWAHEMTGFYARPAKVRAGMRPPFERYDKLFLGEDVVAALGLQFSDKCAYCEILLEPGQALIDPFRPTMSASDPATGEQSADHYAWLAYEWRNLVLACRECVSAKRNHFPLRSPRARPMTAWRETVALEKNLLIDPCRDEPGRHLHFLGNGRLASKDDKGAATIELLGLNRDSLVEARRQRIDHALNWVSSQLYHEVLEDFPDGSAPHWGAALSALDSVFSATMRRIGRRPGAGPRSVDHLGQLLGHAEAWNAAVAEYLSDVMDANRPSPPLPTAPAGRPSSWWPPAPVYVESIVVNDFKAIDDLRLEFPSLGSARGEAASVMLLGENAAGKSSVMQALALALMDEYQRKASRAQGIEFLPRDRENWGVLPVLPRVEVILSSGERRCVHVDALGRYRDEINGRVPMVLGYGARRFFKAHQAKTAGPARSLFDPFAVLEDPSGWLRESTAVYFEPVARAMREILALHGDDRVFRADDGHVMVQAHGRVTPVERMSDGYRALFAMAVDIMRRMVEVWGNLEYAQGIVLIDEIDVHLHPRWKIEVISALRRAMPKVQFVVTAHDALCLRGMRDGEVHVLYRDEHDRIRLREDLPNIELMRTDQLLTSDLFGLLSTARPEVDAHLHRYAYLLGKPELDAGEQRERELLAGHVSALPLGDTPTEQLIGEATERYLRGRRSKPVAERASMREDALREIVALLEAGAEREA

SEQ ID NO: 85057 - protein, 303 aa, Lysobacter gummosus
MRYVDRGRIAPPASLSDPDGAGARERANAEAHYRDPRAGAYKFKAYKGDDVKLALRTLFDGKCAYCESRHESTSPADIEHYRPKAGVVGEAGHRGYWWLAADWTNLLRSCISCNRVEGHRIAAVGMSAAQIAAQATRNAGKGNLFPIAAARAFQPGDDCDGEDPLLIDPTRRDPAAHLRWHVAEDLSLLAPRFDDSGADAYGERTVEIMALNRQALVEARSRHLQRLNESLLDLEEALDEAAQADPADIAGPLRRAARKLASLHAATAPDQEFSAMARAFVEDAQQRLLARYRELIGAIGAAV

SEQ ID NO: 85058 - protein, 520 aa, bacterium L21-Spi-D4
MQLKSLYIKDYKILKDFTIEFPYDFKRFISVFIGANGSGKSTILEAIAQIFSDTILNQTAKFGFELKYSVKLEEIIEKTSTTSEFNTAYIIVTLHAEKGEKIKASVNSGMDDTDFSDKVIDSRKMVVFGQGKEKSVQSYLPDNIIIYYSGLSEIMEDLCKPHEEKLSKAYRKGNTDIDRDFFYYKPEHFGIILLSLLSYEYGDIPEFLQNKAKIHGMQSVQIRLKRPSWHKASIEKFWGAEGEVRKFLDYLNENSATSDDLTKPVSSNLKGNIVIEAWQDEALIITIIGLERLYEIREHLIEERKLFEILNIMLEDGMLEDISFSLLKEDKGNYKSFNVLSEGEQQAIVIKGMTELLSGKNTLFLFDEPDTYLHPSWQRQFIGEIEKEIESFSKIERSTGQSIFPENTFLIATHSPQLLSNAKTELNFVKIIENGVLVEKTPKFYGREISSILYNLMGVEERNETIKKDISKLFTLIEDEEKEEAEKELTRLTEILGETDPDIKNAEIQLNYLKEDEANN

SEQ ID NO: 85059 - protein, 224 aa, bacterium L21-Spi-D4
MKQIIKNNEPRSLIQHRAQRGNYDNLNKDELRTSLITEQGHICCYCMCRIPHKLKPEEIEKNYPDSKIEHVKCQSKNRPLELTYQNLLLSCNGKHGYPRQMQTCDSHKGENDLSFNPAETQRNIENFIKYSANGEIFSDDETINQELNEVLNLNTKDLKDIRELFYKDIQTRIIREGKKRKGKDIQKRFYESEKEQLLTLKDGKFEPYCMIGIYLINKKLSKYN

SEQ ID NO: 85060 - protein, 427 aa, Acinetobacter baumannii; identical to SEQ ID NO: 81756

SEQ ID NO: 85061 - protein, 222 aa, Acinetobacter baumannii; identical to SEQ ID NO: 81757

SEQ ID NO: 85062 - protein, 236 aa, Pseudomonas sp. TTU2014-080ASC
MDASEEALDFSRAREFGSVLRLESKLRACNILRGIGVYLQRMDSGDIVEMHHASSGQLALISSLLFLITNAGESPIVIIDEPENSLHPNWQREYIDHVLTALRYYSPTVIVATHAPLVVTGALADSSALVSVYEIRHGRPQRLPIDGTSSSQSSIEEILWRAFDVVTPANHFVSERLVDEVSRFEKGEIRKEEVLTLIGRMEGGSFDDRQRSFFTAVKGLLDKVEKNQSTRGRSDR

SEQ ID NO: 85063 - protein, 218 aa, Pseudomonas sp. TTU2014-080ASC
MIDRYLPALDEFALTVDEQNAVAAALTTLDPWGWSPGGAQSKAIASVKAKILSYHLQRHGHKCCYCRVNLYGGGAFMTDREHVLPKSIAGYRPWSYTMWNLGIACKRCNMEYKGSNTDFVVDPDDEAQLMESEGYRFIHPNFDLYREHMSRSSQEANESVIVKYTIVPGSLKGEYTYNYFNLRGLEVNSFDRAQGLQASESLGEAAVETRSLAEFFGQ

SEQ ID NO: 85064 - protein, 547 aa, Streptomyces hygroscopicus subsp. limoneus
MQLLQLRLPDYRGLRDFTLDLESAVDQGQAIAVLIGPNGGGKSRILHALAELFGALYRCALGHSGRTDFGYEVHYRLRDRTVEIVQPSAEADPVMWVTDAAGSRDETPRHAWLRHLPDHVFGYQVHGRVPWGSEFERHVHFAEAELARWREQWTESWFAWQDRPENEEGVWSEQLELPITCPLYAPGFLCTPDWLPLVLLSLAAQWADVFGDYLREQARVDGVVSATLHLRAPASVGEELSALPYWGLGGPPRALFAEAAASGRFGPVPEADPLYSAGTPDDGFALTMSSPEDVLAFRNLFDSDLSMFGLLSTLQMASYLTVDMRVRKADGTVVRADQLSSGEQQILTVLGLLRLQRGQESLFLLDEPDAHFHPEWSRRWYSSVQSMLGDGQRSQFIAATHEPLLVSNMLRQQIRVLDRDADGRTTALVPETAPRGQGAGGLLTSDLFRLRSQLDEHTQDLIDTQYRLIPVAEDDPEARQELQEVTDQLDGLGFATWRRDKVLSSFLAELHRRRTELVERARNGTMTGEELETTARVLFDERFSRGV

SEQ ID NO: 85065 - protein, 392 aa, Streptomyces hygroscopicus subsp. limoneus
MRHVDNSGLTAPQKWAERAAKELARLYKEAKDADKELSFREMWREDAIRDRLIALIGEKCWYCETRFVRSPYHVDHYRPKSVVVGEAERRGYWWLAYDPANYRLSCHHCNSGGARYGNQSAGPGKGARFPLLGQRASEGGSLDGELPVLLDPVVAEDAELMGFDGQGYARRRPERPYSKDEVARDLCRVDETIRMLALNSDLLIESRSTLIARVDGLVQLYLASGGHAGAALYARTELDHLTRTTAEWSAAAAAAERLAVLAHDHSGNDAPLEGGAGDDVAERASDGTEPPAATATGHRIDLRTLVAALPPEAFSAGGIALRGRGKRGPARATLLADGSIMCFQRPLATPTSAARMATGDDQVDGWTFWSLTVDGTTRTLSELRDFLIAQNG

SEQ ID NO: 85066 - protein, 465 aa, Salmonella enterica subsp. enterica serovar Fresno str. ST224
MRIDKLSLLNFRCFRQLDITFDEHITILVAPNGAGKTAVLDAIRLALFPFIRGFDASLYVKDKSLAIRTEDVRLVFRPEALNMEMSSPAMITATGEWESGKTATWMLDKRGEQPPHEDKTAAQLTRWGEQLQTLVREEHSLQQVELPLMLYLGTARLWYQERYEAQPTEQRLDNSAFSRLSGYDDCLSATSNYKQFEQWYSWLWLSYREHQITQLESPSAKLKEGVRVQRMKEAIQAIQQAINCLTQEVTGWHDLEYSSSHNQQLVMNHPQHGKIPLSQLSDGLRNAVAMVADIAFRCVKLNPHLRDEAALKTQGIVLIDEVDMFLHPAWQQQIIQSLRSAFPLIQFIVTTHSPQVISTVKRESIRLLEQDENGNGKALMPLGATYGEPSNDVLQSVMGVDPQPPVKEKVDLQKLTAWVDQGKYDNPEAQQLMAALQVALGEKHPQLQRLQRSIARQNLLKGKAQ

SEQ ID NO: 85067 - protein, 198 aa, Salmonella enterica subsp. enterica serovar Fresno str. ST224
MTLLLNEQYHLCCYSEIRADLRGLGYHIEHVENKSQQPVRTFDYQNLAASALDSENGLHLFGINAFGGHSRGKQEAVDMAKFIHCHLPDCSRYFAYLSDGRIVPADELNAQEMERAEYTIDLLNLNSGFLQTERRNHWEELEQLFDEHIEKGWDLQQLLKLELVPSPDHKLHEFFSITRQFFQQEAEQVLQIHAPALI

SEQ ID NO: 85068 - protein, 393 aa, Salmonella enterica
  subsp. enterica serovar Hvittingfoss str. SA20014981
MKIQKIDIKDVGGIKRAIINFDASMNIICGPNGIGKTTILDSVAHSFINTNSYVLKRHAQSTDGQINTVLNDCDNIRESHISLEQFNPKDYSYISGLRELGRKVIYLNISRMFKYVSLSNISKDEERQDHSIYTLLTDGISVADMKNWFAKRCLFFNTPEALSENNKVNLELAKKCFSLLNAEYKFSRVDAKKFDVFVSTPNGEIWYEYLSSGFKSCLSILFGIIKEIELRMPDEECLAQHFDGIVLIDELEMHLHPEWQSKIVSVLRDTFPATQFIVTTHSPHIIQNAEPNQIIALGTDSNGYTYVRELPSNEFGYTGWTLDEVLKDVMGMEDTRSQKLQSMLAAFDQAIDEENKIEAERIYKELDRALHPANVLRKMLSIDLSSVIEEGSK

SEQ ID NO: 85069 - protein, 248 aa, Salmonella enterica; identical to SEQ ID NO: 82637
  subsp. enterica serovar Hvittingfoss str. SA20014981

SEQ ID NO: 85070 - protein, 469 aa, Salmonella enterica
  subsp. enterica serovar Hvittingfoss str. SA20014981
MRIDKLSLLNFRCFRRLDITFDEHITILVAPNGAGKTTVLDAVRLALFPFIRGFDASLYVKDKSLAIRTEDVRLVFRAKALNMEMSSPAMITATGEWESGKTATWMLDKRGEQPPHEDKMAAQLTRWGEELQKLVRDEEHKQPVDLPLMLYLGTARLWYQERYEPQMAEQRLDNSAFSRLSGYDDCLSATSNYKQFEQWYSWLWRSHLEFQYKLIEAGRQNKSVDLVEGLRDDSMREAIQAIQQAINCLTQEVTGWRDLEYSSSHNQQLVMSHPQHGKIPLSQLSDGLRNAVAMVADIAFRCVKLNPHLRDEAALKIQGIVLIDEVDMFLHPAWQQQIIQSLRSAFPQIQFIVTTHSPQVLSTVKRESIRLLEQDENGNGKALMPLGATYGEPSNDVLQSVMGVDPQPPVKEKADLQKLTAWVDQGKYDEPETQQLMAALQVALGDQHPQLQRLQRSIARQNLLKGKAQ

SEQ ID NO: 85071 - protein, 198 aa, Salmonella enterica; identical to SEQ ID NO: 81445
  subsp. enterica serovar Hvittingfoss str. SA20014981

SEQ ID NO: 85072 - protein, 465 aa, Salmonella enterica
  subsp. salamae serovar 56:z10:e,n,x str. 1369-73
MRIDKLSLLNFRCFKQLDITFDEHITILVAPNGAGKTTVLDAVRLALFPFIRGFDASLYVKDKSLAIRTEDVRLVFRTEALNMEMSSPAMITATGEWESGKTATWMLDKRGEQPPHEDKTAAQLTRWGEQLQTLVREEHSLQQVELPLMLYLGTARLWYQERYEAQPTEQRLDNSAFSRLSGYDDCLSATSNYKQFEQWYSWLWLSYREHQITQLESPSAKLKEGVRVQRMKEAIQAIQQAINCLTQEVTGWHDLEYSSSHNQQLVMNHPQHGKIPLSQLSDGLRNTVAMVADIAFRCVKLNPYLRGDAALKTQGIVLIDEVDMFLHPAWQQQIIQSLRSAFPLIQFIVTTHSPQVISTVKRESIRLLEQDENGNGKALMPLGATYGEPSNDVLQSVMGVDPQPPVKERDDLQKLTAWVDQGKYDNPEAQQLMAALQVALGEKHPQLQRLQRSIARQKLLKGKAQ

SEQ ID NO: 85073 - protein, 198 aa, Salmonella enterica
  subsp. salamae serovar 56:z10:e,n,x str. 1369-73
MMLLLNEQYHLCCYSEIRADLRGLGYHIEHVENKSQQPGRTFDYQNLAASALDSENGLPQLGINAFGGHSRGKQEAVDMAKFIHCHMSDCSRYFAYLSDGRIVPADELNAQEMERAQYTIDLLNLNSGFLQTERRNHWEELEQLFDEHIEKDWDLHQLLQLDLVPSSDHKLHEFFSITRQFFQQEAEQVLHIHAPALI

SEQ ID NO: 85074 - protein, 610 aa, Caulobacter vibrioides
MFVAPAGREDLRKHFAPLPDGILMPTDQRGEATVRHFNLNRPPLVEARRRALDDYFRRLLLARQRPDFDKIMDFAGLDFGGGWFLHLYQLARILGHGGGDRQVLSRQRIAAYFRDRAKRRDFQQRLQNARDELARDPEQIRRAKLRPSLAPAGTARPVRVALRNFKAIEELTLELPETSGRISSEGEPLAPCLIILGENAAGKSSILEAAALAISDEEVRADEAPLASGFMLDPMLMGAEGQSRPRPGSVTVDYDDGLQTKLAFDNNGFQSSFALANVEPRIPVFAYGAYRMFLGHDEASASGVIRSLFEPDYVLVNPEEWLAEIRETPLFEEVIRALRYILGIGQAFDTIKVDEKTKRCMLVIKVERPGQTPIFTRTPLATVSSGFRAVLGMACDVMRNLVARQNRFSATLAKSRAVVLVDEIEAHLHPRWKLKIMQGLRDALPNVTFIVTTHDPLCLRGMDGGEVKVLLRAAKAFCAPDEPPTFVDQLEDLPPIGALTVEQLLTSDLFQLFTTDADTIETGLAGVGDLLAREQARRLEPGDDARLQKVRDQIGKDVAVSLPIGSTEVQRLVQEAVEQYLRERLRRPGGGLMALREETRRAIVDALKAL

SEQ ID NO: 85075 - protein, 344 aa, Caulobacter vibrioides
MRKVDRKTATPPASLTGANRKGPNELKRARAHFAAHPPRDEFTFTAYKGDDVRYTLEALFHGKCAYCEARYDMVGPVDIEHFRPKNADPKGTHDGYWWLAAAWSNLLPSCIDCNRKRWHWTPTQLASLTELLKEQKQRPAAYVKTGKESSFPITGPRVTAEPPTAQAEALLTAELALLLDPCVDTPADHIVFHIDRADPLGVIYPLGQAGAVPHIPPTVDQLPVVEAAARAANVSPRGAVSIQTFGLNRLGLVQERTKVLRQLEFLGGTIEELSLTADELEGLVLAGQNAVVRDRAVQRLRAIVRRVLAQIRAMAQPQAPFSAMVSAWIDAFTSASSASLPVAR

SEQ ID NO: 85076 - protein, 471 aa, Caulobacter vibrioides
MSDFRLLSMAVKLNGEDTELRLSDGARPSAVTVIIGRNGAGKSTLLRETTNALRALAWASTRYLRINRPRLLQGMTVRTKEGSAALPSWVSKADVMHAATSRNLLPANVIALSFTPFDKFPLGDDVERIRRMERLATPPWRPSEDAYFENDPFYIYVGPKGDARTSAQSRLFDVITRLAWFGMDPRIASSLEAIGFTPEIKIAYRLNRSLLAQLRRNPDPKIEYDPTIEDNRVYKFFNSNLSNKFPELRHDEVFDHDVARHEEDLISPSDIEQFLSDRILSISSINLTDIRTEEKRNLMELSSGELNIITGFLNLAMYIKDGSLVLIDEPENSLHPAWQLRYTSMLQAFIERHPGCHYIIATHSPLILSGAARNGATTIRLDAKGAETLDEDQATESPDATLVTAFEVVTSHNNYLRQLVLKALTMARQGLLNTPEAHELSIALKTLLPQIPKNDEIRDVVAALIVQMAKQ

SEQ ID NO: 85077 - protein, 210 aa, Caulobacter vibrioides
MVTQELRCAYCNSFFATGVNMSWDIDHILCRAKYPDLFLEPDNFVLSCKECNGAKSDKDVLHTHHPRPLKHVPQPTDAYDIPHARKTSWTTHVSHVAYLVYMGKSTQGWNLIDVCDLNRKAEIAAGQPVGAVKVAIEEKLFASWDIPLPQGSTVTQEVAAYGLKREKEIELQAAPIIAELNKKTAAAEAKARRATEKLARETGAQPPPPT

SEQ ID NO: 85078 - protein, 425 aa, Pseudomonas aeruginosa
MLKSLLLEGVGPAKTFGPVDFAPRLNFITGDNGLGKSFLLDIAWWSLTRTWARGVPAVPPTSSKKSSITYAFSKSTSGDFAETSVFKRSDQLWPTKQGRPAIPGVVIYAGVDGSFSAWDPARNYWQSDDAAERPRAFNFTPEQVWNGLEGPNGIRYCNGLIHDWVLWQKGRDEAFSDLIKVLAALSPSGVEHLEPGQPVRLGLDVKDYPSLRMSYGQDVALVHASAGMRRIAALAYLLVWTWREHRFACEQTGRRQAKEIVFLIDEIECHLHPQWQRRVVPALLQVMQALTGKKVPVQLIVATHSPLVLASVEPAFDEAKDAVFNISLHDGQAEVSKEPWAKQGDVVNWLVSDSFGLHQARSVEAEQAIEAAEAWMRGDKTDLPQNLHSQGAIHKELMRVLPGHDEFWPRWLVETRQLPRSSGDA

SEQ ID NO: 85079 - protein, 200 aa, Pseudomonas aeruginosa
MIEIDQTLMAEPAKFDDKCRRKGAQWLAAHPKASRKPGKTRPKDFWTPFKPALADAFRELCAYGAMYEPVGTVDHFLPVDADEALAYEWSNYRFASGWINSSKNKAVTILDPLDVREGWFEVLLPSLQLVVVPERVPEPMRELAMKTLERLHLQHDERVLRQRRGWYRKYQEGKLTLEGLREVAPLIARAVEKQEAAVLP

SEQ ID NO: 85080 - protein, 262 aa, Pseudomonas aeruginosa
MSIEGEFEVIERDFDNRRCLIVTAAAGNSRHLTPLSLASSGYRSMLSMICDILQGLMSGRLNVIIESLESAQAVVLIDEIEAHLHPRWKIQIMHALRRALPKITFIATTHDPLCLRGMHDGEVVVMQRIVSDAASSDLPVMVERITHLPNVSQLTIEQLLTSDFFSLSSTDQPETERELALFADLLAAREAGQRLTAAQDRAWKAFERDVRDALPVGSTEVQRLVQEAMVEYLKERRQASSRTLGNLRSAAKTRIVNILRTL

SEQ ID NO: 85081 - protein, 337 aa, Pseudomonas aeruginosa
MRAVTRKEVKTPDAMGGEDSPAGRELNKLREYFAQPAGKAPAFSVYKSDSVKKQLDALFHGKCAYCESFYASTAPVDVEHYRPKGAVYEDANHPGYWWLAMDWDNLLPSCIDCNRKRKQKVPKLSAQLLTLQEEQQGFSHSMLISSGKKDSFPVLGTRAMTEGTAITDEYALLLDPCRDDPQEHLRFHIDRSNLISLVVPVSHPGAGLPVQAGTGADEVTRSVIEQALEAGLSLKGALSIHVYGLNRLGLVQARTRILRQLEFLELLAIEIASMADALEPDPANPNEHTDRDMSIVQRLYLLQDHILQEMKRMARPEAPYSVMVQTWIEGFKARLLS

SEQ ID NO: 85082 - protein, 465 aa, Salmonella enterica subsp. enterica serovar Typhimurium; identical to SEQ ID NO: 83960

SEQ ID NO: 85083 - protein, 241 aa, Salmonella enterica subsp. enterica serovar Typhimurium
MRHVIKTRRGTDALLTAHEQPPQNSDQSTRRWQHFGRENKAALMTLLLNEQYHLCCYSEIRADLRGLGYHIEHVENKSQQPGRTFDYQNLAASALDSENGLHLFGINAFGGHARGKQEAVDMAKFIHCHLPDCSRYFAYLSDGRIVPADELNAQEMERAEYTIDLLNLNSGFLQTERRNHWEELEQLFEEHIEKGWDLQQLLQLELVPSLDHKLHEFFSITRQFFQQEAEQVLQIHAPALI

SEQ ID NO: 85084 - protein, 413 aa, Fusobacterium nucleatum subsp. polymorphum; identical to SEQ ID NO: 82846

SEQ ID NO: 85085 - protein, 194 aa, Fusobacterium nucleatum subsp. polymorphum; identical to SEQ ID NO: 82847

SEQ ID NO: 85086 - protein, 417 aa, Mastigocoleus testarum BC008
MKIKHIKMHSFRGVSDMTLEFQECEPNVFIGINGVGKSSILDCIAILLSRYTSPVQYPSTSGRLFREQDIREGSQETCNEITVMTTEGDVTWSLGKLQKKRSKNSSTDLTQLRKLIESTQDSLKADPNFNLTVVVHYSVNRAVVDIPLRVRKKHSVDRVTAYEESLHGTKINFNNFFQWFRKWEDLENEERRDDANYTNHQLEVVRQAIYSLIPGLSDLRIRRSPLRMTVKKQERELNVSQLSDGEKCLLAMVGDLARRLAIANPGLEEPLEGNGIILIDEVELHLHPQWQREIIPALSKTFPNCQFIVTTHSPQVISHVKPEGIHIIENTAEGIIALKPENSFGRDTNCILEDLMEVPERPQEIKNSLQQLFKFIDEGDLEGAKQLRRDLALQIGEDEPEFVRADVLIRRKEILNK

SEQ ID NO: 85087 - protein, 214 aa, Mastigocoleus testarum BC008
MKYIHKNPEPGSLTGYNDRLRNKTPNWKSFNKSVKTDVYHALLKEQGHICCYCGIRIFRKNCHIEHYRPKSQYKHLTFSYTNLIVSCQGEDEQRPTKPVHCGHKKGAWFDEDLMISPLDPNCPDYFKYTGSGEILAADNPDKLDAAETTIAKLALNINKLTKMRRKAIDAALQIVEELDDGEIHTLAQAYQEMDSEGQYTPFWAAVAYTFKQYF

SEQ ID NO: 85088 - protein, 417 aa, Mastigocoleus testarum BC008; identical to SEQ ID NO: 85086

SEQ ID NO: 85089 - protein, 214 aa, Mastigocoleus testarum BC008; identical to SEQ ID NO: 85087

SEQ ID NO: 85090 - protein, 465 aa, Salmonella enterica subsp. enterica; identical to SEQ ID NO: 85066

SEQ ID NO: 85091 - protein, 198 aa, Salmonella enterica subsp. enterica
MTLLLNEQYHLCCYSEIRADLRGLGYHIEHVENKSQQPVRTFDYQNLAASALDSENGLHLFGINAFGGHSRGKQEAVDMAKFIHCHLPDCSRYFAYLSDGRIVPADELNAQEMERAEYTIDLLNLNSGFLQTERRNHWEELEQLFDEHIEKGWDLQQLLQLELVPSPDHKLHEFFSITRQFFQQEAEQVLQIHAPALI

SEQ ID NO: 85092 - protein, 520 aa, Bacillus enclensis
MILKLEGYDNPFRVEVEIDYINRIIHVLDLWDPNTTSLINGIDLNENQQRILNYMNIDKIGPPDYWKWYIYSPGKINSVYKFNDGVFLEVHNHLFKDFLERIKNDLSSSKYFIQKLEINNFRNFKNLQIDLGSKKKKHLILTGKNGSGKTSFLLELKNYLLSFEDGNFRHLKEWKETIVNLKERINNSNVENSERERITSNIKSIKESMRRYGEINPTFSEVYELQSSYDNGNFIIAYFDSKRTTNMIVPDSISKIKLHLKYRADDRPSNIFIQYLVNMKAEQAFANQSNDKALVKKIDKWFNNLEIAFRELFESEDFKLEFDFKELNFFIKEKNKTKYSFQHLSDGYASVINIVSDILMRMENKNNESGIYNLEGIVLIDEIETHLHVSLQKKIFPFLCALFPRIQFIVTTHSPFVLSSAENSVVYDLEHKLRIEDLSPYSYEGIVEAYFGIDKYSVAVKKKLERYRELIVGIENITEEDIDELFQLKQYLKSVPDKFAQEVKLEFYRLEQLRKEKMRS

SEQ ID NO: 85093 - protein, 235 aa, Bacillus enclensis
MIYFEKSLPAPPSLEIEKHKNNGTYLKADVISQLKQDFKNKCYICENKALISINVEHLVSHREDIDKKFSWENLFLSCSHCNNIKLHHYDNILNCTMVEDDIENSIKLKVDPYPKSSVEVTALKNDERVEKTVELLNKVYNGTTILKTEEAETIKKNLLKEILAFQSLLFEYDELEHDHEDDLEEINNIKKQISRHLRNSSAYTGFKRWIIKANESLTIEFGSLFLEQESDTKTI

SEQ ID NO: 85094 - protein, 507 aa, Klebsiella pneumoniae; identical to SEQ ID NO: 83904

SEQ ID NO: 85095 - protein, 224 aa, Klebsiella pneumoniae
MINRPIVYSATAQEFVDTFNGDASHWDGTCAVRKAFRKEVRDYYRDEQEFTCPYCGRLREEFHGGQWDIDHIIPKSSYPQYLYTPRNLAVTCKDCNTHKSKKNPLLITLDSGAPYPENTVSYKIIHPHFDSYNEHIMLRKDKKGRSYHEVITDKGRETFLMCNLIRFSEVICGTSEFIPELGTEIGITNSFSESVQVWLADYDDLNPVDAEIALQALMQKISLR

SEQ ID NO: 85096 - protein, 507 aa, Klebsiella pneumoniae; identical to SEQ ID NO: 83904

SEQ ID NO: 85097 - protein, 224 aa, Klebsiella pneumoniae; identical to SEQ ID NO: 85095

SEQ ID NO: 85098 - protein, 507 aa, Klebsiella pneumoniae; identical to SEQ ID NO: 83904

SEQ ID NO: 85099 - protein, 224 aa, Klebsiella pneumoniae; identical to SEQ ID NO: 85095

SEQ ID NO: 85100 - protein, 507 aa, Klebsiella pneumoniae; identical to SEQ ID NO: 83904

SEQ ID NO: 85101 - protein, 224 aa, Klebsiella pneumoniae; identical to SEQ ID NO: 85095

SEQ ID NO: 85102 - protein, 507 aa, Klebsiella pneumoniae; identical to SEQ ID NO: 83904

SEQ ID NO: 85103 - protein, 224 aa, Klebsiella pneumoniae; identical to SEQ ID NO: 85095

SEQ ID NO: 85104 - protein, 465 aa, Salmonella enterica subsp. enterica serovar Senftenberg; identical to SEQ ID NO: 81578

SEQ ID NO: 85105 - protein, 241 aa, Salmonella enterica subsp. enterica serovar Senftenberg; identical to SEQ ID NO: 81579

SEQ ID NO: 85106 - protein, 418 aa, Phaeobacter sp. CECT 5382
MYLKSIRLKNIKCFKDVEIDFDLKGGNNRKWTVLLGENGTGKSTILKSIALLMAGSDALVELVRQPDDLLRKEANKGSIVGTIETKDGKVRELKLDFVRGKGVSRFLSGSQETLQPLNEALEHTNRSYPVFAYGAARRLGSEQSFSSRSPQKHPRARSMSSLFDRNAQLNPLEQWAMDLDYRSGGLQMSIVRKVLSDFLPELTFSEIDKDGRSLLFETDDGLVPLEHLSDGYQNVAAWVGDLLYQITEIFDDYKNPLHARGLLIIDEVDLHLHPKWQRTLLEFLEKQLPNMQLIVTTHSVVTAQQTPENSLFYCIRRDKSRPEIVPFEGDPGKLLLNQLIVTEAFGHISDESVEIESHRARYRKLHKKKKKTKKDLAEMEQLSDVIGAVPEDPSEDIVLSDRQRALMQKIVSRQATKQ

SEQ ID NO: 85107 - protein, 279 aa, Phaeobacter sp. CECT 5382
MISLQRSRQQGDVIPSFRGNKPIERLVELMETRRAKLVAGEDPKLKINSKWSKTKKQLLVETNDKCAYCESHTTAVAFGDVEHYRPKSIYWWLAYVYDNYLASCSICNQQFKSNAFEFSGPKMRGPVIRSNTTDARIASLARKFAPDPLDAQAIADFEDAHRLEAPLIPNPYIDSPEDLFSWDVLRGAKQVELIPNPNHPDAADVVDACERLYGLNRPQLKRRRFNQWRNYNFFLKVMLDQGADQETRDDAKAFIDESLLPTSEYAGMIRYFENQRLGN

SEQ ID NO: 85108 - protein, 507 aa, Klebsiella pneumoniae; identical to SEQ ID NO: 83904

SEQ ID NO: 85109 - protein, 224 aa, Klebsiella pneumoniae; identical to SEQ ID NO: 85095

SEQ ID NO: 85110 - protein, 507 aa, Klebsiella pneumoniae; identical to SEQ ID NO: 83904

SEQ ID NO: 85111 - protein, 224 aa, Klebsiella pneumoniae; identical to SEQ ID NO: 85095

SEQ ID NO: 85112 - protein, 507 aa, Klebsiella pneumoniae; identical to SEQ ID NO: 83904

SEQ ID NO: 85113 - protein, 224 aa, Klebsiella pneumoniae; identical to SEQ ID NO: 85095

SEQ ID NO: 85114 - protein, 507 aa, Klebsiella pneumoniae; identical to SEQ ID NO: 83904

SEQ ID NO: 85115 - protein, 224 aa, Klebsiella pneumoniae; identical to SEQ ID NO: 85095

SEQ ID NO: 85116 - protein, 507 aa, Klebsiella pneumoniae; identical to SEQ ID NO: 83904

SEQ ID NO: 85117 - protein, 224 aa, Klebsiella pneumoniae; identical to SEQ ID NO: 85095

SEQ ID NO: 85118 - protein, 379 aa, Pediococcus acidilactici
MGNITNISLHFNKNVNVICGTNGIGKTTILKSILALFELSDNSLKKKYGTDRGAIIGKSSEGVTREMEITSVLPEEANKNYRSNENFDLNITSVYYVPDSRDLQYKNLESLRRYPSRELTTFNRDNFLKNDIADNLKNWLINQFISDGMNGKGTELKENELFNISQIKRAFSVIDKKIKYKRIDLHKYEILLNDHGNEVFLEFESTGFKNVLFIIVGIIAEIEERFRDIRINDFDGIILIDEIDAHLHPTWQSKIIDILKEMFPKTQFIITTHSPAVLQSLNKEEIIPLYLEDNEVTLKALNLSGYGLKGWTLEEILTDVMGVGELKNKILRESLDLFSSALDQKDIEQAKVAYERLDQMLHPQSTLRQVLDIQKAGLF

SEQ ID NO: 85119 - protein, 168 aa, Pediococcus acidilactici
MIFIKRTAPPKQLTDEVVKKLTNLYKEEQSNVWSKKYIKDALLNMSHNKCCYCEAPLDQQGLYMQVEHFHPKSSYPEEVVDWDNLLPVCPTCNSKKRELDTVKVSFINPSKENPKNLFILNNYRFEPKEDNEKANRTIKVLGLNSIDKLMIARFRVGSTLLERIKKIV

SEQ ID NO: 85120 - protein, 288 aa, Sinorhizobium sp. GL2
MVPFDTDEDKSFADALDDDQSNAIFVAGYSATRFVEPGKFVASSALKSRSLRYQRVAGLFEDNVTLSPMQSWLPQLHARSAEAHARAINLINSVLPSNIRFSGEHDDRDEQYVFEFNGLRTPFGSLSDGYKAFVGWIGDLVGRLAEVAKPRQPFTDIPGLVLVDEIDLHLHPEWQRTVVPELAKAFPNIQFVLTSHSPLVAASLRKENIFVTGSREDGTASIDQFQEKVYGRSSEQLLLSSYFGLTNTRPDTFQDESRELFQRAARGDASAALDYLKKLSGTVPETGE

SEQ ID NO: 85121 - protein, 286 aa, Sinorhizobium sp. GL2
MIRYASTKASIEAAIGNLNATWLDRAKQRTAHFVKANAYVEGGVGWSEIKPAYMALQHNKCIFCEAPEYAPERGTYNLDVEHFRPKNTVQLWPRAGAARQYQFSTGGAGGAYYWLALDPTNYAVSCKECNSRYKSNFFPVAAARGNTGNSPQQLQSELPFLCYPLGDWDEDPESLITFDGTIAIPASDDPLKLRRAEVIIDFFELNDRLALQRERAQFIILFGRFLEEVLIGMGGNQAELIVAKMELPSAPHASCLRSFKRAWLANPVRGKKILNDCIALYFDSIG

SEQ ID NO: 85122 - protein, 405 aa, Sinorhizobium sp. GW3
MANFSRLTIDNWRQFEAVDIDLSRQVTVLTGQNGCGKTTILNLLSRHFGWNLQFVSTPFIGKKSAKRLWSDIYDDRSSDLENLGNTHVKIGTIQYDNDVTCELFTSTLTSIQYMPEYSSMQGVDGMHIPSHRGVTTYTNVASIPTEPIDSAQQYQQFQQLLTQAYGGGRSENAGRIQKQSLMSLALLGEGNSHVTPNPEMKRVFKGFQAVLKDVLPDNLGFQRIEIRMPEVVLVTNSGTFAIDAMSGGISAIFSIAWQIYMFGHNKQNFCVTIDEPENHLHPSMQRTFLPKLAKAFPNCRIITATHSPFIVSSFPDANVIALARGEGQRIVSESLDLKDISGTPNEVLREILNVSSNLPVWVEGEIEKLIERASRLAPEKRAKHIMEKLRKLGISDAIVEYRRER

SEQ ID NO: 85123 - protein, 210 aa, Sinorhizobium sp. GW3
MRSIVKAEEPQILLENKASWTTEYVADPKNKTKKYRYRHPDIKSALKAETSDKCVYCESKIGHNTPGDVEHKVPSSLDRTRHFEWENLTIACTECNRRKNAYYDVVKPFLDPYINGIEARIIHHGPIVCWAPHDAVAEATVKILNLNDTTRTQLVAQKVEHIDALNNVVARLKEADPLIQELMKLKIEEMKAEGAEYSGMVHAVCATYGI

SEQ ID NO: 85124 - protein, 463 aa, Klebsiella sp. G5
MLHHGVAAVRGETIHPAMPVKIEQKIDTEAGTGFEAYRSKSQYISRIKIKNFGPIHILDLDLSLSESPQAPCFALLGENGVGKSTVLRALALALSGKAYSKRLGLNSAKLLSDGASDGEVRVSIVGGEDDIIMKLRRNRAIEFNTDTSRSLVLAYGATRLLPKGRHKAKDGEAHAKIDNLFDPFLPLSNPAEWLSTLEEGSLAEVNNVLASLMPQDHQVTVILTPETGAVSLQVGNVPGRKFDHLSDGYQSMLGMAVDIMKVLYRSGSTMESAEGVVIIDELGNHFHPAWRLQCLSALRAAFPRAQFIYSTHDPLCLRGLYAGEVTVLKRDRLGHIYALEDLPSVSRLRVEQLLSSEHFGLRSTADPQMEEDIHEYEELLGSPDRTANEDARLEELVQRLTDDRYLGATRRERLALQLLDTSGLEDVPVQPSISARELSEKTVSRLRFIMNQVSPRTDTQGNQ

SEQ ID NO: 85125 - protein, 114 aa, Klebsiella sp. G5
MLNPCIDDPDEHLVFLDDGRVEPALINGQESRKGKASIQYLGLARAELLQMRARHRRTVIAAIRHTIAALEEGRDPGTDLDDLLTLLSSKEAYVAYTRTLVRTHMSAYIEALGL

SEQ ID NO: 85126 - protein, 445 aa, Enterobacter sp. 50588862
MRQPYRIESVTLNDIGVFDNTHFDFPQISSESEDATKAEIHILTGPNGCGKSTVLYALAGILNPDHGDFLVRKRYQGMSSNVNFHFCGLAGEYGVNLDKQVNNLLVKSDAYYYCIPGASESLVWHNRPWLDMNQNVTVKKFDYAALAYSGSRAAQSGYVFSSIQNITQSPFENALSFDQTVRPQLLAQWIANNRTQAALAKDDGAEQEAKQFDHAIDQITTFVNNICQLGLTFHLERSPLEVKVGLGGKRLNLDILPEGLKSIISWIADMALRLESIPWKEQRDIFSQPIILFLDEVDIHLHPKWQRRILPAIQKLLPNAQVFVSTHSPFVVGSVEDAFVYRLPESQRNIQNNATSNKSVKAVKSGAGKSYQLILAEIFDVEEEFDVETERQLVDFKEAIRRHLQNSKDDAEVMKLAETLREKSEELATLVSMELRQMNRLLSIK

SEQ ID NO: 85127 - protein, 199 aa, Enterobacter sp. 50588862
MYPFTRPECPDYLLECWEELGSRYEESKRKDAKYTFCWYAAFRYEDTRKLLTAMTQEHCAFCDGGDLGAMSRETLEHFRPKSREEFYRLAYQWENLYPCCDRCQSEKLEKYEDALLIADVAGFVFNDYFMVDYLTGEILPNSKASAANQHRAERTIEIYGLNVDQRKTIRKKELKRYLQRDEKTDVLDDFSYRYFLMDA

SEQ ID NO: 85128 - protein, 472 aa, Proteus mirabilis
MQISKLRLENYGVFTDAEIMLATKNGNQNGSNITVFIGNNGSGKTSLLDAIATGLSWFVAKFEDREAQGEFACKSKINISSDYCLISFIKREAIHPTHQYNDDLSLELITALKNSKKYALGSYAIDSDIANYVYNHYRISSRQTRYHRNYPITAYYGATRHTYDTIINNAIQPNDSHKFDILAGYKDSFDAKTNYADFFTWFRYREDIENETAPHTSIMKLLEKHTDVNSEIYQSMLAEQRKLQDKALTAVREAIKIFLSDTDSVIENIYIERTPNLSMKVVKNGTHFSIEQLSYGEKSLFAMVGDIARRLTLLNPTLDNPLEGKGIILIDEPDVHLHPQWQRRLISLLDKTFPNCQFILTTHSPLLISDHKDILVYSIEKGQVKKINSLYGQDINSVLSEIMDTDFINQKVQNQLGDILDAINEGNIKKAKDWLSKLEKEISANNIELVKARLLLKKKEVQLEKNQQKKGL

SEQ ID NO: 85129 - protein, 213 aa, Proteus mirabilis
MRKISKKKGYEPPSLTQWKKQNKNKKYIDLTPNLRAEIRAELLKEQFYLCGHCCQQIPNIQDCHNEHIEPQQIAHQRTLDYSNIIVSCNSKKQCGDSHKHFLLPITPFDDRCETELQFSISGRVKGLTQQAQDTIRILNLGDNERTNKVLIEKRKIAISTILFSNGINSNIGLEDDDLLNDLIIELSKPNNVGKLESFSPIVINVLKQWLSDQ

SEQ ID NO: 85130 - protein, 472 aa, Proteus mirabilis
MKNFRCFEQLEVTFHPQMTVLIAPNGAGKTTILDAVRIAMWPFVKGFDLGSQTGKAATIQIDDVRLRRFDQNMEPALPAEIEAFSNSETNILPISWLQSRDKITPRTTTKGDTFTTQLTNIAKKYQSIIYKSSKSTKIDSDSFSQSVENINLPLIVYLGTGRLWYQGRYSSEAQDQKLDNSVYSRFWGYQNCLTATSNYKQFQSWYSWVYRSHRELQITQLEGQLKPQDEEAQRNFSAAINVVQTSINKLTQKLTGWHDLQYRASMGQQLVMEHPEQGYIPLSLLSDGLRNMVAMISDIAFRCIKLNPHLGEKAAIETSGIVLIDEVDMFLHPTWQQTVLSSLMDAFPKLQFIVTTHSPQVISTVHSDSIRVIGENYEGKLIASKPLAHTYGNPSNQVLESVMLVDPQPPIKEKEMLEQLTELVDQGKGNSELAQSLLTELTTLLGDTHPQLQRLHRSLNRQQYLSHLEGRK

SEQ ID NO: 85131 - protein, 198 aa, Proteus mirabilis
MSRWQSFSYKNTVLQSLCRQQSLLCCYSEVRGDQLGLNYHIEHIENKSQNPSKTFDEANLAASAFSSEELCHIRKEEIFGGHAVNKQQHVDMTKFISCYQYGCESYFAYLSDGRIVPKDELNVTQRERANYTINLLNLNSRYLINLRRQRWDELDQLVLEHINNNWDLEQLCDLELNFLDSNHGLYPFFSLARQFFGK

SEQ ID NO: 85132 - protein, 473 aa, Pseudoalteromonas translucida KMM 520
MKCVEMGFRSRNIGNTKLFTGIDNDKHAFTVVVGDNGSGKTELLLDIFRKYYSKYAELYKPKTQTGKDRLRWAINNKNEYEAITGLLGANLPRKLICASTSQFERFQNDFKADEYPWLSKVYSYIGSKPYIQDLSPSVRIASNAIKQLLIQQTFDLRKVNALKAFLDEFGFNSVLKIKLTPTITEQDLLIIASGDIKDQKISLDAQLKLQTAAYHFEKSELLNLLSKIETIYTSPEVLLSLSNQSLKLIPSSSIYDIEFDKRELSDLLRSGLVVVADIETLKDQPLKASYLSPNAKVRSLSARSSGEQCLFLLFLGIVASIEDNSLVLIDEPEISLHPSWQERFVDILNQSLNTYSGCHFIIATHSPLIVSNISTTNCEILNIQKNILLDASEHYLRSSDYQLVNVFESPGHSNEYLLKISMQIYSKVKTYKSFDELDIKHLEMLNRMKQKISKDDPILELIDSLNEVLKIYG

SEQ ID NO: 85133 - protein, 192 aa, Pseudoalteromonas translucida KMM 520
MDNELRAIEFTKEQKALIKEVVDTPEFNHIDWSSDSLENLRSSIRNAANCQVEHIAPKSKYKNFIFTPKNLCVVCVDCNNAKRDIDVVKPLPLKKERTKYPPSSQFLIIHPHFDTYDEHLIKFGERFYFSLTEKGSCTYSVCKLNKGLADMGYFDSEDILSDMELMAQIIDAKFKKDTKKLIVLKKLLIDSI

SEQ ID NO: 85134 - protein, 421 aa, Enterococcus rotai
MNIEKIEIKNFKGIEQLDINFSKRFNLIIGNNGFGKTSILDAIATVLGGFVSGIDGVYGRHINNNEVRIETKTLGDASYNVEYKVPVELTATADFRGHLYTWTRRKSSYKASRSTIEPRDIAYLSRELIKDSTSIMPVISYQGAGRMWTEGREHKTSKKNDLSRYGAYVGSLWPKSNTKKFIKWCAKMEQISWSEDRRIMEYEVVKDAVMTFMSEMNDSSVTKIFYSKKEEELVYEENGTRISINLLSSGYQALIWMAFDIAYRMAVLNPELRENITQETTGIILIDEIDVHLHPRWQWKIINALMKTFPKVQFIATTHSPIVLASSSETKVIRINENHQISYEKSSYGIPIEDVLTAYQQTEKVPKEVKKNIELFSSHLSNKHITEAELALRELELLLGSNNPIVVSAEMELEFEKIELD

SEQ ID NO: 85135 - protein, 216 aa, Enterococcus rotai
MLYIEKGREPNSLVGYKKQKDASYRNLDSSVKIDIKNSLLKEQGYLCAYCMSRISLDGTSGDKMTIEHFHPISDFPNLQLDYNNLLAVCSGGSDREKDKSLTCDKHKCNNYLVHIDPQKRNTVEKIKYKTDGIIFSDDEDVKTELNTVLNLNCSDSMLVSSRNNVKEELIKFFTKSYPRRWTKMDILKIKNRLLTPDKNGKLTPYIGIVLYKLNRK

SEQ ID NO: 85136 - protein, 518 aa, Pandoraea norimbergensis
MRIESLKILSPWKNLEGFEIDFHLEKDVTVLLGRNGAAKSNLLEAIITIFTRIDLAEVAEFSFDIRYEINGQKVQVTADAGRQPLAKLNTDSIPLTQLRSKWSPKYVVGYYSGVSDRFEKLFQRHDRRALDETLVDTTQKNSEKPSTLALRQFIYARPVHGLFSLLAFYFSDDAHVMEFMRSVLRIDSFDSALLVVKKPEWASPKAKAENFWDAKGPVRDLLERFRQYSLAPFFNTFSRPEGFRKRSRQHELMYLFLPDVDALHKLASEYGGDQRALFQALDTMRLSDLVDDFRVRVRIQGATTAIHTRQLSEGEQQLLTVLGLMRFTRNDASLYLLDEPDTHLNPAWGMDYLEDLRNIGGLHRNSHTLIASHQPLLVAGLLKDEIRVLRRGVDGRVDVVTPTESPRGTGVAGVLTSPLYGLESQLDRFSLSVLKRIYEVSLESKSDRRARYLRRLRRLVPSLEIAESSPDPFRNIARQAYQLSLDRALHTSDLAGNRVELVERLASNLFEGAAKEEE

SEQ ID NO: 85137 - protein, 289 aa, Pandoraea norimbergensis
MIFINPKKIVPPQHWRNDAAELSAELLKQNPNDRIEFINSKRDRTWGHPELLETLRAVVGNKCWYSEVPLEGADPNVDHFRPKGSVREVDNELRPTKTTWSGYWWWAFELRNFRLSSEHANQRRVDSETNGGKWDYFPIVGERAAERLDYDLVEEDILALDPCSASDVSLLWFDPVGAPSCSTWKRRSTDIDERRVKATIWLYHLDKYELKRKRAEHITDIQTDLRNANTAYKLWKNHDGGIRARNTFDRHVNDIKKKLEDRAEFASAKRCAVRAAIADYEWIEAEQII

SEQ ID NO: 85138 - protein, 507 aa, Lacimicrobium alkaliphilum
MTFRISNFSVEGENLTTPNVYLSKKCVNRDDNYFTVIIGNNGTGKSRYISSLVEAFRDAGENRRRMKVDYCLSYVINNEHFRIEKKHGKKALDRNTKKELFAGNGLDIPSKIIAVTTSLSDKFSSDNFNRRDYLKKRESIDYKRECYTYLGPRSTPGRASSRALMDRAMTTLIASVGEQIHNRSYRHIFDYLKYEPIVKLSYEISRPRYFQEQDGIVSGAVFKRHLEELSDRRGGMRADMFRRELESRPDQYWEDIANAYNYILGKASRPEKRLQFSFVVNFSAQNEKRENTEIVLFHEELYSFLEDLRKFDLVRGPSINLFKKDGGEFDFSDASSGEASILSTLIALIPNLDNDSLIVIDEPEISLHPSWQYKYVELIDRLISQKTGCHVVIATHSHFLISDLPLGRSHIVHFREGKKSEIDVEYIEEETNGLSAEDVLLNVFDMPSTRNYYLSKNISEALELVAEGKINSDRYQELIGAFEKYLPNLKNVDPLKDVIKALLKLGI

SEQ ID NO: 85139 - protein, 210 aa, Lacimicrobium alkaliphilum
MYSRISEPYELSSDETKIVDRHFQSHSDWEKSAFDNIKTKIIDYLRPKQDNRCCYCRTELGFDIKAVDIEHVIPKCQYSQFTFHAKNLALSCPGCNTSKGKKNVLAKPIKRYPRSGTNLIIIHPHFDDYFSCIAIHDDVIYEGLNDKGCETIKQCKIYRLKEVVKKKKALNANQNPIQKLVEDIRNADDSDKERLLHALQTLTIASKGRS

SEQ ID NO: 85140 - protein, 292 aa, Pseudomonas fluorescens ICMP 11288
MKSVIKKMMREGTHRLHQIEKILLYCGYASHITVTMRAGKIDSRLDDFSDTSSIKKLTEMIDNYFNGEDEISFNVNFGETSDISSLSKLENLLHQEKPLRHYGMVKAIEISLYKNNGEPVPLLNASSGELSLMTSLIFVLGEISGTNMILIDEPENSLHPRWQREYTSMLCSLIEYHEVKVIIATHSPLIVTGAQLDERVSSSIYHPATGNLEFSSSTNIEELLWGQFEIISPKSRFLSEKLAEKLEELSAHKVSLNQSIEFIDSASKASFDDGQQDIFIAARQLADSIARG

SEQ ID NO: 85141 - protein, 305 aa, Pseudomonas fluorescens ICMP 11288
MLSDPLMPALSDFVITAEEQLAIDHALRLHDSWNIDQKDMAPVRQVLKNLRERIKEYHLLRQGYTCCYCRTNLFGGGVFMVDREHIIPKSHCKKLTYVMANLSVSCKRCNMEIKKDKTSLFVDPGSIESTYLDKSTYRVIHPNFEVYEDFIIRRQEQHGKAKLVKFIIETPGDKTNFMFKFFKLNDLEVNSINDAQGVAPLSPSQQLMLDALKAQIQNQPALAQEILKLVLEEQGSKASLPMIAKAIDSTDPFNFSVGSLADVENKWLDSKWVPLPSGGGRALAIGHDVVLALPSPDSSDNNGQP

SEQ ID NO: 85142 - protein, 372 aa, Pseudomonas syringae ICMP 11293
MDVENDKFDHLFADIKIGKVNIITGNNGTGKSRFFKSAAEKAIENTDFYKEHFRQVICLSGTHSDKFPRKIWQLNKSTSGVCYLGYKVGNNMISDIAPFRVIVNALLGENSIAQQSSDAIDFCLARLNIDPEIKLHLRYGKNRKERLIDVAPNELSINLRTLQRDEDTLAIAAALKQGDLSLQTISIKRGNNFYALAELSSGERAYMIALLGALYCAKNGALVFFDEPENSLHPGWQKTILRDFRRALDLNFISATMLVATHSPLIASSISNQEAFTCDFPSGQTWHQSDLYGKTSDNALKDQFSLYSSRSTVVIELTQRCLSYITKGDLSSPELYQAIDTLLSFELIVESGDPMREVMHTLEHLRAHHELP

SEQ ID NO: 85143 - protein, 204 aa, Pseudomonas syringae ICMP 11293
MKWDDKFLSPLKLEIRLALRANQAQSCYYCRRLIVLERRNMSEAIEHYLDKSQDHYRRWTFHPLNLVIACQPCNFVKSTTDLGDASVRAATYLQPNIGQFRWLHPYFDSYSDNIKISPGPVFSAIPDSPREAQAVAMIKDLKLDSIANMDDRVQFLADELKKLMARSFKAVRRGTKYGRRDRYQAFLNELESRIENGMLQLHGI

SEQ ID NO: 85144 - protein, 515 aa, Pseudomonas syringae ICMP 11293
MRIDKLSILSPWKNLNGLSVDFDERRDVVVIIGRNGSAKSNLLEAIITIFRNIDLKEVAPFSYSISYRIGGGAVEVLAEVGFQPKATVDGAKVSLEALRTLWTPRYVVGYYSGVSDRFEELFRRHDRKALDETLGATSFNLEPEVLEFRRFICARPVHGLFALLSFYFSNDSAVFDFLESHPRIENFDSALLTIRKPEWAKPKTTADDFWGAKGPVRDLLERFRKHSLAPFSRTITVRPDFRKQEKRDVMYLFLPDIDALQGLAREYGEEPRALFQALDTMRLSGLIEDFRVRVKVRGTSATIHTRQLSEGEQQLLTVLGLMRFTKNEGSLYILDEPDTHLNPAWGVEYLEHLRTIGGIHSNSHTVLATHQPLLVAGLLKEEIRVLSRGANGQITAQMPDESPRGTGVAGVLTSPLYGLESQLDEFSLRVVKRIYDVSMNVSGKYRSRHLRRLRSLIPAVETAENSPDPYKNIAREAYRLALDNVVSSNESSDSKIVAVERLAAMLYRDVFKEEK

SEQ ID NO: 85145 - protein, 292 aa, Pseudomonas syringae ICMP 11293
MIFIDPQAIRRRLPAGWDNEISLLTKILSSKSIEERSTYIGSCREKTWSHPKMLEALKEIVGNKCWYSEVPLEGADANVDHFRPKGRVKEVDEDFKPTGVELDGYWWLAFDWRNFRLSSMHSNQRRVDTSTEGGKADFFPVVGSRAPENTDYVACVENILPLDPCSFSDVSLLWFDANGAPSCSNWHRKATPEDVRRVKTTIWLYHLDKQEIQKRRREHMEKIRSDLDHANADYRLWKSIPNNVVSKASFDRTLASIRSQLAEDSEFSSAKRCAVRLSSADFEWVLEYNLFA

SEQ ID NO: 85146 - protein, 421 aa, Pseudomonas syringae pv. syringae PD2774; identical to SEQ ID NO: 84776

SEQ ID NO: 85147 - protein, 215 aa, Pseudomonas syringae pv. syringae PD2774; identical to SEQ ID NO: 81083

SEQ ID NO: 85148 - protein, 452 aa, Pseudomonas sp. ICMP 3272
MEIKSFRLVNVGRFSDLEVALAPTERHASKVTVLVGNNGAGKTTLLKSVATSLSWLVARVRTPKGAGSRIDEGMVQNGAATSSITIRIEDVLISDDEINPLETEWGITATRKGRNATSSTVLSELNRLADGYRSKLTEKSDTSLPLLAFYPVERSVIEIPLKVHARHTFDQLDGYDNALGRGVDFRRFFEWFREREDSENETGISTELLNELSQKILIDTELWKVLTREHASSRDRQLTAVRTAVEAFMPGFTKLRVKRKPRLHMAIDKDGKTLNVSQLSQGEKSMMALVGDIARRLAMMNPALENPLHGNGIVLIDEVDLHLHPKWQRSLIAQLTTTFPNCQFLLTTHSPLVISDSKDVLVYVMDDGELREQDSLYGLDANQVLSSVMDTDIRNEEIQTALDKLQHFLMRGELDEARTLYTGLADELPANHIELAKASLLIRKLEVRREKD

SEQ ID NO: 85149 - protein, 216 aa, Pseudomonas sp. ICMP 3272
MRKIEKGSLAVLEKWKRANKGKKYADLVGHEDIKDAIRYACVTEQHGLCAYCCCRITAEKGSACNEHVEAQHLAPRRTLDFGNIVASCTNAKRCDKAHGRQFLPLTPLMIECEKELQFELSGLVAGTTPRACASINVLNLGDTHESNRGLVGERKQMIDALLFSCSIDPAELFIEEDDVLNLLKNDLLEVDAQQFLQPFSPVLVNVIIGIQRARQR

SEQ ID NO: 85150 - protein, 421 aa, Pseudomonas sp. ICMP 3272
MRLDHLHLQNFRCYEDAHFDFQPGFNLVVGVNGSGKTSLLLGVAGCFGNLLGSIGVHQPSIAESDVRFALVKFEDRIRFERSYPLVLTAQGGAFERQEWHVSLERSSLQTNFSALNSLAFSENLISIDVSTHGDLPVFAVYQANRRWLTMSVTAELAAQSKPSRLDAYTSWFDAASNLKNFETWFIGKTLERFQRLSRAGSSSVFNDELTWINSAIQCALPDAKGIEYDMELRALVVDMDDRKIPFNDLSDGQRGMVALFADIARRICLLNPHMGKDVLSKTNGIIVIDELDIHLHPGWQRTIAPALKKAFPSVQFIAASHSPQVIGSLQPGEVILLNNHDGSHPRATYGLDSSSILEEVMGVPQREPEIEALLDELFSTLENNELEKARLQLDALKQKAPDLPEFAGAEALLKRKELIGR

SEQ ID NO: 85151 - protein, 213 aa, Pseudomonas sp. ICMP 3272
MRRVIKGTEPASLTEWKASANEDWTPTYPSLQNPQKRDLHNCLLQEQNFSCCYCGREIELDSSHIEHFRPQDHYLPLALEYSNLHASCLRETTPGNPLHCGHYKGNWFDEELHISPTEDDCEQRFRYLLTGKIQSTSHTDLPATTMIEKLALDIAYLTKRRQEAITGVFDEQFLSSASDAELRHLLESLRSQAANNPISFGHVIARYAEQLLA

SEQ ID NO: 85152 - protein, 428 aa, Pseudomonas fluorescens
MLKLLSLKGVGPAEKFGPVEFAPRLNFITGDNGLGKSFLLDAAWWALTRTWARGAEAIPRESSHSASIGFAFSKVTAGDKEGEVHFKDGFWRQPKARPSIPGIVIYAGVDGSFSAWDPARNYWTDQQAGTEEKIRAFNFSPDEVWKGAVSEKGTNICNGLIHDWVRWQRTAGDPSFKELTVALDALSPSGIEKLSPGEPCHIGPLDETEYPTLRMSYGLDVPLVHASAGMRRIAALAYMIVWTWNGHKRACKQRKVNPAKEIIFLIDEVECHLHPQWQRRIVPALLKVVEEMTQEKVAVQLIVATHSPLVLASAEPEFIEEKDAVFNIHLEDGEAKVTKEVWSKQGDVVNWLVSDVFGLQQARSVAAEDAIEAAEAWMRGDKEQLPEKLNTKSAIHQELVRVLPGLDDFWPRWVVSQGKPEKAAKGKK

SEQ ID NO: 85153 - protein, 200 aa, Pseudomonas fluorescens
MTPVSNPIPEPDKFDEKCRKPGDVWLKENPDAERPRDLWSPFRHALADGFDDRCGYAAMYIPSGTVDHGVSYNEDRLLAYEWSNYRYIDGWINSSKSKQVAAGLLDPFEVQEGWFEISLPSLQLVLTDAVPAEFRERAENTLKKLPIRDDERIMRPRRKWLSLYEKSGDLEMLREMAPLIAAAVEKKEALEAANLPVEER

SEQ ID NO: 85154 - protein, 263 aa, Pseudomonas fluorescens
MAVDGEHDVIAKSADHTRCLIVTQHGGVETTTPLSHASSGYRSVLAMVCDIMRRLMDRSTNPQYQSLENARAIVLIDEVEAHLHPRWKIQIMSALRKALPKVTFIATSHDPLCVRGMHNGEVVVMHRTASAMNKDGGKQLAQVEQLLDLPDITQLTIEQLLTSDFFSLASTDQPLMNLKLAQLADLLSASNNNGQLDPEERQVVDLFKQEISDVLPVGSTEGQRLVQEAVAEFLQKRIAASRKDLQEFEAAAKRKILAVLEGF

SEQ ID NO: 85155 - protein, 364 aa, Pseudomonas fluorescens
MRYVDRSKFETPQVMKAVPGLRAPADDELVKVAAYIKKKAKLRAKAESKRAQAKADGKRAPNVTVTLESPFKLYKHDSVRARLIEMFHRKCAYCESFYYATSAMEVEHYRPKEAVFGDAVHQGYWWLGVSWDNLLPSCIYCNQRRTQILPKGAIGHVGLLEDAGRFTHERSVTTGKGTHFPVLGPRVTDSTGDYSKELPLLLNPCKDNPQDHLGYCLESVNTIALMLARPGVGVIPPNMGLDPKTLEDFKDELARTLKFNLDLRGSVSILIYGLNRLGLVQERTRVLRQLMFLELQVVELTEYINKLELRPPGSKYAAEDKVIAQGLEQLRDRTVQQMKSMAKPQAPYSMMVRAYLEDFAARLA

SEQ ID NO: 85156 - protein, 449 aa, Pseudomonas syringae ICMP 13102; identical to SEQ ID NO: 80910

SEQ ID NO: 85157 - protein, 216 aa, Pseudomonas syringae ICMP 13102; identical to SEQ ID NO: 81085

SEQ ID NO: 85158 - protein, 421 aa, Pseudomonas syringae ICMP 13102; identical to SEQ ID NO: 84776

SEQ ID NO: 85159 - protein, 215 aa, Pseudomonas syringae ICMP 13102
MRRIIKGTEPASFTEWKASANEDWTPTYPTLQNPQKRDLHDRLLQEQNFSCCYCGREIELDSSHIEHFRPQDHYLPLALEFSNLHASCLRETTPGSPLHCGHYKGNWFDEDLHISPTEDDCEQRFRYLLTGKIQSTSHTDLPATTMIEKLALDIAYLTERRQEAITGVFDEQFISSASDAELANLVDSLRSGTANTSIAFGHVVARYAEQLLTQR

SEQ ID NO: 85160 - protein, 234 aa, Pseudomonas syringae ICMP 13102
MEQLERTTFDYRHFELSFDFNNRHLLDFATLQSLAFLRKLGLLKIVNCFVGSEQHPGSDIAYSSSGQQQILCSLLSLVSSLSDGAVVLIDEPELSLHPTWQQLYFDILLASIAPFKNCHVIIATHSPLIVQRAQNAGAGVIRMGTNVREVDLKDARASVEDALLDIFETPITDSVEMASKIFDAVTEAEGGSKAERALALEKLKRLQHIYSDGPTRSDKDLAMINDAYRMLSED

SEQ ID NO: 85161 - protein, 258 aa, Pseudomonas syringae ICMP 13102
MNRAKPPIFKTPKSFTDDEHQLLKTKGAADKNFWETKVPADKAVITRFKNEIKDHYWHGQLRRCCYCSSELQSHKATYDAEHIIDKSGYPQFMFEYTNLAVACKVCNRGKWDAEITVGPPTTPGPPSLSNDYTIVHPHLDEWHDHLEFDRWNRIQAKAKSPKGTHTIDVCKIHNLNAARLADRFATDRKEAENYLRQIYAEKSITKKETALALLRRLADQYNLPQAKAVVGAVEEEVLRIRREREQSELELHLLSQPE

SEQ ID NO: 85162 - protein, 421 aa, Pseudomonas syringae pv. syringae PD2766
MRLDHLHLQNFRCYEDAHFDFQPGFNLVVGVNGSGKTSLLLGVAGCFGNLLGSIGIHQPSIAESDVRFALVKFEDRIRFERSYPLVLTAQGGAFERQEWQVSLERNSLQTNFSALNSLVFSENLISIDGTTHGDLPVFAVYQASRRWLTMNVTAELAAQSKPSRLDAYTSWFDAASNLKNFETWFIGKTLERFQRLSRAGSSSVFNDELTWINSAIQCALPDAKGIEYDMELRALVVDMNNQQIPFNDLSDGQRGMVALFADIARRICLLNPHMGKDVLTQTNGIIVIDELDIHLHPGWQRTIAPALKKAFPKVQFIAASHSPQIIGSLQPGEVILLNNHGSSHPRATYGLDSSSILEEVMGVAQREPEIEELLDELFSTLENNELEKARLQLDALKKKAPDLPEFAGAEALLKRKELIGR

SEQ ID NO: 85163 - protein, 213 aa, Pseudomonas syringae pv. syringae PD2766
MRRVIKGTEPASFTEWKASANEDWTPTYATLQNPQKRELHNSLLQEQNFSCCYCGREIELDNSHIEHFRPQEHYLPLALEYNNLHASCLRETEPGNPLHCGHYKSNWFDEHLYISPTEDDCEQRFRYLLTGKIQSTHLTDLPAATMIEKLALDIAYLTKRRQEAIAGVFDEQFISSVSTAELTYLIERLRSGAAHPIAFGHVVARYAEQLLAS

SEQ ID NO: 85164 - protein, 451 aa, Pseudomonas viridiflava ICMP 13104
MEIKSFRLINVGRFSDLEVALAPTERHASRVTVLVGNNGAGKTTLLKSVATSLSWLVARVRTPKGGGGRIDEDTIHNGTVTSSICIDVYDDQIFDSLVCGPDFHWEIAGTLKGRKATSSTVLGELSMLAEGYRSALTAKSDSSLPLLAFYPVERSVIEIPLKVHAKHTFDQLDGYDNALGRGVDFRRFFEWFREREDSENETGIPTELLTKLSQKLLDTELWKVLVREHASSRDRQLTAVRNAVEAFMPGFTKLRVKRKPRLHMAIDKDGQTLNVSQLSQGEKSMMALVGDIARRLAMMNPALENPLHGNGIVLIDEVDLHLHPKWQRSLIAQLTTTFPNCQFLLTTHSPLVISDSKDVLVYVMDDGELSEPDSLYGLDANQVLLSVMDTDIRNVDVQKRLDRLQELLMLGDLEEVRSLYQKLANDLPSGHIELAKASLLIRKLELRRAKD

SEQ ID NO: 85165 - protein, 216 aa, Pseudomonas viridiflava ICMP 13104
MRKIEKGSLAVLEQWARANKGKKYADLANREDIKNAIRHACVLEQHGLCAYCCRSITSLKDSAHNEHVEAQRLAPNRTLDFQNIVASCNKPGRCGDAHGHQILRLTPLMIECETELQFELSGLVKGQTDRARDCIKVLNLGGDQASNRGLIDERKAMINELLFSQSMDSSGLGLESDEVLDLLHDELSDPDEQQQLQAFSPVLVNVIRRLKALRTS

SEQ ID NO: 85166 - protein, 452 aa, Pseudomonas syringae ICMP 19498; identical to SEQ ID NO: 85148

SEQ ID NO: 85167 - protein, 216 aa, Pseudomonas syringae ICMP 19498; identical to SEQ ID NO: 85149

SEQ ID NO: 85168 - protein, 421 aa, Pseudomonas syringae ICMP 19498; identical to SEQ ID NO: 85150

SEQ ID NO: 85169 - protein, 213 aa, Pseudomonas syringae ICMP 19498; identical to SEQ ID NO: 85151

SEQ ID NO: 85170 - protein, 421 aa, Pseudomonas syringae ICMP 19499; identical to SEQ ID NO: 85150

SEQ ID NO: 85171 - protein, 214 aa, Pseudomonas syringae ICMP 19499
MRRVIKGTEPASLTEWKASANEDWTPTYPTLQNPQRRDLHNSLLQEQNFLCCYCGAETDLDNSHIEHFRPQERYQPLALEYSNLHASCLRGTNKGTLLHCGHRKRSWFDEQLHISPLEDDCEQRFRYLPNGKIQSNHPADAPAATMIEKLALDIAYLTKRRQEAITRVFDEQILASISDTELTLLVQGLRSGDANKQLAFGHVVARYAEQLLAS

SEQ ID NO: 85172 - protein, 449 aa, Pseudomonas syringae ICMP 19499
MEIKSFRLVNVGRFSDLEVALAPTERHASKVTVLVGNNGAGKTTLLESLSTLLTWLIARIRSERGTGKKIALERIKNDADFSEVSLLLSESFPFAERASFGWKLSSVRPGRKVESRTTLIHLALLADGYRTLLTDSSATSLPLIAYYPAERSVVDIPLDAPFRPPYRQLDGYEDALSRGVDFRQFFEWFRDREDRENENGVSTDTLMRAQQKHGPYSIEYEVLLRLNESSRDRELTAVRSSISAFMPTFANLRVRRQPQAHMTVDKHGETLNVSQLSQGEKSMMALVGDIARRLAMMNPALENPLHGNGIVLIDEVDLHLHPKWQRSLIAQLTTTFPNCQFLLTTHSPLVISDSKDVLVYVMDDGELREQDSLYGLDANQVLSSVMDTDIRNEEIQTVLDKLQHFLMRGELDEARTLYTELADELPANHIELAKASLLIRKLEVRREKD

SEQ ID NO: 85173 - protein, 216 aa, Pseudomonas syringae ICMP 19499
MRKIEKGSLAVLEKWKRANKGKKYADLVGHEDIKDAIRYACVTEQHGLCAYCCCRITTEKRSACNEHVEAQHLAPHRTLDFGNIVASCTKAGRCDDAHGHQTLPLTPLMIECEKELQFELSGLVAGTTPRACASIKVLNLGDTRESNRDLVVKRKEMIDALLFSYRIDPSELAAEADDVLDLLRNDLLEVDAQQFLQPFSPVLVNVIIGIQRARQR

SEQ ID NO: 85174 - protein, 408 aa, Pseudomonas sp. ICMP 19500
MKQIKNISGNIKNSNKDINIELNGKNLIIAGGNGSGKTSLVKDIYKTLTEHIINRKLHNIPNIERNIIIFTDALKSHNLTEAQRIDYERNLISQQKELELANGPIAVEYFAPSEMLNSYLEKKATFRFFGAYRKAEINSVSSATASQPDIDSVNINTPLGRSLEQHLVNLKVRTALAAQTGEISPRTIHAEEWIASLSKNLKYLFEDQSTELVFSPDKLRFYISQNGKPPYGFQDLSSGYLAIFDIYADLLMHTEYTNIPPSELTGIIIIDEIDAHLHVSLQRKILPFLTDSFPSIQYIVTTHSPFVLTSVDNAVIFDVSTCQILTDLSMYSYESVAEGLLGVPPISKIFEDTIKKLTNITSQDNFDLNKAELLLKTITPFVDVLDAESEMFYQLAANKIIKMKTENK

SEQ ID NO: 85175 - protein, 219 aa, Pseudomonas sp. ICMP 19500
MFNVERPNLIPPSLLERKSWTGHDVLQSLREIFYDKCYICETKEPLSLNVEHFEAHLNDAEKMYDWSNLFLACARCNNLKRHLHNNLINCTNSEIDALRLIRHAPPVTPFAKTLTIEPTNDHPNTVETATLIKKVFTDDNTGNKEIAGTWLRKRVYKRYSHLLSHINTYIDEDKLKSEKTDAILRIENLMKKNQEYSAFLRWAILDSPELFEIVKDSID

SEQ ID NO: 85176 - protein, 410 aa, Pseudomonas putida
MLDFLSFQGVGPSPALGPIGLAPRLNFITGDNGLGKSFVLDTAWWVLTRTWAAGKPIKARESSALPVIDYRFTGADRSAGQWAWQRDRWAPVGDVTPSRSLVVYAHANGTFSAWDPVRNAGELAAYHFDENQLWHGTSMAGQGRLCNGLINDWVRWQRTYGCKAFAALKQVLRALSPSREELLLPGRPCHIGLLDETEYPTLQRPQGRVPLPETSSAIRRVVALAYMLVWTWEGHRRACRLAGVRPSDELVFLVDEVECHLHAQWQRRIVPALMDVVGALTRQRLAVQMIVATHSPLVLASMETQFVEARDALFTLSVEEGQVQLHQQTWAAQGDAVNWLVSQSFGLRQARSVEAEAAIGAAEAWMRGERSGLPEKLDSEDAIQLQLLRTLPTGDHFWPAWIVAKGGLPA

SEQ ID NO: 85177 - protein, 175 aa, Pseudomonas putida
MIELVHPLPEPHGFDERCRQRGNAWLQDNPDVGRPRDYWSPFRPQLGEGFANRCAFGAMYIPSGTVEHFISCDEDRGMAYEWSNYRYVDAWMNSAKGSKKAEDFLDPFEVREGWFEVLLPSLQLVLTDKVPEAVRARAEYTLKHLPLRDDERVMRVRRQWLRLFEEGKIGLEGLR

SEQ ID NO: 85178 - protein, 452 aa, Pseudomonas syringae pv. actinidiae ICMP 19497; identical to SEQ ID NO: 82162

SEQ ID NO: 85179 - protein, 216 aa, Pseudomonas syringae pv. actinidiae ICMP 19497; identical to SEQ ID NO: 82163

SEQ ID NO: 85180 - protein, 423 aa, Pseudomonas marginalis ICMP 9505
MRLDQLHIQNFRCYEDATFNFQPGFNLVVGVNGSGKTSLLQAVAVSFFEFGKLVRAEQPCLQTKDIRFVIDSVNGRTRLERIDPVRIAAKGNIFKATEWKLAHAGDTEPYLVDSEVESQIQLIKTSINLAMNVDLPVLAFYRANRHWKSANVSAEFAAQQRVSRFDGYNNWFDAVTDLKDFEGWLIGRTLERMQDLLDTKTAPVEFDDELAWVNQAIQFAVPDAQGLRYDIRLQSLLINLSGNNTLPFYELSDGQRGMIALFADIARRMCILNPHLGKNVLKDTSGVVVIDELDIHLHPAWQRSIVQALKAAFPNVQFIAASHSPQIIGSLRPEEVMLLDRGDSSHPRVTYGLDSSRVLEEVMGVSEREPEIEMLLSELFSTIEDNDLQKAKTQLQTLRTKAPGLPEFLRAEALLKRKEMIGR

SEQ ID NO: 85181 - protein, 212 aa, Pseudomonas marginalis ICMP 9505
MKRVIKGTEPVSFTEWKALENEQWTPTYRDLKHPQKKQLHTSLLNEQGYACCYCGDKITLDSSHIEHFRPQKHFRHLGLEYINLHASCQGETETPKPAHCGHNKKSDFCEDTHISPLEDDCENRFKFTLLGEIKGNDDSPAESMINLLALDIEFLNSRRKEKLEGIFDNAFLADFTMEELETIIQRSRQPLSSQYEAFDHVVARYAEQLLGH

SEQ ID NO: 85182 - protein, 773 aa, Pseudomonas marginalis ICMP 9505
MEYDEGREITRLIAEEMLSVGTSFPKISPERLRLLAALHLTKGLILQRQYQDIFEDACSVVIEMTSKDFDDTEIRAAFNEKLKQMKDLSSSPMDREVRVKTATYLIDLFIMDSYNIPYGHPMAVAALVGSIHSTLHSHVIEIAPTTAELSMGKERIDDSSFPMIHPTSRALRSLISLKLIINQIYPYFIDGRIQAANFDDQPSFLLDSHEQFNLSTATGMSDFGEFALSHHNAARFMLVIPASNAKLGNLVQGLSPALKTRLRLDAAICFSISEARGANNDKVLLIFSQGINLMKNPHVYIDVSMSNKSLEHLDLQERAILAGHIVNIHEARDLYERWKRIPTKVATILNAQFSDGYHNVKTLCIEDEVDHGKLLKIYSPKNFIRNNRLEGNTFNITADPQAILRLLSDPLEPACVYIIGNNGAGKTRLLCELIDHIGEMDRRTVGISTGVHDRFPLGRTKQTNHFEYRGVRTSPDSISPSKLTKNVTSLAARVLVDQRMLEALKECQQCLGFATRFYFMLRPEMALDNAPKEIRLMRMSENAAENDVPEPLTHYEFGVVRPATEDQRERIVSYSSLSSGEQNINQLLLSIITTAERGTVFLVDEPEISLHLKWQQTLPRVFHLLSQRFECSFVVATHAPTLISNANDRGSHSFMLDLGKLPELSARERYSVESIILGGFGTYTPHNRAVHEACARIVAKTMGSKGSRQADQFSPLAELDEMLKKMSFSQGAYVPPGQQEDIDLIKKAATAVQLLLQDQSVVDAASEVGGVDD

SEQ ID NO: 85183 - protein, 290 aa, Pseudomonas marginalis ICMP 9505
MTDYFVLDEAELRPRYDDYKVLCHAEERFHKVVMFNLLRFHATALQRFDRRQAGEALEDCNLWNEFSNPKSKKKPKTVATAATGEPAPTVKAKRKRGKAKPVISDIKGAFRSYIEKTQKNRCCYCRRWLCNSGYSKPIEHILPRKTYEQYSFHFWNLSVACVDCNSLKKEADWATPDKHGFKAYPLPSNFTEMFHPRFHRFDEHVRFIRVQTNDHSITLYRGITPQGQKLCEDLLTIIAGKEVIVNANAALKSSMETIERFDVKEGSHLESALKSLVGALSERSIDLLNR

SEQ ID NO: 85184 - protein, 422 aa, Pseudomonas syringae ICMP 11292; identical to SEQ ID NO: 80882

SEQ ID NO: 85185 - protein, 214 aa, Pseudomonas syringae ICMP 11292
MRRIIKGTEPASFTEWKASANEDWMPTYPTLQNPQKRELHNSLLQEQHSSCCYCGREIELESSHIEHFKPQEHYLPLALEYSNLHASCLRETKPGNPLHCGHHKSNWFDETLHISPLADDCEQRFRYLLTGKIQNTESADLAAATMIEKLALDIAYLTRRRQEAITGIFDDQFILSASEAELTHLMQSLRSGDAGKQVAFGHVVARYAEQLLAS

SEQ ID NO: 85186 - protein, 414 aa, Sphingopyxis sp. A083
MALRAYFATNTLQNRQGLGRISSIEIDSEGRQVELNFGADVKQFKDERESLRGEGWAPSKLIALSFTPFDKFPPIDDTLPKPGSRPQTSRAAIDPFYVYLGFKNDFRTSPRARLLRTIDQLAFAESTVQSDERVIDAFDAIGYSPVIELEYEFTPGWRSGRDQSDFDEQRLKELENMLEGHTRPDGKRRRRMTYYIDFRFGRRDASIPIDFEEIRRLTDARVLRLASVKLRTADDKEVELLELSSGELNLFSGFLGLAAFLEDGCLVLIDEPENSLHPDWQMRYTEMLEAVFSRHRGCHYIIATHSPLVVSGVAGPHAKILRLDQEPIELPSRALANASPDATLLNAFTVVTSGNNFLKQIVLETVTLIDTGKHRSARARELALAHASIYDKIPADDPIRDLVAGVVQTILQPS

SEQ ID NO: 85187 - protein, 288 aa, Sphingopyxis sp. A083
MSRFLECEIAEMAGVRADVGEDVFNRWFDKSEIKGRFKKVCMEEQGLRCCYCRKFDNTTNNLIWDLEHVLCELYYPQFFASDENLAVACKRCNNAKRHEDVLRPQPRPDPGIEEVPQQPERYSIPHPRFDAWSDHLGHVNYQIYSSDTDKGIELMRVCKLNGPAVDEAGLDHESVVAAIKTQFFQIVGNAVSSPPPDEEILARMAWSVQNLEDERAAMTLAGLAPKLRALGRKAVRRNVEQSIAEARALADSARNPGGEKPSERRALSLVSSVIGFGPPQPRLPGSSP

SEQ ID NO: 85188 - protein, 468 aa, Pseudoalteromonas sp. 10-33
MGFRSRKIGNTKLFAGVNNEKHAFTVVVGDNGSGKTELLLDIFRKYYSKYAELYKPKTQTGKDRLRWAINNKNEYKALTDILGVELPRKLICASTSQFERFQSDFRADEYPWLSEVYSYIGSKPYIQDLSPSVRIASNAIKQLLIQQTFDLRKVNALKGFLDEFGFSSVLKIKLTPTITEQDLLIISSGDIKNQKISLEAQLKLQTAAYHFEETDLLNLLSTLEAIYTSPEVLLSLSNQSLKLIPSSSQHDIEFDKRELSDLLRSGLAVVADIETLKDQPLRAGYLSPNAKVRSLSARSSGEQCLFLLFLGIVASIEDNSLVLIDEPEISLHPSWQERFVDILNQSLNTYSGCHFIIATHSPLIVSNISTTNCEILNIQKNSLSDASEHYLRSSDYQLVNIFESPGHSNEYLLKISMHIYSKVKTYKFFDELDIKQLEMLNRIKQKISNDDPILELIDSLNEVFKVYG

SEQ ID NO: 85189 - protein, 214 aa, Pseudoalteromonas sp. 10-33
MDNKLKAIEFTKEQKALIKEVVEATEFNHINWSNDSLESLRSSIRSYYRNAQNSLCCYCKNPVSLTSAANCQVEHIAPKSRYKKFIFTAENLCVACADCNSAKQSIDVIKPLPSNKKRTRYPTTSQFLIVHPHFDIYSDHIRKFGERFYFPRTKKGENTRTICKLDKGIEALGYFDSPESLENFELIAQIMDATVKKDTNKKNTLKKILLKSIG

SEQ ID NO: 85190 - protein, 452 aa, Pseudoalteromonas sp. H103
MLSSIFIQNFKLFSDSKFTLNPEFNLIVGVNGCGKSSLLKGVAISLAGWAHAYIKSNDNLRPIKFDEVREIENNGRFDKAQTTRIEALGEFPIINRFNTFTYGKVKWTRTRFEGSSETYISGTIQYQNSGTKTYNGKEYSLNLSTLGSDVLNYIEKGTNFDLPLIAFYECDRLWISKDKIDIEDSAKKQYSRFEPYLDCFHTGADDKSIAVWLLKLELAELQKKIKSPMKMAIEYAAKKALESCVGFGFDFDESRVMVRFEDGSSTPFEHLSDGQRTILGLFCDIARRAAILNPHLEESVCEKTEGVVLIDELDLHLHPKWQRRVIEDLRTVFPKIQFICTTHSPFLIQSLRSSDELIMLDGEPLIEYSNKGIEEIAKNMGVNRPDVSVQYELLKEVAHSFLETLDNDRLSPSEFHQKYQTQLAELIKPYSDNPAYQAFLERKYTARTGFEL

SEQ ID NO: 85191 - protein, 249 aa, Pseudoalteromonas sp. H103
MRPVKKGATPVAAFNRYEDAFDYLLDRVGIGEWSGIKIGQYCSYCERCIQTNLAVEHIEPKSGDFAKPELQKEWSNFLLACVNCNSTKGAKEVDLGSIFLPDRDNTFRAIQYKQDGTIEPKDGLSEHDRQLAINTINLLGLNNSINSDLSGVAKDRRVQRLNVWMIALNAYEDFQNCVDKKTLQRTIVREMLSNGFFSIWMKVFEEEINIKKLFIESVKGTKDSGCFDEFGASNSQHPNGDNLESGGKI

SEQ ID NO: 85192 - protein, 544 aa, Pseudoalteromonas sp. H105
MNDSRLKAKISRYENGDISAAFDLFKKNYEDGQLETSLKYMDFCLSETLSIDKNFKPKNKIFLKDLHLVNFRQFKNLKINFESDLTVIIGPNGSGKTSILDALTKTISFINARFLRQGRSGKPLTRSDVRVNCNSCAEVITSLELGPNTHYSCNLVRPSDGISSPKSSQLDSYHEFSSLYRVTNDVQKNLRDEEINFPLFASYSVLRTYNKKDVLSYDLEMLPKISAENRLDAIDPSAIDGTSNLDTFLEWYVALTFMAEESAEENKIQSLEDQYRSLKEIVTSDSHPLKSLLDDTQFKLQELKSKKTVVKNNNYSKSKLIIDNALIKGVPGITSIKVDTSTGRAEVQATIDNNSIVIKNLSQGQQVIIGILADVSRRLIMLNPTLDNPLHGQGVILIDEIEMHLHPKWQLFLLESLQNTFPNLQLILTTHSPQILSTTKKDKIRVIGVNVDNELIAVSPVNETLAHPSTDILESVMKVSSIPELPITSELNKYRALIEQGDIESEDILTEIERYKSLLDKEIGNQHPEMIKLDMVLRRRKILG

SEQ ID NO: 85193 - protein, 238 aa, Pseudoalteromonas sp. H105
MKYIIKQPGHRLLELKNVNPPTCARTATTAWKNFKGKSETAQYCFREQKGLCGYSEVQLVYSTPILDDITFNDLGVDLGYHIEHIVPKSTQPDKTFDHLNLILSSICSESLKSLDRRDVFGGHAKQSWYCPNGFIHPLLEECIKYFHHEMSGRVIPKANLERREKAKARLTIYRLNLNASILVNWRRNWLEQLTKIIDSLLDNPDALKAFAELELTPVNDILRPFYSAQKQVFGRLNV

SEQ ID NO: 85194 - protein, 588 aa, Pseudoalteromonas sp. XI10
MQLRYLAIPHFRNLRDVEMNFAIELSHSSSTGKSEESKRIRSHALIGQNGTGKSNLIEALITLFRDIDLDREAAFDYTIEYEIRGHIVRVEADTSRQKRPFVWVDGDRVSQEYLTKNDSPGKQERDYRRGPRLLPSHIFAYYSGRNERIEALFQEHQRRFNQRMEINTRIVIPEEAFIHGDPDDIARLIESKRVESRLNDDRLRRLFYCRGGHSQLVLLACLLSDDPVFKKVLDNLHIESLESALFVLKEPHRLREKRRNGKFDENELNEGDPRFWYARGNVVSEFLDKLWQVSWAPIEQEATKQIDFRGRTEKQKQLYLFVPDKHKLKELGELVGSPDSFFRYAEGAYIGDLIDEVRITVKKRDEHGGKVSFTQLSEGELQMLTVLGLMRITREDQCLFLLDEPDTHLNPIWKLRYFDDIEGVLTTEKDSKSQSESQILITTHDPMMVGSLKKEQVHIIKNNGDKTLVEQPDEHPQGMGVTGLLKSELFGLTSTLDVETERRLYRRNELFAKENKTSEENDELARLSQELADLGFSMAEFKDPVYAMFVRKMAQHRKFNKPSLTADEIKEQDEIVDSIIDDILNGEE

SEQ ID NO: 85195 - protein, 289 aa, Pseudoalteromonas sp. XI10
MRYINMNGLTPVNTPANPDFPDWIPWTEQQWQEWLSRSRQYNRRLTELHNAGDFETRNDYINARSTHWGRLKEWLKVLSYGKCWFSEVRDLYSHYDVEHFRPKAKSKSTDGTERDAYWWLAFDYTNYRLCGNVGNRKKGNWFPLRVGSLISSFQTQNEESEEPYLLDPADADDVSLISFDEEGKAVPSPGATEWETMRVEETIKRLKLNEHNDLAEARRKVWLDVSTEIDEYLKHKARCNNGGNPVAREKVRAHCVNIRNMTLPNAELSSVARWCVMFRNDPQLSRLVA

SEQ ID NO: 85196 - protein, 439 aa, Vibrio vulnificus
MTQNFFINTLQLQNYRCFEKIELGFKPGINVILGNNGAGKTSILGAMSIALGTWFRGMPNVDGRTIQNEELRLVRKKKGDLVVFDLAGECSVKAEGCINGESIEWKRTRFVGGTTHKDAKDMISEANKVNLKVAKGDDTILPVIAYYGTGRLWGERRLGVVKKSKVEDVAEKTGRYLGYLNALDPASNEKLLKKWVSQLAKASFHEGIVYDSLTSVYQVITNCVEGAKRTFWDPRESDIIIEFMDGTQVPFYLMSDGQRNICATVGDIAMRCIQLNPHLKEKAPSQTPGVVLIDEVDLHLHPLWQRVILSSLEKNFPHIQFIVTTHSPFIVQSLRNSQVLVVDGSKIELISLPESMSLEDTAEHILKVENAVKSDSFNNTVDLGKQMFALQEQKSTLDKSSDEYLEIDNKIRELREKLAQNSPYYSSNPLITAYLMGLK

SEQ ID NO: 85197 - protein, 216 aa, Vibrio vulnificus
MRPVERSAWPKDEDGNELRFKTYKSFFKYLEKAFDNCCSYCEHVGKLDVEHVVPKSHDSTLEVEWSNLLLGCSSCNRDFKKNNNSSRDDYLWPDEVDTFLAFDYLNTGHVKVKTDFPQAREAQAILDLCGLAPEPKNEIKEPNDYLWKLRADIWTVAENELKKYNEGRSTIEDIAFIAKPMGHWSIWVTVFQSHREVVEAISEKYRGTHSNYLPQR

SEQ ID NO: 85198 - protein, 523 aa, Vibrio harveyi
MKVDKLHIRSRFKNLENVQVNFDEDNLMTVVVGLNGSGKSNVLEALVAIFRNLDLGEAPPFSYELKYQIGEEKWANWYEIKVDANPERGTLSKQYQVYVKNLNSKENKFQLVPFSKVRRDKKTKRAEYLPNFLFAYYSGPSDRLEKYFRKHRDDYYRELLYNKIDLKADIRPLFYAKPLHSQFVLMAFFLSPDFKKERKFLKEQLGIESLDSIHFVLRRPSWEKDKDDAFWGADGVVRDFIELLFPHALAPVKVTRNEDISLTGKNRKNDFIHVFLPSVECLYDLTKDLGNNPASVFFKMLESTVLSEIISEVHVRVKVTYSEQPITFQELSEGEQQLLTVLGLLKFTGGKDSLFLLDEPDTHLNPSWAVKYLKFLRDFVPNHETSHLLMVTHHPLAIAELQKEQVQVMWRDDEYLVHAKEPEENPRGMGINLILRSDMFGLKTTLDDDTNKKLKTRNALAAKDKLSEEKIMREEGRDPETEEEYLKRLNVELDALGFNLASDDPDYLDFLRERYSQKSERDI

SEQ ID NO: 85199 - protein, 269 aa, Vibrio harveyi
MRWVCKDDIEECLSQAWREKAAQARADLIAAPDAQARKQVLRRVASSNVWREFYDLLPDNLKKKCWYCEADDIRSDMPVDHFRPKNKVEEECEHDGYWWLAFDWENYRCACTFCNSRRNFEETQGGKACRFPLENPESRAFTPQDVECLRAELPDFLDPFNPDDEKLLWFDNDGLPEPKPGADENQVRKVGNSIDIFHLHETRIVRARNKIRIEIDKHVKKIRDNDGALDAKRTLKRMVRDTEKLSRAAVVYLRAHRDLPEVKEILRLD

SEQ ID NO: 85200 - protein, 542 aa, Vibrio albensis; identical to SEQ ID NO: 81262

SEQ ID NO: 85201 - protein, 257 aa, Vibrio albensis; identical to SEQ ID NO: 81263

SEQ ID NO: 85202 - protein, 458 aa, Escherichia fergusonii
MLNFRCFKQLDITFDEHITILVAPNGAGKTTVLDAVRLALFPFIRGFDASLYVKDKSLAIRTEDLRLIYRQEALNMEMSSPAKITATGEWASGKTATWMLDKRGEQPPHEDKMAAQLTRWGEQLQKRVREEHSLQQVELPLMLYLGTARLWYQERYEKQPTEQRLDNSAFSRLSGYDDCLSATSNYKQFEQWYSWLWLSYREHQITQLESPSAKLKEGVRVQRMKEAIQAIQQAINCLTQQVTGWHDLEYSASHNQQLVMSHPQYGKIPLSQLSDGLRNAVAMVADIAFRCVKLNPHLQNDAALKTQGIVLIDEVDMFLHPAWQQQIIQSLRSAFPQIQFIVTTHSPQVLSTVKRESIRLLEQDENGNGKALMPLGATYGEPSNDVLQSVMGVDPQPAVKEKADLQKLTGWVDQGKYDEPKTQQLMVALEVALGEKHPQLQRLQRSIARQRLLKGKAQ

SEQ ID NO: 85203 - protein, 201 aa, Escherichia fergusonii; identical to SEQ ID NO: 83303

SEQ ID NO: 85204 - protein, 459 aa, Enterobacter hormaechei subsp. oharae; identical to SEQ ID NO: 82560

SEQ ID NO: 85205 - protein, 211 aa, Enterobacter hormaechei subsp. oharae; identical to SEQ ID NO: 82561

SEQ ID NO: 85206 - protein, 459 aa, Enterobacter hormaechei subsp. steigerwaltii; identical to SEQ ID NO: 82560

SEQ ID NO: 85207 - protein, 211 aa, Enterobacter hormaechei subsp. steigerwaltii; identical to SEQ ID NO: 82561

SEQ ID NO: 85208 - protein, 391 aa, Enterobacter hormaechei subsp. steigerwaltii; identical to SEQ ID NO: 83666

SEQ ID NO: 85209 - protein, 210 aa, Enterobacter hormaechei subsp. steigerwaltii
MGNISFVIEEQHLMDHAVAQGHQFWSDSSLEAIKRKIKDYLRENQKHCCCYCSRNIDDEFNMVLDIEHIIPKSKIVSEMFQMNNLAVSCKRCNMRIKGEDISFIDADFQSFKEAGDYYQSNSYKFIHPNLDTWDGNLNYIVAQVNRRKVVYYQVVDDSPKGTYAKKYFELDKIQANTFDEAQEATARKEPNDPEIAKEFSKLVTTMLGQE

SEQ ID NO: 85210 - protein, 534 aa, Enterobacter kobei
MKVDKLHIRSRFKNLENVKVDFDENHLMTVIVGRNGSGKSNVLEALVAIFRNLDLGEAPTFSYELDYQLGEEAGVKWYDVKVDADPDRGTLAKQYQVYVKDKHDSKADFKLTPFSKVKRDKKTKQAEFLPNFLFAYYSGPSDRLEKYFRKHRDDYYRNLLYNKLDLKADIRSLFYAKPYHSQFVLLAFFLSDENSPQRKFIKEHLGIEGLDSIHFVMRQPEWAKLKGELFWGAQGVVRRFLDELIQHTLSPIKVTRQEDTSLTGSYIRNEFFHLFLPDVNALHEFARDLSADELFKMLESTLLSEIISEVSIRVKVTSSREPLTFRELSEGEQQLLTVLGLLWFTGGKDSLFLLDEPDTHLNPSWAVKYLKFLREFVPNHETSHLLMVTHHPLAIAELKKQQVQVMWRDDENNVHSQEPYIDPRGAGFMATLTEIFGLNTTLDLETQKLLDDRNELAHIENRTEDQNNQLDLLNDELNRLGFSLENRDPLYSEFLLAWQDLRYSDKPPLTPDKAAQRRAAMKNVIEALKAKKGC

SEQ ID NO: 85211 - protein, 280 aa, Enterobacter kobei
MIYIKRDATLIPAKVLAVAQRAQDALEQLPAEQRKGFIKKKSHIWRGFSKYLAQMSYGKCWYSEAKDAGANFDVDHFRPKAEAKRTEDLVDADGYAWLAFDWENFRLSAQNCNRLNTDESGNTVGKGSWFPLLDGSPKACWDNRCINDEKVTLLDPVVKADLTYIDYDDSGRFTSSKLCVGKAALRVRQSGIIYGLNLEKMREARFQVMREAKELLETIHQCAEDLDPLGNEAPMRTIERQIEQLQSRTRADAPFSRAVRTQLIKLGAEDYLIDRSLDAA

SEQ ID NO: 85212 - protein, 391 aa, Enterobacter hormaechei subsp. steigerwaltii; identical to SEQ ID NO: 83666

SEQ ID NO: 85213 - protein, 210 aa, Enterobacter hormaechei subsp. steigerwaltii; identical to SEQ ID NO: 85209

SEQ ID NO: 85214 - protein, 465 aa, Salmonella enterica; identical to SEQ ID NO: 81228

SEQ ID NO: 85215 - protein, 198 aa, Salmonella enterica; identical to SEQ ID NO: 83961

SEQ ID NO: 85216 - protein, 465 aa, Salmonella enterica; identical to SEQ ID NO: 82620

SEQ ID NO: 85217 - protein, 198 aa, Salmonella enterica; identical to SEQ ID NO: 82621

SEQ ID NO: 85218 - protein, 459 aa, Enterobacter hormaechei subsp. steigerwaltii; identical to SEQ ID NO: 82560

SEQ ID NO: 85219 - protein, 211 aa, Enterobacter hormaechei subsp. steigerwaltii; identical to SEQ ID NO: 82561

SEQ ID NO: 85220 - protein, 422 aa, Sphingomonas sanguinis
MAPQRLGQGRNMVTLRDLELLERGRDESVALLVGPNGSGKSTFLRGLAETHKHQNVIVVSNTPHDRFARMRGIRRISAGRSDHTPPNIVKRAVSRSLDEDDSRFHQVSAIMSYCGYEPRFGFAIEPGKRYGSTIDDLRMAAFAARAPGPGGGVQDTIDDVDRNGELDRALEFLRRHASREPVWIEAGRSDYRFSLSRDFVSVLRCEVELRRHKVIGRLDVLLEREGPRRGGIEMHLASSGQLALISSLLFLITEAGPNPIVLIDEPENSLHPAWQREYVDKLLAAMAYRDATIIIATHAPLVVTGAMNDGSAPVAVFRVSGGQPQRLQIDATVSRSGIEEILWEAFGVVTPANHFVSEEIVKSIDRFEKSEIGKEEVLTLVDNLDERSFDPRQKRFFVAVRGLVDKVERAKDGIDEEGEDVG

SEQ ID NO: 85221 - protein, 218 aa, Sphingomonas sanguinis
MVDPYLPALETFIFNAEEQAAIGSALETDKPWDWKPGGDVEASLVSVKSKIRDLHLARHNHRCCYCRFPLHGGGHFVIDREHVLPKSVEAFRHLSFTVWNLGASCKRCNMQYKGADVDFVIDSGCADALQQSANYRLIHPNFDSFKDHISFRLEADDDVTLIKYTKRPGSDKAVYTYNYFGLRAREVSAADEAQGLDVPQQLGEWATKAQEMAREYGQ

SEQ ID NO: 85222 - protein, 756 aa, Sphingomonas sanguinis
MSRAAQSGRERMREFFSLPAKRRAQTPVPPPGLRSDDSDLVTALARMSYGRCAFCEAEDELVAHRLRPAGNALPQREDSRNTSHLYYLWLGDAWQNFFPICRGCIPKEPQFPVAGERAKLPQGPQLNNYLERGGGVWPSYPPKEEPLLLDPVSDTGFERHLIPKLNGEIVGESRRGELTTVIYELNRDDRKGQRYQTYAARIDRLLSMVRNEPEETQGNDWQHLFDFQRMEFGGSWFLMLRRIARWVGGSRGVKWRTSRAHIRTFFLKLSATGDAPDRVRDALAAIAREDEGLRAGRWRLAAIYSLRTPIAAVEISNFKAIERLQLRFTAPPPPDLDMPGPTAPSLVILGENATGKSSILEAIALALTSGPARTALELPWSQLVLDASQMGGDRKTSPKRADIKVTLVNNQSISLTIDQGSPIVRSEFGNQQVPVFAYGAFRRYLIQSRRSAPHKHIRNLFDGSTLSNPEPWLKSLPADTFNLVIRTLHDLLSIEGAFDVIQKVGSQLRMVTSITDPDGQVRYNKAPLQSVSSGYRSMLAMVCDIMRGLLDPQVYEKFESFETAQGIVLIDEIEAHLHPRWKVQVMTSLRKALPGMTFIVTTHDPLCLRGMSNGEVCVLQRVASNDSDQASNLPILVEQMAGLPEVANMRIEQLLTSDFFQLLSSDDASSDRRLAHIAELIRSREDKSLQGTDAVVLQKFEEDIAMALPVGSSEVHQLVQGAVAEYLQKRRDASSKTLAKLRDDAKAEILRALETL

SEQ ID NO: 85223 - protein, 310 aa, Sphingomonas sanguinis
MRKVARDAVHAPKSLLPGEAGPKELLAAVEHRGKPQPKKAFEYKAYKRADVRLALEQLFHGKCAYCETSYSATAPVDIEHYRPKGAVAEDPAHGGYWWVAMDWDNLLPSCIDCNRKRGQRIFEVSTNLEELARTSKPVSGQAGKKDSFPLAGSGARAVYNAMDFSDEHALLLNPCRDDPASSLAYSFDPKYPAGLILPAGDQPHAERGAVSIQVYGLNRQKLVEDRTRLLRRLEYLGDMVIDLASSIQELEDPAVAATLAGTPAAGVAARLRLLRDRTLAEIKATTADDAPYSSMARAWFGRFKTQFLTA

SEQ ID NO: 85224 - protein, 274 aa, Pseudomonas psychrotolerans
MVARALQHLFMVEGELNVILPDRANSRCMVVTQVGSGDETHEIHTPLSVVSSGFRSVLAMVCDIFEGLLKEKVVRERGFAAAEAIILIDEIEAHLHPRWKMQIMTAFRRVFQSATILATTHDPLCLRGMHDREVLVLSRVRRETVADGQVPVVVETLYELPNVENLTIEQLLTSDFFAMFSTDSPDAERKLADLGALLAKRAGGGQLNATEQTVIGQLEREVIDALPLGSSEVQRLVQEAVAEYLERRRSVSATKLARLQRDARQRIIAALEGF

SEQ ID NO: 85225 - protein, 333 aa, Pseudomonas psychrotolerans
MRAVDRGNKPPPAALSVPSGTPKLSELEAARSHMNEVLAPGVKRSTFTFSKYKSDEVKRRLEELFHGKCAYCESFYASQAPVDVEHYRPKGAVEGEPSHPGYWWLGMEWTNLLPSCIDCNRRRKQRAPLGTSNLSLLYKATQSGKKDSFPIKGRRAREEGHHLDAEEAFLLDPTRDDPSEHLVYWLGNDKAGGLVLPRRVDIAVPMDFRLAAVGEPSDVAANAGTDDLSVRGAVSIQVYGLNRLRLVQERARLLQRLRFLESMSVELGNIVQDLEAARLQAIPAVTKAIRSLKLLQGKILSEMTGLAAPEMPFSTLAAAYLTDFKKRIITSGA

SEQ ID NO: 85226 - protein, 465 aa, Salmonella enterica subsp. enterica serovar Senftenberg; identical to SEQ ID NO: 81578

SEQ ID NO: 85227 - protein, 198 aa, Salmonella enterica subsp. enterica serovar Senftenberg; identical to SEQ ID NO: 82591

SEQ ID NO: 85228 - protein, 465 aa, Salmonella enterica subsp. enterica serovar Mbandaka; identical to SEQ ID NO: 82624

SEQ ID NO: 85229 - protein, 198 aa, Salmonella enterica subsp. enterica serovar Mbandaka; identical to SEQ ID NO: 82641

SEQ ID NO: 85230 - protein, 465 aa, Salmonella enterica subsp. enterica serovar Senftenberg; identical to SEQ ID NO: 81578

SEQ ID NO: 85231 - protein, 198 aa, Salmonella enterica subsp. enterica serovar Senftenberg; identical to SEQ ID NO: 82591

SEQ ID NO: 85232 - protein, 465 aa, Salmonella enterica subsp. enterica serovar Senftenberg; identical to SEQ ID NO: 81578

SEQ ID NO: 85233 - protein, 198 aa, Salmonella enterica subsp. enterica serovar Senftenberg; identical to SEQ ID NO: 82591

SEQ ID NO: 85234 - protein, 410 aa, Salmonella enterica subsp. enterica serovar Javiana; identical to SEQ ID NO: 81604

SEQ ID NO: 85235 - protein, 224 aa, Salmonella enterica subsp. enterica serovar Javiana; identical to SEQ ID NO: 81605

SEQ ID NO: 85236 - protein, 465 aa, Salmonella enterica subsp. enterica serovar Senftenberg; identical to SEQ ID NO: 81578

SEQ ID NO: 85237 - protein, 198 aa, Salmonella enterica subsp. enterica serovar Senftenberg; identical to SEQ ID NO: 82591

SEQ ID NO: 85238 - protein, 465 aa, Salmonella enterica subsp. enterica serovar Senftenberg; identical to SEQ ID NO: 81578

SEQ ID NO: 85239 - protein, 198 aa, Salmonella enterica subsp. enterica serovar Senftenberg; identical to SEQ ID NO: 82591

SEQ ID NO: 85240 - protein, 465 aa, Salmonella enterica subsp. enterica serovar Senftenberg; identical to SEQ ID NO: 81578

SEQ ID NO: 85241 - protein, 198 aa, Salmonella enterica subsp. enterica serovar Senftenberg; identical to SEQ ID NO: 82591

SEQ ID NO: 85242 - protein, 465 aa, Salmonella enterica subsp. enterica serovar Senftenberg; identical to SEQ ID NO: 81578

SEQ ID NO: 85243 - protein, 198 aa, Salmonella enterica subsp. enterica serovar Senftenberg; identical to SEQ ID NO: 82591

SEQ ID NO: 85244 - protein, 469 aa, Salmonella enterica subsp. enterica serovar Worthington; identical to SEQ ID NO: 82612

SEQ ID NO: 85245 - protein, 198 aa, Salmonella enterica subsp. enterica serovar Worthington; identical to SEQ ID NO: 83489

SEQ ID NO: 85246 - protein, 465 aa, Salmonella enterica subsp. enterica serovar Senftenberg; identical to SEQ ID NO: 81578

SEQ ID NO: 85247 - protein, 198 aa, Salmonella enterica subsp. enterica serovar Senftenberg; identical to SEQ ID NO: 82591

SEQ ID NO: 85248 - protein, 465 aa, Salmonella enterica subsp. enterica serovar Mbandaka; identical to SEQ ID NO: 82624

SEQ ID NO: 85249 - protein, 198 aa, Salmonella enterica subsp. enterica serovar Mbandaka; identical to SEQ ID NO: 82641

SEQ ID NO: 85250 - protein, 469 aa, Salmonella enterica subsp. enterica serovar Worthington; identical to SEQ ID NO: 82612

SEQ ID NO: 85251 - protein, 198 aa, Salmonella enterica subsp. enterica serovar Worthington; identical to SEQ ID NO: 83489

SEQ ID NO: 85252 - protein, 465 aa, Salmonella enterica subsp. enterica serovar Mbandaka; identical to SEQ ID NO: 82624

SEQ ID NO: 85253 - protein, 198 aa, Salmonella enterica subsp. enterica serovar Mbandaka; identical to SEQ ID NO: 82641

SEQ ID NO: 85254 - protein, 465 aa, Salmonella enterica subsp. enterica serovar Senftenberg; identical to SEQ ID NO: 81578

SEQ ID NO: 85255 - protein, 198 aa, Salmonella enterica subsp. enterica serovar Senftenberg; identical to SEQ ID NO: 82591

SEQ ID NO: 85256 - protein, 465 aa, Salmonella enterica subsp. enterica serovar Mbandaka; identical to SEQ ID NO: 82624

SEQ ID NO: 85257 - protein, 198 aa, Salmonella enterica subsp. enterica serovar Mbandaka; identical to SEQ ID NO: 82641

SEQ ID NO: 85258 - protein, 442 aa, Aeromonas schubertii
MEIKQLTLDNLGRFERLAIEFAPTQRVNSKVTVLIGNNGAGKTSVLKSLATSLSWFVARLRSDKGNGSPIPEEVILNGANTAVVSLQLHDQQREYRWSLTRTRAGRKSNEQSILVDASKLADEYRARLTEQENVSVPLIAFYPVERGVLDIPLKIKERHSFFQLDGYDNSLNQGVDFRRFFEWFREREDSENESVIPEDVLKQLEKTLAPSIWQTLQQQQASARDRQLTAVRVAIANFMPGFENLKVRRKPRLHMSIDKEGQTFNVLQLSQGEKSLMALVGDIARRLAMMNPELENPLHGDGVVLIDEVDMHLHPQWARTIIQRLTDTFPNCQFVLTTHSPLVISDCKDVLVYSLDNGELTEVPSQYGQDANSVLLEVMDTAIRNERVANRLNDLLDLIQDRHFDKANALLAELKAELPANNLELTKASLLLRKEELRRAQD

SEQ ID NO: 85259 - protein, 216 aa, Aeromonas schubertii
MRKIDKGQEPASLAAFKRQHPHARYHDLPNDEEGQAIRQHIREACAAEQFHLCAYCCQAISGTSEDTMNEHVEARDLAPNRTMDFSNLVASCKTPKQCDAAHGSQPLPLTPLMPECETELRFKWSGRVEGVTERAKEAIRVLNLGDTEQSNKVLVAKRKQLVDSLIWTHYGDDQQALALEDDAQLLAMLIEDLCQPKQGKLEPFAPVLVNILRSQL

SEQ ID NO: 85260 - protein, 413 aa, Myroides odoratimimus
MKLKKLYLKNIGPFLDDEIEFATNENAGSQVTIVTGENGAGKTIIIDAIRKMFLEYEGDSIRSIRRGKDFLLNMELELNGANLLLEARLNEGNSKESFDIYNRGEKYEFFLKALFDSSSAKGNKWILNYWTSQNDHQTFSINTLGFIKLEGYLRNCLDGIQRNTDTTQIVTFFDYFKSSSNPTERAEGEYIYEVLKKIFKISLLDGELLHVERSTFLPVIRQNGVDITIEKLSSGNLYLVQRLISLLSQMYSVYKLNDLPLAELCLTPGVLLIDEAENHLHPKWQKTFLNSILELFPNLQIIVTTHSPFIVGSVEGAKVYVCKPEIGYSKIIDETSKYSNKPIEEILSSDVFGETSSFANVEIDKLLKERIEAIEAGDKTKEKEIEEKLIAINPQYFGYLNLDDTLKQLLETK

SEQ ID NO: 85261 - protein, 214 aa, Myroides odoratimimus
MRYIDRLDKPQKLVDNEEKWLAKYLEKRALSDKVTPHTSQYGHKEVKETLARSSFYKCFYSEVKFADLSEAQVDHYVEVSEDPTKAFEWENLYLSHKDSNVGKITNRALPNQDCLDPCTAIDAEIEEHLGFEDEVVIGLTERGRKTIQKYHLNKPLYSKLRSTELRKLDKIIRQRALSELPFDEKFKAKLRIFANPDQAFSLMFKKLLIENGLL

SEQ ID NO: 85262 - protein, 535 aa, Elizabethkingia anophelis
MKNKEETYKCKGFKLLSLSLKGNSLTGKSDLEYDFVDENDEQNIIYTTVLIGANGTGKSNLFRIVIELFKELHDLSLGKKRSYKVDGNFKLKFFLDGDIFEYTNESDTESENGNQAFLLRNGSQVDFDEAQFPTAIVANSIMLTDKFPFYRKENNDKGEKVDAFPIYKYLGARDLPQSASTRAYVRRTVEFIVEQFRKGNSRESRFIDNLRRATAFLELDNYIDIIYKPLIGKVFFSGHLVPSSLDEYFEQIRERYQNSIRPPFKLNHYLKIKDDTKLIRSICDFCNGFTYINGAGTSSLRLASGTEITYNLIEKESFRKLSDEYFLLEHMRQLGIVSSPEIGLKRTGGYSLQESSSGEYHFFSSVVGLMATVKAKNSLIIIDEPEISLHPNWQMAYLSFLRDLFSHSDYANCHILVATHSHFLISDLKGDSSKIIGLKRADSGIEIIDLPKELNTFGWSAEDVLYNVFNVASTRNKFVAEDIANILNHLSSGKTNKINKLSKEKFDKLLYLEAALKENDPLKKVVKTILTKISK

SEQ ID NO: 85263 - protein, 222 aa, Elizabethkingia anophelis
MAVPQDYIFRIRDTYVRTLADDTEIDNDLNNNKKWSEGYKSFKSNIREHLRMQHNGRCAFCRCRVSTGTSWSNLEHIVPKKKYPQFEFLPQNLAYCCTRCNFGKGEGVTLSNPLQDRTQQLYPDNSAGFNIVNPYYDNFEDHINFIDDVIIVAENNSDKGNETIKFYKLYRPELAEERAFELRLDQEGVSHQLLARLTEPGLEQEVVNQINAIISRIPTWTL

SEQ ID NO: 85264 - protein, 520 aa, Myroides marinus; identical to SEQ ID NO: 81708

SEQ ID NO: 85265 - protein, 262 aa, Myroides marinus; identical to SEQ ID NO: 81709

SEQ ID NO: 85266 - protein, 432 aa, Tenacibaculum dicentrarchi
MKISKLKIAQYKHLENLDFDFTYQSGKRKGEPLDKICFIGQSATGKTNLLELLFSQIEQVLNQKTISGFLIYRTFLEKELDGELIINFDTEYKVKNGVTTYKEKEYKHKDIGGEVKDLMPNDKKSKLHYFKANIISDENIEIFTENPIDLIEKHPNITNNYKDKLVHVFDNNIDKLVYVFDNKVPKELWLSLIEDILDYRKKFTQKMSELIHKGLLNDPKKLQAEFSKWQQENPNKLMDFADKFNPLLEKLNLEVDLVNTEYSIPIINKRNEEIIPIQHTSTGTKGLLLSFLPLFKLNTKDAIILMDEPERSLYPDMQMSLMENYQNLAPDAQFIVATHSPFIAASFEPEERFILYFDEDGKVAVKRGSSPIGDDPNDMLKNDFGVNYYNKHGQNAYKKYLNLKQAIPKEKDTEKKKKMLFEFMKLGDTYNF

SEQ ID NO: 85267 - protein, 198 aa, Tenacibaculum dicentrarchi
MKRSIKKVDSEIIKENLNYIVGNSANNKKISNILYKEQKGFCAYTEEYIGRTDAKDIEHFNPKLKGKEADSYQNWFLVKHQWNKEKSSKWENFQPILHPTDSTFENRILYEDGDYFLANSNDIEAKNLINLLKLDDLMLADNRKKYIKRTKKYMKLSGESADNFFKTLINDYINGVHYLRAINEEFNINIWELLPEIQ

SEQ ID NO: 85268 - protein, 451 aa, Escherichia coli
MNIRTLKLTNLGRFEELDVHLAPVEEFKSNVTVFIGNNGAGKTSILKSLATSLSWFVARVRTEKGNGSPIPEDAILNGRSSATIELQVLNTHPATEAATPYRWLLARTASGKKSTTASSLQEASQLAAFYRDQYTQNSGASFPLIAFYPVERVVLDVPLKIKERHNFLQLDGYDNALNQGIDFRRFFEWFRNREDAENESGLPQDVLDKLSTRIDLDNAVLNALTAIMASSRDRQLTAVRTAISRFMPGFSNLRVRRKPRLHMSIDKNGQTLNVLQLSQGEKSLMALVGDIARRLAMMNPMLENPLNGEGIVLIDEVDMHLHPTWQRTIIQRLTTTFPHCQFVLTTHSPLVISDCKDVLVYSLDDGELTQLPSLYGQDANTVLLNVMDTDIRNATVAEKLNDLLDLIQKNDFINANALLNTLSLELPENHLELVKARMLLRKQEIKHARNN

SEQ ID NO: 85269 - protein, 219 aa, Escherichia coli; identical to SEQ ID NO: 82563

SEQ ID NO: 85270 - protein, 451 aa, Streptomyces acidiscabies
MYVTRLTLDGVRGFHGPRACDLDFARPGGGYAGWTVLAGRNGSGKTTLLRAIAIGLAGPRRAHKLDGDLRSQVSHGEPGGKLSVHVLPDPFVDTGEGMSDSFEASAMWEPDWDGPSEAPVAVVFGPVDFPRRARDRLWSAAPPPGWFHAGYGPFRRMTGVGLYDRTSKPSDRAAALRTLFEEQSALTEAFDWLLSVHLQALENRPGAADLKVGVLALLNDGLLPDDYRIEDVNSEGLWLNRRGEAGSEGPLTELRHMSDGQRTVVALVLDIVRQMHTAYGEITVDVRDQHPCLPYPGVVLIDEVDAHLHPSWQQRIGEWLKSHFPAVQFIVSTHSPYVCQAADPGGLIRVPGPTEDVPPAPVSEELRQRIVYGTGDDAVLSELFGLDTPYSERARELRQELVELEARVVTGEATDAEEARHAALRDRLKSSPRTRAVELQARLKQLGVLDE

SEQ ID NO: 85271 - protein, 251 aa, Streptomyces acidiscabies
MIRVRRIELPRQLAVRAEQLTERIAGTAGEARTSEAKGLWKHTTHRRELVTPLRALLNEMAHGNRCCMYCGDDLSTDIDHFEPVAENPLRTFDWLNHLLSCTACNSSCKRDQFPRDPETGDPLLIDPTTEDPFDHLYLSLDTGLYRGLTEKGRQTERVCGLNRDDLPEARCIARDGVVMCVEGWLSGREKGDHRKMAIAVRTVRNQPFADVAQFMLRQALLPKASVAFAFDLGEEILRHLRDPELRAALLI

SEQ ID NO: 85272 - protein, 389 aa, Myroides odoratimimus
MFFFFFDHYSDLTLNKEANEDVNILVGVNGVGKSTTLNELAKFHIKNKNNVIVISNTIYDKFSFRGSPTAHKLKSNYGKSMLKNVFDQVLLKLTKNDSKIIENIRKILQYIRFELEIGLSIKGLHLDYERLINECNEFERDEKNDIIFFINMLNKDIIARNSEINNVYRLNLDSSSFKSMKDVFYLNIIRFEKKLKKLKVLKRIDIVLYKDSQSFSLNEGSSGELSLIASLFFVSLHIKENSIVLIDEPENSLHPKWQVEYVKQFLDLFHLYKPKIILATHSPLIINGAEVTTDKLNIFKGNTFRQFRKKEKELKNVEEIYEDYFDITTPENRYISQYVVNKLNALDEQKITNDDFENDIEKLILNSYDEVQIDALKQIIEVSREISSN

SEQ ID NO: 85273 - protein, 206 aa, Myroides odoratimimus
MSLVFTQDEMNTITFISNSNLSNGEKWSSTQLLAIKRKIKDYYLRIGTSRCCYCKRNLLAEFNMVIDIEHILPKEAFPQYMFTIENLNVSCKKCNMKIKGSNMDFIVNVNTITANFRLSNQYYFIHPNFDDYFSNMKYYVKIKNDKTFTKYKPITPKGKYSYDYFKLNEFEVNDFNSLQGIKDQFNNMMGNLGAQYDRLVDLLKRV

SEQ ID NO: 85274 - protein, 452 aa, Escherichia coli; identical to SEQ ID NO: 82562

SEQ ID NO: 85275 - protein, 219 aa, Escherichia coli; identical to SEQ ID NO: 82563

SEQ ID NO: 85276 - protein, 445 aa, Xanthomonas citri pv. citri; identical to SEQ ID NO: 80878

SEQ ID NO: 85277 - protein, 193 aa, Xanthomonas citri pv. citri; identical to SEQ ID NO: 80879

SEQ ID NO: 85278 - protein, 445 aa, Xanthomonas citri pv. citri; identical to SEQ ID NO: 80878

SEQ ID NO: 85279 - protein, 193 aa, Xanthomonas citri pv. citri; identical to SEQ ID NO: 80879

SEQ ID NO: 85280 - protein, 445 aa, Xanthomonas citri pv. citri; identical to SEQ ID NO: 80878

SEQ ID NO: 85281 - protein, 193 aa, Xanthomonas citri pv. citri; identical to SEQ ID NO: 80879

SEQ ID NO: 85282 - protein, 438 aa, Stenotrophomonas maltophilia
MVSIRTAEVRGCQLDLYGDYLGDNRVTLVTGPNGAGKTHLLTSIAARIKNDDFSTGQIDGTVARLICQTYSPFSRFSSKGERGMSVVSSYRDGADDLSFYIPLGVTADKAFRPRRVTIDVLERAIIGVSQSDERAEHFFTFLKAAGFLEKCELAFNFLPKAQQFLEALKRDPQQTRWLLESTDAFAPLRELKRQCAGDDWGELANVIQTSVDTLGETVRKGTFTVQFGRDVASSSLTFARFQSLAVLRRLKLVRVSKAAVFRGSGEALSVASASSGEQQLLCSLLGLAGTLRNNAVVLIDEPELSLHPKWQIDYAKHMAQLMSIVKDCHVVIATHSPLIAQGFSSYGCRVTKLGSGRHGESADHQFGSVEKILVDVFESPVPSSLFLADEIMRAISEAEERPAAATDAIDRLKELSKTYSGNYEDQSLINEAIRLMKQ

SEQ ID NO: 85283 - protein, 239 aa, Stenotrophomonas maltophilia
MNNGLVRPPSGMDIGLSTAKYFALVCGLTDRVHWEAPPAHLEADLQALKASLKDYFYYGQARRCCYCGIELPNNKLAYQLDHVISRNDRADFMVCLLNLAVACGPCNGAKSKKAALATGIVAAELAVVPMSSEAYAIVHPQFDEWGLHLRLDEFNRVLHRTEKGRCTISICRIDKLNAARLSDHFAVGDRPKVVDLVVRVGSYKQKGRKIAAIQLLEKLAGRGSHRARVAVGRISLEVM

SEQ ID NO: 85284 - protein, 553 aa, Aeromonas salmonicida subsp. salmonicida; identical to SEQ ID NO: 81450

SEQ ID NO: 85285 - protein, 287 aa, Aeromonas salmonicida subsp. salmonicida; identical to SEQ ID NO: 81353

SEQ ID NO: 85286 - protein, 546 aa, Streptomyces reticuli
MRLLRLSLPSYRGLRHFELDLAGALDGGHAIATLIGPNGGGKSRALHALAEIFGALHRPGRRAGFAFELDYEVHDRTVRVVQTSPDSSPELTVSTSLGRPVRVARAVWARHLPDHVFGYQAHAQASWTSEFEQHRRFAARRIGQWRRQWMKDFDQWRAHHTPDEGELWTEQLTLPINCPLYTPVFLCTPAHLPLLLLAQTTHWPDSFGTYLRRHSYLQRVASAVLRIRAPRAGRAPHLAALPYWGLGGPARTLFAAAAESGRFGLIPDADPVDGAGSPAEGFQIVLGTAEDVRAFRNLFDSDLSMFGLLATLLDAGYLTVDVRLDKPGALTVGLDDLSSGEQQLLTILGLLRLQRTHESLFLLDEPDSHFHPEWSRRWYSSVRSVLGPHQHSQFLTATHEPLLVANMTREQIRVVTTDVEGQATAVIPRANPRGQGAGGLLTTDLFDLPTQLDEHTQDLIDRQYALLPEAEGDPVKQAALRDVTAQLETMDFPNSDRDPLVAAFLAELHRRRLALLEAAQGPNPPSPERLQALVAELFHERFSSVI

SEQ ID NO: 85287 - protein, 366 aa, Streptomyces reticuli
MQGLTAPPAWATKAKRTLDAVRAAVAAGTKRTFTMHWTEDAVRNLLLELVGDKCWYCETLIVRADITVDHYRPKSEVLDVPGHPGYWWLAYDMSNYRIACRHCNSGGARYNGVREGRAKGSQFPLIGGTRARTAADDLDREQPLLLDPAHHSDPDLLGFDSAGYARRSNTPYSLAETKRGLCRADETIRILALNDSHLVPLRSRLMREVGVLARYGDKTDIQQLIDDKVGPKAPYSSAAGMALALHRACDRPAAAPTTATTPTPAVDPARSRVDLQDLLQHLDPDDLKAGITLTGRHEKKVHQAVLNHEGQINVLGRPWRTPTTAARAATGSNKIDGWDFWRLTIAGVEQTLAEFRVTHFPPPAPA

SEQ ID NO: 85288 - protein, 465 aa, Streptomyces sp. DSM 15324
MYVSRIIVKDIKSFHGPRQVDLTLTRPDGGHAGWTVLAGRNGSGKTTLLRAVALALSGPVVARSLVPGFENWVAQGAAEGRVEIEIAWDTKEDRFSQGRRPAGAVRAGLLWTAPHDVSGARASVRRGTQPALDEIKYTKAQNSVARRGPWADNPAGWFCAAYGPFRRMAGGSGEVQRLMLASGPVARQASLFHEDASLAEGVAWLVEQHLRALEKRPGAAELKRTALAILQDGLLPDGYRIIDVDSEGLWVERDGRRFPLREMSDGFRTVAALVVDILKQMHDASGLSVRDAEGQPLFNRLPGVVIIDEIDAHLHVSWQRRIGPWLTDHFPHIQFIVTTHSPYICQAADPGGLIRLPGVDEARPPEVIGPDLYDRVVYGSGDDAVLSDLFGLDTPYSERAEHLRAEFVELEAEIYDGASSREVLARYRELKERLASSPSARLDEMSAHLHRRTREMARRPRDGEE

SEQ ID NO: 85289 - protein, 196 aa, Streptomyces sp. DSM 15324
MAPGHERCMYCGDGQGTDIDHFEPKSLAPLRTFDWLNHLLACSFCNSNQKRSLFPTAPDGSPLLVDPTTEDPLDHLRLVLPLGTYRGLTDRGRACIEVFGLNDRAVLVKGRVDAYERAGIFMRQWRITMDDGECDEARKIVRIAWDHPLIDVLVNMFHQSAHPAADALFAGEEKILDLLRDPELRTAFLHFRGVRY

SEQ ID NO: 85290 - protein, 540 aa, Vibrio cholerae; identical to SEQ ID NO: 80874

SEQ ID NO: 85291 - protein, 205 aa, Vibrio cholerae; identical to SEQ ID NO: 80875

SEQ ID NO: 85292 - protein, 540 aa, Vibrio cholerae; identical to SEQ ID NO: 80874

SEQ ID NO: 85293 - protein, 205 aa, Vibrio cholerae; identical to SEQ ID NO: 80875

SEQ ID NO: 85294 - protein, 483 aa, bacterium BRH_c32
MFKLLELQLQAHPFLGDLNLKFTDEGELENGPYTTVIIGPNGTGKSEILRLIIDILRENDQHLRNKEKTNPVNCRYELLVKHDSKIFSFNNKGSFSSNQTDYNVADVSCFPVKVIATSILLNDKFPVVDSKDDDIYQYVGIRRSPQVAGTRDLIKKVVKNISIIASNSGFEKNVKYLLKLLGYTQQLWISYYPRRKHIFFKGDLTIEKFSDFYENPHKYTQRKTESWSVSFYKKIKDNEKELTELIDYINYISSNLTDVSARSKAYFIDIFGKNRDIKKDIELIEKLERLDLVSYPGIDLEKEKSFDILNASSGEYHLLISFLGIMTKITPNSLLLLDEPDISLHLNWQMKYIHLLKESFKEYSNCHFLIATHSHSFVSDLEPSSSRLIGLTRDDENKITEIPLPKNTYGWSAEEILYKVFRVKTTRNYYLESDLRDLLHKIANKSEDKDGMSSILSKIKNLSFNTADPINLIIEKAEEYLKK

SEQ ID NO: 85295 - protein, 208 aa, bacterium BRH_c32
MIKQAQYNLSLTRNELKQLAQMKDWTGKQWENKSKDEFIISIKTKIRRQLEDVQKTCCYCGLKLRGTSKGDIDHIAAKARFRHPEFTFTLKNLALACGWSNTSEKKGTKETIAKKNKVYSKCEFLLVHPYFDNPVDHYEWTDSDIEILIQVKNNSSKASFSIKMFGLDTTEMSELRAAQVSYEKKKLEQTLSVNDEDLVKRTMEYKQP

SEQ ID NO: 85296 - protein, 367 aa, Stenotrophomonas maltophilia
MAVSHLPTDKFRLAGESSDFYRYLGLRQATNLTTTGALEAKVIQTLFNALLLPDFEARMSQWLALAGMDKDIGVAISVPDLKLLTGEHQVFVDAAADAAKRRYGRQRASSVLLNQDWFEDLDRMWRLFEELHKFKWQHRGRGAEATIQIMPGLLEVDNLDVWIHGFESARKWRIFTYLSLVLVKNGQAIEFSDLSSGEQQLIGTSIRLLAGLEPHTLVIIDEPEVSLHPEWQIKYVPTLMKTLEGEPSTHVVIATHSHFMVSDIKEQGSALITASGGRKPEFSIFDGEVYGRSPENILYRVFGVATAGNLNVERDLSVALRMMSGSLPMRRGELIKIYDRLRRVRGEDNVALNMIMNQIGSAIEVGE

SEQ ID NO: 85297 - protein, 206 aa, Stenotrophomonas maltophilia
MIKFDSCATISVEIQAGVDKFPAVERSKRWDGKAKAVVAFKKEIMRQGLEIQGHRCAWCTLEVGEKGRRSAHRDHVAPKSIHQVWTFNAKNLVISCEYCNGFLVKGDVDTVQVVNNVYEKCEFWVVHPYLDEVVKHISFWKADGASDILVKSHSDKGRWTVELFRLDTPEATALRAKDYLHAEHLVGLTARDEQLLKSAVGNLGKV

SEQ ID NO: 85298 - protein, 435 aa, Marinomonas fungiae
MKIESLRLEHFRRFDDFTISFDKQLTVLVAKNGAGKTSILDGLATALGPFLTRLPGVNGINPKETDFQIYPDGSKPAYMRITAESFEGVKWDRTEKRDKAKGTAKQIPEALGVKPINEYADGFIEQFNNRIAFELPIFAYYGAGRGVFDVPARKRGFGKNFTRFDALKGCLESRTNFRGFVEYFYSLEEIENNKQKEARSFDIEIAELRAIREAVNKMIPAFSNPRGAYPAGIYVDWQQDGIKKQLRIEQLSDGYRTTLAMVMDIAARMAEANPDNPDMNSPLDSHGVVMIDEVDLHLHPGWQQTILLDLMRTFPNVQFIVSTHSPQVISSVKPQSLRVIDWKKGAPELVPIAFSEGAEAQQVLLDVLGLESPRVEALNIVKTLEQYQALVAADKWDSKEALEMRQTLDEWGAEHEPELARLDMDIRIKEWEREQ

SEQ ID NO: 85299 - protein, 255 aa, Marinomonas fungiae
MKKVSKGIEPARLRHYRTQQPANTWEQFRSTQDRRIETQQRLIVDQGGLCAYCEIDLLQSTGHDESDFRVEHFHPKSGQSTPHNWHLDWQNLLGCCHGGSQRNVVDAGNRFTSPDSSCDVPKGDKNLDGVILNPLLIPAFPRLFSCDRASGHFSVDANNCLLANINAQTAQNTIDELHLDAERLKRLRSAVLNDLNAQLQTLVTQGMSIGIARERLAKAILRKNASGHWPKFFTSIRSYLGDAAETHLSAINYNG

SEQ ID NO: 85300 - protein, 348 aa, Comamonas thiooxydans
MMVLGEKKRVGIGGNSIDPRGYRRHSIRAWNHPDREMGRESVLLHETDKKLDGFCPLFIGAERSIKYHQIDGMTRELGLAQQRQKYSSNGTQSLYGVNPIDIKQWFINRYFMIDKEWATEERENWKRLIEKLPALAPFNSNFSYIRTEKDFEPIFSIYGEECYMEELSAGFQAVLSIVANIFQWVEATRSAGERLAANATGSVLVDELDLHLHPEWQFTLRDGLESLFPNIQFIVTTHSPHLLSSAKENEVIIMNREAGTSELTLKPTAKRFSGWSTDHILSEVMGVVSLENKDYEILISESFDKIQEGSIEGLKNAIFRLSEVAHPSDSILTVLNTRYASMVALSND

SEQ ID NO: 85301 - protein, 248 aa, Comamonas thiooxydans
MIKLSRDNKPAVLINNENSWTTSLIEAVTVFGGYSKIPAEQKEKLLIHYRHQEIKSVLFKSSLEKCAFCETKPGESGNIEVEHFAPKSIYPALAFNWENFLPACRKCNDRKGGHDTVSYPIINPYDSDPEDIFHYTDIKIAVNNIHKEIGERTISVCGLNSVRLMRPRADILVSLHSFSESLEEAIKDYEDAETDIKKQNKKRKIREALEIMESMTKPSETFSGFCKDYLKRCAPYHEAKIIVGEQIA

SEQ ID NO: 85302 - protein, 696 aa, Comamonas thiooxydans
MTPIDRPPCLPFMVRFLADRPATDPAGIDDFERLSNSAKAGLPRVLGKDYPKFREYLTETFAGKCCYCESPLGAATEGEIELFRPRIVDDPGPSARKELYWYLAQDWRNLYLACPSCNRNKAGRFPVQGGVRAQEGMPYSQVVNIERPLLLDPCDVYDDPDAHLMFLNDGSVAGRTERGRATVEILALNRRALVETRASEALQFQAATSNERRRRADGRGPYAAVWRQMLFAERHPEFSRESLDASSEQRAFDARRSDVSTEDATGLENYRAVARYIERIRIENFGAIGLLQLDLSGSMSSLAPCFALLGENGVGKSTVLRAVAMALSGKAYTRRLGLSSNALLPSNAYKGEVRVSIVGQPDLVMTLRRNRPIDFSKQTSSSLVLAYGATRLLPRGRHKPKSGERHAKIDNLFDPFLPLTDPEQWLAGLDPHRLSNVNGVLQRLLPPEQRLELVRDDTGQGLKVLIAGDPERRICELSDGYQSMLGIAVDIMQVMFLAYESMESAQGVVLIDELGNHFHPAWRLRCVSALRTAFPRVQFIFSTHDPLCLRGLVEGEVAVLRRNRLRQIYALEDLPPVHKLRVEQLLSSEHFGLNSTLDPLLEETIKEYENLIENSGRTEEEERRLDEIVGELTEAQYLGSSRRERMALQLLDNEKDLDIPTQTTVNVAELSKATVAKLKRLMGEIAPAQGALDDQN

SEQ ID NO: 85303 - protein, 276 aa, Comamonas thiooxydans
MIKISRPVGSAPPGLAKSAARELRSNREALKKNEKLAFNAYSSDAVKTALKKIFGRKCAFCESLLLGNQPGDIEHYRPKGAVVVVDPVTHVKTTVAGYYWLAAKWSNLLVACADCNRPRTQTDHDGDDRVIGKSSFFPLENESHRAANPKGMGLEVPLLLNPCEDDPAEHLEFLHDGRVQAARVAGVISPKGDATIHYCGLARIELLQMRSRHRRIVMAAIRHTVAALEAGHDPGADLDDLVAFMHPHEAYVALTRSLVKTHLSQYLHSLGLNQLL

SEQ ID NO: 85304 - protein, 540 aa, Vibrio cholerae O1 biovar El Tor; identical to SEQ ID NO: 80874

SEQ ID NO: 85305 - protein, 205 aa, Vibrio cholerae O1 biovar El Tor; identical to SEQ ID NO: 80875

SEQ ID NO: 85306 - protein, 444 aa, Thermobifida cellulosilytica TB100
MYVAKLAISDIRGFHGTRGVDLRFTRPGGEHAGWTVLAGRNGSGKTTLLRSLALALVGHLTGRRLVPDFQGWLSSGSSRGQINALVHPDPEWDLLNNGSPLREPFNTVLTWENLGDDRPGNSARSTLIVDVPSDLPLHRGPWSDNPRGWFVAGYGPFRRLGRGSSEAQRLMLATGPVSRLATLFNEDASLTESVQWLISLHLRRLEEREGAAELLEFVFSLLNDGLLPDGFRVLRVDSEGLWVVRDGGEIPLREMSDGYRTVTALVLDLVRHAFDAFGTEALGERDSVPTVVCPGVVLIDEIDAHLHVSWQKVIGDWLKRHFPRIQFIVTSHSPYICQSADPGGLIRLPGVDEDEAPRVVSEELYERVVYGSGDDALLTELFGIDSPYSERAEEKRRRLARLESAVLRGTATPEEVSEYEDLQRTLTSSFTARVDEVAGRIHRA

SEQ ID NO: 85307 - protein, 240 aa, Thermobifida cellulosilytica TB100
MIRIRRAKLPEPLRHQLARKTEELRASEAGPGEARNEWKRAENVRRSVRELLATMATGIKRCMYCGDNQGDAIDHFEPIAQAPLRTFDWHNHFLACSHCNSHQKRDLFPRAANGTPLLIDPTAEDPYEHLRLLLSIGEYEALSEQGEATIKVFGLNRTVLTRGRAVAFITMRSLLRDRQRLVQEGNPTEAAEITESLRFQPFADVLSAMLRYRHLPGAAVVLGGPDVLEALDDPELDFWS

SEQ ID NO: 85308 - protein, 573 aa, Enterobacter aerogenes
MIVRHVFDSKIIESAMKSSLKSNFQLIKDITEGKVETKGDGIADEIVTLVKEKIYSKRLRVSQVGVYGVRGIEDITLSIEDDLTVIIGNNGSGKSTILDSLSLTLSWLKASILKEEGVGTYLRELDINNSRDVSYGSVTCRLCLEEENFNFLSTKSKPGRSLSRRSALQEIKALGGLYRHVNSQFADSNLPLVAHYSVARSNEGTKDDFAKVGSQIGIKDKWGKFDAYEDVLKDRHDFNEFIVWLGRIDSIARQGGGINEEISKLQSEINSTINLLKMFKDKGNDQSFILPLEEIIKKKNKEISNIYNENFNRDEVLASKVFKHIKQAITIFIPDINDVRLVYEQEGVKLVLYKNNKEISAQQLSQGEKSLLSLIGDLTRRLVLLNPSLDNPLEGEGIVLIDEIDLHLHPSWQQTVILNLQNTFPNLQLIVTTHSPQVLSTVYSRSIRSLHEVNDVLNTIPSLDVNNKIIASETPEFQTRGVMSTDILSKIMGIDPVPLVKEAKWVQEYLAAIEYDKNTEGYYADLWADIVEHFGENHPVVISCKNAVRLKGMRGKIREMKKNKNEDIKKGKE

SEQ ID NO: 85309 - protein, 212 aa, Enterobacter aerogenes; identical to SEQ ID NO: 83835

SEQ ID NO: 85310 - protein, 457 aa, Enterobacter cloacae
MKRLYYAHHDTRTLKLAIEGDVSDNANIFTVIVGKNGVGKSRLLSQIAKDCIQNIYFSQTFNPLFDREIMPKLIAVSTSPFDKFPPGRRSLNNSRQENNYRYVGMRGEGPFGVSNAVSLLSSAARGWLEKLAYSENPANLLDVFHSLDFEPHVEFVFKPTYNGPDTPDFNFIGGYSDEILIEIQGLYLKHNIKIDRKNAESLSKLNFESRHDIYEALVEINRFESERKAVTLSVDFINGETLVGSTYASNYFSRAILKLMNAGLMRLMDMRLIKKSYGPMSLKRASSGEQCLLVMMLGIAGHITDDSIILIDEPEISLHPRWQEEFIIMLTKAFSTYSGCQFIIATHSPQIISNLPNKGCYITSLSKNYLYKAKDFSNRSADYQLAELFDAPGIMNEYIARLAFNLLSKVKTAKLVTDDNWSELKQLQLLLENVNSNDPINELVNSVSQVCEIYAKN

SEQ ID NO: 85311 - protein, 211 aa, Enterobacter cloacae
MPKISNPIEFSAESLIIIEEKLSSPDFKHTDWGDDDLQVLRAEIRNHYREEQRLECVYCHEPIGVRAAQAAPIEHIVPKSQYLSFIFEPKNLCVVCPDCNEFKGKNEVLFEPVINGERRRRYPTASASFRIVHPHIDDYEMHIIKANRVYVDITPKGHYTIGICKLNRFFHYFGACDEFVNDAKIAEANENFFKNGSITTNELLDDDIHLI

SEQ ID NO: 85312 - protein, 412 aa, Enterobacter cloacae
MSKFLYSISRSSEIKSENDNIDVGNKNLIITGGNGCGKTTLLNDIYNKLSTHLIQRNHQPKSQIENNIKFLLNQKENAVKGSQEYHQANQQLRYHQAELERVWGGIQLEFEDANKLSLLLSEGKGVIAFFRADRQASIQAATGANKIISTDESNYLSISNQELGNTLEQHLANLKTRQSFAKTHDNNLKLFNSIENWFSELEKNIAYLMEDTTFELKFNPDEFKFFLTQEGKKPYTFQTLSSGYSSIFNIISDLIMKTEAFKISPSELQGIVMIDEIDAHLHVSLQRKILPFLTKTYPSIQFIVTTHSPFVIGSLEDSIIYDLSSKQHFKDLSSYSYETIIEGLLGVPVVSVSLEKDIKRLSLLINEDNHDIEAIDEIVQKLLPYRDKLDDESAIFLIKGMNLLKCKARGDK

SEQ ID NO: 85313 - protein, 218 aa, Enterobacter cloacae
MFPVSKNSVPPISLERRTSYSEKDVIETLSKDFHNKCYICEVKDPLVLNVEHFKPHEGDENKKYDWNNLFFACGRCNNIKRNHFENILDCTDPSVDVLRSIKHVFPTTAYAEHVDIVPMNDDPKTIETATLISKVFNDDHTGNKDLTRIYLKKRLMRQYRKFLDLVFDYDDEDTLPEDKEIICRKIKNMLRVEYEFSAFLRWAILDAPLLHHFKSDVF

SEQ ID NO: 85314 - protein, 458 aa, Escherichia coli; identical to SEQ ID NO: 85202

SEQ ID NO: 85315 - protein, 201 aa, Escherichia coli; identical to SEQ ID NO: 83303

SEQ ID NO: 85316 - protein, 573 aa, Enterobacter aerogenes; identical to SEQ ID NO: 85308

SEQ ID NO: 85317 - protein, 212 aa, Enterobacter aerogenes; identical to SEQ ID NO: 83835

SEQ ID NO: 85318 - protein, 452 aa, Pseudomonas syringae pv. tomato; identical to SEQ ID NO: 81250

SEQ ID NO: 85319 - protein, 216 aa, Pseudomonas syringae pv. tomato; identical to SEQ ID NO: 81251

SEQ ID NO: 85320 - protein, 782 aa, Pseudomonas syringae pv. tomato
MQRFARNEIPPPIFREKRFKLARKELLELFTLDTQELSQTRITGEELSLDLSQVGPIHDALGHLFHGKCAFCESQDLTVPYRFRAASSVTSAMGMVDSHLYYVWLANAWENIYPICIKCIPRQPAFFPVDGKRVPIPSLEQIRRYAAEDLGSWRTSGPRESAVLLDPCIDRNFERHLFPSVDGDLLPLSERGDTTIANFRLDRLDLNKARAARLREYREALLAPDRNRANLRYSNFQNLFDFQELEFGGLWYLQCRLIARYLSQKVGMVMPTGRSHIARTLKTLLFMGDYKLSHEQLKSWIEETDFGHLPLEIPPTDYGVLEPAPVIQKAVVPRIYPSLHSLQFDHFKVIEHLKLKLDIPTAESQLNNAALQPALLILGENATGKSSILEAIALALSPRETRRALNLTPGSLVLSPAQLGSNDTPTQFWARVRLGFDEGRDKVLSIDNAACKQFGPRLVPPVFAYGAFRQYQKKTPPVFEPAHGIINLFETDRLLANPEQWLLGLKGEDFNDVARALKIIMSVEGDIKVIEPAPDGKSCLIVTAPAGVVTKTPLNDVSSGYRTILAMVCDIMQRLMDRRINPDFPGLEHAQAVVLIDEVEAHLHPRWKIQIMQVLRRALPKITFIATSHDPLCLRGMQDGEIVVVHSRSRAGGANTQYATCIEQLHDLPDSTQLTIEQLLTSDFFNLMSTDQPATEKQLANVADVLNKLKRKETLTDEDEQVMRYFEKEIKEALPIGTSEAQRVVQEAVAQFLQERREKPSIEWGAIRTDAKTKILNILRNS

SEQ ID NO: 85321 - protein, 334 aa, Pseudomonas syringae pv. tomato
MTAHYEKKSAALAAALAADDPVAASASVAEEFSAKKPPFTTHRKDSVKTQLYAIFHGKCAYCETFYPAVAPVDVEHYRPKGGVSQDADHPGYWWLAMEWENLLPSCIHCNRLNKHATPKLSTQLVELRADGTGFSDQYKVTTGKGNHFPILGPRATPASRDCSTEYPLLLNPCLDDPQEHLAFHVDRKKLIGLVLPKPHNGAGLPAHVSTTDLLPAFADEIDQALRDKLSLRGAVSIHTYGLNRLGLVQDRTRVLRQLAFLEESVKDLCAMIQSLEARINDPFAVENIRIIKRMEALVERTAQHMADMAKPQAPYSTMVREFLQGFEARLVAIP

SEQ ID NO: 85322 - protein, 477 aa, Pseudomonas syringae pv. tomato; identical to SEQ ID NO: 83378

SEQ ID NO: 85323 - protein, 209 aa, Pseudomonas syringae pv. tomato; identical to SEQ ID NO: 83379

SEQ ID NO: 85324 - protein, 531 aa, Enterobacter cloacae
MNKRIVSTIAKLEHKAKKGSWEAAYQLYEYYLDGKYVDKNYEVAIKYIDLAVEHIQSNFIGFDEIIIQDFRALDNLTLNLSLRNLIVLAGENGAGKSSVLDALSYSLSWLVNRILYKGGRGREIEKLDIRDNSERGYSSILTKLCLNRINKVRFELCELHLGSSANKKSYLNEVTKLGALYKFAGEHRSSFTLPIFAHYGVLRTIDINTKDINAIDDIVQINNNRFEGYINAFSGKADIKSFIKWFKRLDDIEKHRTVSTNNLSQDEDLINKLAVLAPSDVNARKLLESLMSKSKDKEEDSEVLEIYKIKQTLNHVIGEFMFGYSDLSIELQSGFSLNIKKENNKLNILQLSQGEKSLLALVLDIARRMIVLNPHLENPLHSPGVIIIDEIDLHLHPHWQRLVIRHINNIFPYCQFIVSTHSPQVISEVKHNEVVILDKDESGSIIGFSPSQSYGLTSNEILNELMSPEERQLIRNEKVEYEIKNIFMLIEEGKISEAEERIYALEDELNGSIPELVRAKMEIELDGWDKE

SEQ ID NO: 85325 - protein, 211 aa, Enterobacter cloacae
MRQIIKNKEPIELTTYKKIKDAEYDGPNFTPVKAIVRSSLLNEQGFLCAYCMRRINFETMKIEHWACQQKHPNHQLDYANLLACCLGHEGCSPHEQTCDTLKGSCELKFSPANSHHRINDIIRYDFLGEISSTDDSFNMQINKVLNLNKSRLKLNRREALKVIQAKLAEKIGSRKSAEIQKLINIYNQKNSQGKFFEYYGIIIYYLQKKFN

SEQ ID NO: 85326 - protein, 477 aa, Pseudomonas syringae pv. tomato; identical to SEQ ID NO: 83378

SEQ ID NO: 85327 - protein, 209 aa, Pseudomonas syringae pv. tomato; identical to SEQ ID NO: 83379

SEQ ID NO: 85328 - protein, 452 aa, Pseudomonas syringae pv. tomato; identical to SEQ ID NO: 81250

SEQ ID NO: 85329 - protein, 216 aa, Pseudomonas syringae pv. tomato; identical to SEQ ID NO: 81251

SEQ ID NO: 85330 - protein, 782 aa, Pseudomonas syringae pv. tomato; identical to SEQ ID NO: 85320

SEQ ID NO: 85331 - protein, 365 aa, Pseudomonas syringae pv. tomato; identical to SEQ ID NO: 84623

SEQ ID NO: 85332 - protein, 459 aa, Novosphingobium fuchskuhlense
MTDAIHYLGLSLTNVRAFGGQQTLDLSIDGKPARWCVIIGENGVGKTTLLQSLAAMRPLPTVSGPESVFLDEELAEWTESAESVVQIPSKEAGPPDAISPALADFENDRIESLVRRGDAMTAGFRVAMMTEQGDAFSFGYDVVTRAGELESADPRLARKTLSGDGPLVIGYSAFRHAGFRNLSSIGEYGPAEALFDEKIMLVDPDEVPDRIDYNALLAHRDKNEVEQARWETFRDSMLEAIAALIPKISRDDLKLAGSGISVRTPSGFAPLRQMSLGAQTTVAWLVDLAWRLHMNFPESRDPFGESAIVLIDEVELHLHPVWQRSLRDQLLKHFPRIQFIVSTHSPVIAQESIAAGDPVSIVRWEGDHAVIKPDPFAREVVRLDEVVTVAFELETSLPSRFEALLAERRELIQKGDLDQAESDRLQHLHRFARAVQSGSLDVMPDIEKLMAGTGEDVAD

SEQ ID NO: 85333 - protein, 264 aa, Novosphingobium fuchskuhlense
MIRIDKGEAPNVLLTQGVDAAKELCSVYDKDQAAYHNGTKRLTFNDGIYGHQSVRDALDRSHHGKCAFCEVHIPKPYALAHVEHWRPKGSVTQEKGIKASTPGYYWLAYCWDNLLLACHFCNSSNKGVQFPLADPTRRASNHHQLVAAEAPMLLNPDAEDPSEHIEFVEEIPRGISPRGIATIKALGLDRLEHTPRDALIAKLRSDHDFIARNNADPHPELISEVARRREFYGQAGDPASPFSAMAAAFIARNPLPDPVIFPVD

SEQ ID NO: 85334 - protein, 458 aa, Escherichia coli; identical to SEQ ID NO: 85202

SEQ ID NO: 85335 - protein, 201 aa, Escherichia coli; identical to SEQ ID NO: 83303

SEQ ID NO: 85336 - protein, 458 aa, Escherichia coli; identical to SEQ ID NO: 85202

SEQ ID NO: 85337 - protein, 201 aa, Escherichia coli; identical to SEQ ID NO: 83303

SEQ ID NO: 85338 - protein, 458 aa, Escherichia coli; identical to SEQ ID NO: 85202

SEQ ID NO: 85339 - protein, 201 aa, Escherichia coli; identical to SEQ ID NO: 83303

SEQ ID NO: 85340 - protein, 458 aa, Escherichia coli
MLNFRCFKQLDITFDEHITILVAPNGAGKTTVLDAVRLALFPFIRGFDASLYVKDKSLAIRTEDLRLIYRQEALNMEMSSPAKITATGEWASGKTATWMLDKRGEQPPHEDKMAAQLTRWGEQLQKRVREEHSLQQVELPLMLYLGTARLWYQERYEKQPTEQRLDNSAFSRLSGYDDCLSATSNYKQFEQWYSWLWLSYREHQITQLESPSAKLKEGVRVQRMKEAIQAIQQAINCLTQQVTGWHDLEYSASHNQQLVMSHPQYGKIPLSQLSDGLRNAVAMVADIAFRCVKLNPHLQNDAALKTQGIVLIDEVDMFLHPAWQQQIIQSLRSAFPQIQFIVTTHSPQVLSTVKRESIRLLEQDENGNGKALMPLGATYGEPSNDVLQSVMGVDPQPPVKEKADLQKLTGWVDQGKYDEPKTQQLMVALEVALGEKHPQLQRLQRSIARQRLLKGKAQ

SEQ ID NO: 85341 - protein, 201 aa, Escherichia coli; identical to SEQ ID NO: 83303

SEQ ID NO: 85342 - protein, 485 aa, Escherichia coli
MSFYIESALVDNKRIELVPQSIHNIGNIYTVLIGKNGTGKSIFLSKLANSLCSIQVENKYLKRDFDSNEKNNAKMSFNIVNDGVGNEIRLEGRKFIDGDSKYLLPSVLTCISTSPFDKFSSERRFYNSKHDINTFYHYFGLKDLGRKNAIHAFIEKILYSRINSSLKNDRESFEKILGFLNYQPKIKIEFRTRVRLKKLFELDDEELIRQIEKPIFTPTGIYKWSKNQSNYDVPRIRSSLFLINDYILASSDRRSNSGSEARYFDVEINALNENMINISEHVMHEMLYLMGLNLLSIRDIYLYKKSGDEVILYEASSGEQCLLINTFGIANSIADNALILIDEPEVSLHPEWQEVYIELLMDVFSHKKGCHFIIATHSPQIISNLKKDNCFITTLENGKTYHAKDFINKSADFQLATLMETPGHENEYLKRLAVNILSKISANEELSDQDINDVLWLKDISKNLEPNDTVMFLIGLIVKSKVSLK

SEQ ID NO: 85343 - protein, 212 aa, Escherichia coli
MISNAYLYNNDFQERINAKISSEGFCSDSWSDNDISDIKESIKQFYIPEQNHICPYCQQRFLTNNGRQWDIEHIIPRQTQVGFMFTPQNLCVCCPDCNSHKGYKKTTTSVAKKTLPTKPHLYLIVHPHFDKYDDHIEVIEPGYLYRAKSKKGENTMYVCSLNRFYQFSGYNSAVATDHRLMMLANGLSSAQSEEEKRQIRREMISISLRANI

SEQ ID NO: 85344 - protein, 458 aa, Escherichia coli; identical to SEQ ID NO: 85202

SEQ ID NO: 85345 - protein, 201 aa, Escherichia coli; identical to SEQ ID NO: 83303

SEQ ID NO: 85346 - protein, 451 aa, Escherichia coli
MNIRTLKLTNLGRFEELEVHLAPVEEFKSNVTVFIGNNGAGKTSILKSLATSLSWFVARVRTEKGNGSPIPEDAILNGRSSATIELQVLNTHPATEAATPYRWLLARTASGKKSTTASSLQEASQLAAFYRDQYTQNSGASFPLIAFYPVERVVLDVPLKIKERHNFLQLDGYDNALNQGIDFRRFFEWFRNREDAENESGLPQDVLDKLSTRIDLDNTVLNALTAIMASSRDRQLTAVRTAISRFMPGFSNLRVRRKPRLHMSIDKNGQTLNVLQLSQGEKSLMALVGDIARRLAMMNPMLENPLNGEGIVLIDEVDMHLHPTWQRTIIQRLTTTFPHCQFVLTTHSPLVISDYKDVLVYSLDNGELTQLPSLYGQDANTVLLNVMDTDIRNATVAEKLNDLLDLIQKNDFINANALLNTLSLELPENHLELVKARMLLRKQEIKHARNN

SEQ ID NO: 85347 - protein, 219 aa, Escherichia coli; identical to SEQ ID NO: 80971

SEQ ID NO: 85348 - protein, 451 aa, Escherichia coli; identical to SEQ ID NO: 85268

SEQ ID NO: 85349 - protein, 219 aa, Escherichia coli; identical to SEQ ID NO: 82563

SEQ ID NO: 85350 - protein, 458 aa, Escherichia coli; identical to SEQ ID NO: 85202

SEQ ID NO: 85351 - protein, 201 aa, Escherichia coli; identical to SEQ ID NO: 83303

SEQ ID NO: 85352 - protein, 451 aa, Escherichia coli; identical to SEQ ID NO: 85346

SEQ ID NO: 85353 - protein, 219 aa, Escherichia coli; identical to SEQ ID NO: 80971

SEQ ID NO: 85354 - protein, 458 aa, Escherichia coli; identical to SEQ ID NO: 85202

SEQ ID NO: 85355 - protein, 201 aa, Escherichia coli; identical to SEQ ID NO: 83303

SEQ ID NO: 85356 - protein, 451 aa, Escherichia coli; identical to SEQ ID NO: 85268

SEQ ID NO: 85357 - protein, 219 aa, Escherichia coli; identical to SEQ ID NO: 82563

SEQ ID NO: 85358 - protein, 458 aa, Escherichia coli; identical to SEQ ID NO: 85202

SEQ ID NO: 85359 - protein, 201 aa, Escherichia coli; identical to SEQ ID NO: 83303

SEQ ID NO: 85360 - protein, 458 aa, Escherichia coli; identical to SEQ ID NO: 85202

SEQ ID NO: 85361 - protein, 201 aa, Escherichia coli; identical to SEQ ID NO: 83303

SEQ ID NO: 85362 - protein, 451 aa, Escherichia coli; identical to SEQ ID NO: 85346

SEQ ID NO: 85363 - protein, 219 aa, Escherichia coli; identical to SEQ ID NO: 80971

SEQ ID NO: 85364 - protein, 404 aa, Escherichia coli
MMNIRTLKLTNLGRFEELDVHLAPVEEFKSNVTVFIGNNGAGKTSILKSLATSLSWFVARVRTEKGNGSPIPEDAILNGRSSATIELQVLNTHPATEVATPYRWLLARTASGKKSTTASSLQEASQLAAFYRDQYTQNSGASFPLIAFYPVERVVLDVPLKIKERHNFLQLDGYDNALNQGIDFRRFFEWFRNREDAENESGLPQDVLDKLSTRIDLDNAVLNALTALMASSRDRQLTAVRTAISRFMPGFSNLRVRRKPRLHMSIDKNGQTLNVLQLSQGEKSLMALVGDIARRLAMMNPMLENPLNGEGIVLIDEVDMHLHPTWQRTIIQRLTTTFPHCQFALTTHSPLVISDCKDVLVYSLDDGELTQLPSLYGQDANTVLLNVMDTDIRNATVGESKTTG

SEQ ID NO: 85365 - protein, 207 aa, Escherichia coli; identical to SEQ ID NO: 81029

SEQ ID NO: 85366 - protein, 458 aa, Escherichia coli; identical to SEQ ID NO: 85202

SEQ ID NO: 85367 - protein, 201 aa, Escherichia coli; identical to SEQ ID NO: 83303

SEQ ID NO: 85368 - protein, 458 aa, Escherichia coli; identical to SEQ ID NO: 85202

SEQ ID NO: 85369 - protein, 201 aa, Escherichia coli; identical to SEQ ID NO: 83303

SEQ ID NO: 85370 - protein, 540 aa, Vibrio cholerae; identical to SEQ ID NO: 80874

SEQ ID NO: 85371 - protein, 205 aa, Vibrio cholerae; identical to SEQ ID NO: 80875

SEQ ID NO: 85372 - protein, 397 aa, Burkholderia cepacia
MKGAREALTGLTYHLSLPNSNLAPFGEAGSVRVESIVAAGRYRFEEQYPAQVDVVGEAFGKALAWSVAKINSAGGMQLDGQQPGALWHAAFSGQNADDTPSTADRALPIVAFYPAYRLWPHAQVNEMVAATERPSRMDGYRYWWEAAGDSLALQQWAISKSMERLQLTSERSVRWDEVDDDELGMVNTALAAVVEGGKGIRYDFSQKTLLIEWLGEVPPTEFRFLSDGQRVAIALVADIARRMCLLNPHLGQSVTQKTPGVVLIDELDVHLHPRWQRLMTKGLQAAFPQVQFIVTSHSPQVLGELQPQQIILLSQEGITHPPVSYGLDASRVLAQIMDANQRSTEVEKALSALFESLERNELGRARGYLSNLKTVAPGIPELAGAEALLKRKEVLGR

SEQ ID NO: 85373 - protein, 238 aa, Burkholderia cepacia
MKQVTKRASPTEFEDWKTRGAVDWQPTYADLQRPEKQILHHALLDEQGWVCCYCGGAVTEKNSHIEHFRPQSDFGALQLNYDNLHASCMGTSRQALDDREDGANGSRSVKRLPTFCGDAKRDQFDEARHISPADPNCESRFIYTQTGQILPSDHGDSSASYMLGILALDVQHLRAAREEVLKAFDSAFLATVTADELMQLRDAFRTRDADGKLKPYGHVAARYAEQRLADLQQPAAGA

SEQ ID NO: 85374 - protein, 397 aa, Burkholderia cepacia; identical to SEQ ID NO: 85372

SEQ ID NO: 85375 - protein, 238 aa, Burkholderia cepacia; identical to SEQ ID NO: 85373

SEQ ID NO: 85376 - protein, 322 aa, Burkholderia cepacia
MQLDGQQPGALWHAAFSGQNADDTPSTADRALPIVAFYPAYRLWPHAQVNEMVAATERPSRMDGYRYWWEAAGDSLALQQWAISKSMERLQLTSERSVRWDEVDDDELGMVNTALAAVVEGGKGIRYDFSQKTLLIEWLGEVPPTEFRFLSDGQRVAIALVADIARRMCLLNPHLGQSVTQKTPGVVLIDELDVHLHPRWQRLMTKGLQAAFPQVQFIVTSHSPQVLGELQPQQIILLSQEGITHPPVSYGLDASRVLAQIMDANQRSTEVEKALSALFESLERNELGRARGYLSNLKTVAPGIPELAGAEALLKRKEVLGR

SEQ ID NO: 85377 - protein, 238 aa, Burkholderia cepacia; identical to SEQ ID NO: 85373

SEQ ID NO: 85378 - protein, 387 aa, Burkholderia cepacia
MTYHLSLPNSNLAPFGEAGSVRVESIVAAGRYRFEEQYPAQVDVVGEAFGKALAWSVAKINSAGGMQLDGQQPGALWHAAFSGQNADDTPSTADRALPIVAFYPAYRLWPHAQVNEMVAATERPSRMDGYRYWWEAAGDSLALQQWAISKSMERLQLTSERSVRWDEVDDDELGMVNTALAAVVEGGKGIRYDFSQKTLLIEWLGEVPPTEFRFLSDGQRVAIALVADIARRMCLLNPHLGQSVTQKTPGVVLIDELDVHLHPRWQRLMTKGLQAAFPQVQFIVTSHSPQVLGELQPQQIILLSQEGITHPPVSYGLDASRVLAQIMDANQRSTEVEKALSALFESLERNELGRARGYLSNLKTVAPGIPELAGAEALLKRKEVLGR

SEQ ID NO: 85379 - protein, 238 aa, Burkholderia cepacia; identical to SEQ ID NO: 85373

SEQ ID NO: 85380 - protein, 397 aa, Burkholderia cepacia; identical to SEQ ID NO: 85372

SEQ ID NO: 85381 - protein, 238 aa, Burkholderia cepacia; identical to SEQ ID NO: 85373

SEQ ID NO: 85382 - protein, 397 aa, Burkholderia cepacia; identical to SEQ ID NO: 85372

SEQ ID NO: 85383 - protein, 238 aa, Burkholderia cepacia; identical to SEQ ID NO: 85373

SEQ ID NO: 85384 - protein, 322 aa, Burkholderia cepacia; identical to SEQ ID NO: 85376

SEQ ID NO: 85385 - protein, 238 aa, Burkholderia cepacia; identical to SEQ ID NO: 85373

SEQ ID NO: 85386 - protein, 397 aa, Burkholderia cepacia; identical to SEQ ID NO: 85372

SEQ ID NO: 85387 - protein, 238 aa, Burkholderia cepacia; identical to SEQ ID NO: 85373

SEQ ID NO: 85388 - protein, 322 aa, Burkholderia cepacia; identical to SEQ ID NO: 85376

SEQ ID NO: 85389 - protein, 238 aa, Burkholderia cepacia; identical to SEQ ID NO: 85373

SEQ ID NO: 85390 - protein, 397 aa, Burkholderia cepacia; identical to SEQ ID NO: 85372

SEQ ID NO: 85391 - protein, 238 aa, Burkholderia cepacia; identical to SEQ ID NO: 85373

SEQ ID NO: 85392 - protein, 397 aa, Burkholderia cepacia; identical to SEQ ID NO: 85372

SEQ ID NO: 85393 - protein, 238 aa, Burkholderia cepacia; identical to SEQ ID NO: 85373

SEQ ID NO: 85394 - protein, 397 aa, Burkholderia cepacia; identical to SEQ ID NO: 85372

SEQ ID NO: 85395 - protein, 238 aa, Burkholderia cepacia; identical to SEQ ID NO: 85373

SEQ ID NO: 85396 - protein, 322 aa, Burkholderia cepacia; identical to SEQ ID NO: 85376

SEQ ID NO: 85397 - protein, 238 aa, Burkholderia cepacia; identical to SEQ ID NO: 85373

SEQ ID NO: 85398 - protein, 453 aa, Burkholderia ubonensis
MADEFIRSATGVPPAPPPTIVPSVDTAGIPSIVWLDTIEISNFKTIKHLKLTFPTQPEDVKQKGQPWLMVLGENSVGKSSLLQAVALTLMPDEERERLGRADACLTKRTGASNGYVRLTFTDGSQRKLSFAKGDKHFQIDGPKPDMPVLAYGSTRLLPGARTRKPDRPPSVSVRNLFDHTHPLVNAERYLCDTDLIDDERFNLLATSLKDLLPVSGKAHITRNARHMKSTMNGLHASLDELSDGYKSVLALAMDIMFHLSNSSFDMESAQGLVMVDELELHLHPRWKIRIIDQLRTLFPRVRFIVSTHDPLCVHGLQNGELHVMAKHPRDNEFMIEQIDVPQGTRADEVLTGPWFGLPSTMDAETLEFMSEHSALLQRPERTVVQTQRMHELEELLRKRMGTFGNTRAQRAAMAAAAVLDRGMHQDQYDLVIKRRLNEALSDMPGPKTGDENA

SEQ ID NO: 85399 - protein, 285 aa, Burkholderia ubonensis
MRKLFRPDEHHAFEDAVRDAKKNVDADIKKKSETVEFPSKWSAFKDIFIKAQRGKCGYCEGRVWGLQYGDIEHFQPKAEVHELSDNPDHWGRETPWESTVEQRKTENTLKPGYWWQAYEWSNYLISCQICNQQWKKNLYPLKEPRTQPPHRDDCEQPLLLSPFLEDFDPAEHFEYGRLGEISGKSEQGRATIVTCGLDRPSLRLARYEQAKATHEHLDEIAGDITERDMLEMLRYIKRDGDEARPYCGMVHTIFKQRTGLTWEQLSKLISRLEASQTPERSLCNC

SEQ ID NO: 85400 - protein, 308 aa, Burkholderia ubonensis
MLLLAYGSSRLVETSRHKARDGLLHAKIDNLFDPFLPIHNAKGWLSQVDQRTADEVHATLQSLIADGKSAKVLKAIDDRSLLFDFGDGSAWPLEELSDGYKSLLAMAVDIIQVMSMAGFESMESAQGVVIIDELGNHFHPTWKMRIVRALREAFPFVQFIYSTHEPLCLRGLKDGEIAVFERGDDASAYALVNLPSNSALYVDQLLTSEHFGLESTLDPQLQMDMSRYEELASMVHRSDVDEAELESLEQSLTDAGHLGKSHRERIMLMVIDALLKAEKPSRTKGTIDIKALDEKTVALLTNVFAKLE

SEQ ID NO: 85401 - protein, 294 aa, Burkholderia ubonensis
MIKVDRSKVTIPEYLDGAGSAGDEEMQANLRRHAAGNNDFVFEAYKHNTVKDRLEELFGRKCAYCESDIEAVQPSEIEHYRPKGRVAELNPTTNKVEYQLGYFWLAARWENLLVACIDCNRRRNHKDDQGDLELLGKADYFPLATGTARALDDATLAAEQPMLLNPCVDDPRAHLEFTDTGGVRAIKRNGTADPRGAATIELLGLARGGLLKKRAKHAMSVRYCLEGLRESLKNGGSVTRHLNELLRLLDPKYEHTGLTKHLAATELLDLFRDVELPAALEAALTKVADALDNI

SEQ ID NO: 85402 - protein, 227 aa, Burkholderia vietnamiensis
MLDFSRAREFASVLKLESRLRAWNVLRGIRVYLQRVDNGDAIEIQHASSGQLALISSLLFVIANTREDPIVIIDEPENSLHPKWQREYIEKVMTALSYRNATIIVATHAPLVVTGALADSPQIVSVFELRNGRPQRLQMDRAGSSPGSIEEILWRAFEVVTPANHFVSEQIVDEVSRFEKGEVRKEEVLALIGRMEDESFDERQRSFFNAVRGLLDKVEAGSDEGDQ

SEQ ID NO: 85403 - protein, 218 aa, Burkholderia vietnamiensis
MVDRYLPALDAFMLTVDEQSAVTSALTSADPWEWNPGGAQSTAIASVKTKIRDYHLARHGDRCCYCRVNLHGGGPFMTDREHVLPKSVADYRPLSYTMWNLGIACKRCNMEYKKNRTDFVVALEDASLLQEGANYRFIHPNFDFYREHLLRFALEVEETVIVKYVVVAGSAKGAYTYDYFNLRGLEVNSFDSAQGLDTLEAPGEAAQAVRSLAASFGQ

SEQ ID NO: 85404 - protein, 475 aa, Burkholderia sp. MSMB0856
MNVEKLELRNVGQFRSLTVALAPLPAVPSNVTILIGNNGTGKTTILKSLATVLSWLVARVRSDNGNGTPIPEEVIRNDAVSAALEITLTEQSDRFGWTLAKARLGRKGEHASNFDDANQLADRYRHAFSIDASTSLPLIAFYSVERVVLDVPLKIREKHTFSQLDGYDNSLKQGVDFRRFFEWFREREDWENESGISKAADNLERNDPEKLKALIDFIENGGADLDNLKKFDFKGLRTVLQQATNALQIARTLREGVRDPQLDAVRRAIGEFMPGFRNLKVRRKPRLHMSVDKQGQRLNILQLSQGEKSLMALVGDIARRLAMMNPGLEDPLHGNGIVLIDEVDLHLHPQWARKIVERLRTTFPNCQFVLTTHSPLVISDCRDVLLYALNDGELTQVPSQYGQDANTVLLDVMDTHIRNSTIAKRLNDLMDFIQESKLEEAKGLLNELKLELPPNNLELTKASLLLRKKEQRAKD

SEQ ID NO: 85405 - protein, 212 aa, Burkholderia sp. MSMB0856
MRKIEKGNEPDSLRAFKRANQHCRYVDLTDAERRDIRSVCTQEQYFLCAYCCQPISGENRDTMNEHVEAQNLAPNRTVDFANIVASCKAPRQCDSAHKGQALNLTPLMPECETELRFMLSGRVKGKTPRATDAIRVLNLGDHEENNKALIEKRKNLVEQLIWRKAGNGPEDLSIEDPEILEMLIDDLSQPVDGRLEGFAPVLVNILRNYLDE

SEQ ID NO: 85406 - protein, 459 aa, Enterobacter cloacae; identical to SEQ ID NO: 82560

SEQ ID NO: 85407 - protein, 211 aa, Enterobacter cloacae; identical to SEQ ID NO: 82561

SEQ ID NO: 85408 - protein, 397 aa, Burkholderia cepacia; identical to SEQ ID NO: 85372

SEQ ID NO: 85409 - protein, 238 aa, Burkholderia cepacia; identical to SEQ ID NO: 85373

SEQ ID NO: 85410 - protein, 397 aa, Burkholderia cepacia; identical to SEQ ID NO: 85372

SEQ ID NO: 85411 - protein, 238 aa, Burkholderia cepacia; identical to SEQ ID NO: 85373

SEQ ID NO: 85412 - protein, 436 aa, Burkholderia cepacia
MRLDSIVLKNYRGFRHLPIKFQPGFNVLAGVNGSGKTSILKGAREALTGLTYHLSLPNSNLAPFGEAGSVRVESIVAAGRYRFEEQYPAQVDVVGEAFGKALAWSVAKINSAGGMQLDGQQPGALWHAAFSGQNADDTPSTADRALPIVAFYPAYRLWPHAQVNEMVAATERPSRMDGYRYWWEAAGDSLALQQWAISKSMERLQLTSERSVRWDEVDDDELGMVNTALAAVVEGGKGIRYDFSQKTLLIEWLGEVPPTEFRFLSDGQRVAIALVADIARRMCLLNPHLGQSVTQKTPGVVLIDELDVHLHPRWQRLMTKGLQAAFPQVQFIVTSHSPQVLGELQPQQIILLSQEGITHPPVSYGLDASRVLAQIMDANQRSTEVEKALSALFESLERNELGRARGYLSNLKTVAPGIPELAGAEALLKRKEVLGR

SEQ ID NO: 85413 - protein, 238 aa, Burkholderia cepacia; identical to SEQ ID NO: 85373

SEQ ID NO: 85414 - protein, 397 aa, Burkholderia cepacia; identical to SEQ ID NO: 85372

SEQ ID NO: 85415 - protein, 238 aa, Burkholderia cepacia; identical to SEQ ID NO: 85373

SEQ ID NO: 85416 - protein, 387 aa, Burkholderia cepacia; identical to SEQ ID NO: 85378

SEQ ID NO: 85417 - protein, 238 aa, Burkholderia cepacia; identical to SEQ ID NO: 85373

SEQ ID NO: 85418 - protein, 397 aa, Burkholderia cepacia; identical to SEQ ID NO: 85372

SEQ ID NO: 85419 - protein, 238 aa, Burkholderia cepacia; identical to SEQ ID NO: 85373

SEQ ID NO: 85420 - protein, 420 aa, Burkholderia cepacia
MPIKFQPGFNVLAGVNGSGKTSILKGAREALTGLTYHLSLPNSNLAPFGEAGSVRVESIVAAGRYRFEEQYPAQVDVVGEAFGKALAWSVAKINSAGGMQLDGQQPGALWHAAFSGQNADDTPSTADRALPIVAFYPAYRLWPHAQVNEMVAATERPSRMDGYRYWWEAAGDSLALQQWAISKSMERLQLTSERSVRWDEVDDDELGMVNTALAAVVEGGKGIRYDFSQKTLLIEWLGEVPPTEFRFLSDGQRVAIALVADIARRMCLLNPHLGQSVTQKTPGVVLIDELDVHLHPRWQRLMTKGLQAAFPQVQFIVTSHSPQVLGELQPQQIILLSQEGITHPPVSYGLDASRVLAQIMDANQRSTEVEKALSALFESLERNELGRARGYLSNLKTVAPGIPELAGAEALLKRKEVLGR

SEQ ID NO: 85421 - protein, 238 aa, Burkholderia cepacia; identical to SEQ ID NO: 85373

SEQ ID NO: 85422 - protein, 459 aa, Enterobacter cloacae; identical to SEQ ID NO: 82560

SEQ ID NO: 85423 - protein, 211 aa, Enterobacter cloacae; identical to SEQ ID NO: 82561

SEQ ID NO: 85424 - protein, 437 aa, Burkholderia cepacia
MIITRLKLANVRGVEDAEFAFKAGFNLIVGVNGVGKTTVLDSLRICCSRVLPGLTPSKAKAMTFERSDIRIGFPFLNAAAHFEVGGREFIFERCEWRETVAADNEENLANLRREIIETERLRERPRKLLRELANSQSLVDSDFYSLTKPELQKLVAVNGPPLAVFYSTSRSVISATHSKGKSVGGPAAGYAEALVPRAWHVEQFADWIRVQESLAHESDKASRHVAAMKAAASKFLPGCTDIIPGDSAGSPLTIAKSGLRLDVRQLSDGERGALGIALDLARRLSHVNPEAADPLTEGEAIVLIDEIDLHLHPKWQRQIVHNLTEAFPRCQFIATSHSPQVIGEVQSDRIQIIADGQVYSPSHSFGVDSSRILEEIMEAPPRARAVQALLDDLSRRVDENDLKAASSIVAQLVDELGEGDAEVIRARTLLDFLGAEE

SEQ ID NO: 85425 - protein, 217 aa, Burkholderia cepacia
MRAITKGQEPRSLVEHRANAYSDYANYDDKDNLRAVLVRDQRGLCCYCMARIKPTGTDMKIEHWRCQSRNSHLELSYSNLLAACLGGHGQPGAHQHCDTRKGERDLKFNPADPLHRIEQRIRFELDGAIRSSDAEFDTQLNDLLGLNLPVLKNRRKGVLTGILEWWKCEKVRLKGPVPRKQLIRERARRDGNEGGDLRPFDPVAVWWLDQRLARDTE

SEQ ID NO: 85426 - protein, 583 aa, Burkholderia anthina
MQLKHLSIPHFRNLRGVEIDFATQLSCLLGEAADAPPKAIRSHALIGQNGTGKSNLIEALITIFRDIDLDRDAAMDYMLEYEIRGQTVRIQADTAKQKRPFVWTNGKSESQGYLLKNRELLPSHIFAYYSGRNERIEALFQEHQRRFNQRQEITTDEVLPGQLLENFTASDSDIRAVKEAKRRRETRLKEAGDDRLRRLFYCRGGHSQLVLLACLLSDDPIFQKVLNNLHIESLESALFVLKEPHRLRTKRREGKFDENELSEGDPRFWYARGNVVSEFLDKLWQVAWAPIEQEATRQVDFRGRTEKQKQLYLFVPSHAKLKQLGELVGGTDSFFRYAEGAYIGDLIDEVRITVKKRDDHGGKVSFTQLSEGELQMLTVLGLMRITREDHCLFLLDEPDTHLNPIWKLRYFDDIEGVLSAGAGQLMQGESQILITTHDPMMVGSLKREQVHILRRNGQRTLVETPDDHPQGMGVTGLLKSELFGLSSTLDIETERRLFRRNELFVKSARTPEEDAELSRLSAELADLGFSTADFRDPDYALFVRKMAQHRKFRKPTLTPEEQAEQDRIADDIIDEILREEDGK

SEQ ID NO: 85427 - protein, 285 aa, Burkholderia anthina
MIFIDLEHKKPTDADIPGWAPWTQAQWDAWLVKSRRLVTDMAAFEAVGKRDERNALIVANSAHWGALKEWMLALSGGKCWFSEVRELYSHYDVEHFRPKKEARALDGTERDGYWWLAFDYMNFRVCGNVGNRKKGGWFPLKDGSLCSSYAAPCEESEARYLLDPIDDDDVSLIAFDEEGKVIPAPGTSDWEQERVNVTVKRLKLNEHAPLAEERRKVWQKIDGLIKDFYAAKAKCSHGNNPAAKAKLLEVRARVREMTKRSAELSAVARWCIQVRNEPQLSRLVS

SEQ ID NO: 85428 - protein, 454 aa, Burkholderia cepacia
MLLTYTSDSGRYEFVKDGHVNSVENTYTVIVGKNGTGKSRLLRAVVFGLFDAEIREELVDRSDRAELRQLFFELDTEFSPEQVICVSTSPFDRFPLLRRNQNIPGYAYLGMRGLSSANQSLSYLSKIANTLVDSVQSDKRQANAIAGVLDYLGYESSITLSWQLLSQRLVDDLLQAANPRDAARELIRRGPAMFLSEVAGNYQRIIDTPADKLRHALELARHVQLGKRSHFVKLWLDEYGLASEVQDEFGLEDVLLLINTGLLRLRQVELRKKGADRGFLINHASSGEQAVVLSLLGIGSQIRDRSLICIDEPEVCLHPEWQEKYIQLLYSTFHHFKGCHFVIATHSPQIIAQLPEGNCYVMSMETGLATDASTYSRKSIDYQLAELFGAPGTRNEYLSRKALNVFSSVSKNRAFDSDSLKTLVALEKMVDLLHEDDPVLDLILALRERRNRYE

SEQ ID NO: 85429 - protein, 216 aa, Burkholderia cepacia
MSDIANPVVYTDEQNALVAAKRNDAAFTHHDWGHVELEAFRSHVRNHYRTEQRGICAFCREHVSLQAAENCQVEHIVPKSIRPEFMFEPKNLCVICADCNTIKRDQEVTATIPDTVAPRRGRQRYPRASSSFLIVHPHFDRYSDHILIERGHYFDRTDKGHFTIGACKLNRRLRVFGWDERIVEEPKLMDAAQQLLESKPGVERQAALQRIREVLQ

SEQ ID NO: 85430 - protein, 450 aa, Pseudomonas sp. TAA207
MINAINFQAWDGDWRSIPFVASEGGCEKHGFRCTVVTGQNGSYKSTMLRELVAGLIAPKSTETKLDVSDGSVMNHVICASGSVADRFPSKEKAGGGSTEFATEQYAYIGQRVGANLLSKKRPFETVIVFALDRSKSERFTWPFYKQAHEFANIMPDLNVSVLVRKDGLKRSSRRSAEESGYSVSKLKRLLNMEDADLSGPVSDDVARHILKEFSENVFNDFIKFMSSTKARLILSMGRGGIHCKTASNEVVRLGFMLDIFSLRDVTVKRAGSDLEFSIFELSSGEYHMYTNLMGLGFGVEEGSLMLLDEPDNSLHPQWQRDFMAAVHGICQIGMKSGHLVVCTHSPLIVSASLEGSTIVDLSNDQPVISVASYGASSDDILLEQFGLTSSRNRIVVDVVQRAVSIIEKDGFAHPDLLALTDQLVSIKSALRREDPLVEVIDAILGESGND

SEQ ID NO: 85431 - protein, 241 aa, Pseudomonas sp. TAA207
MIKIGFEQIHPIPVLPADIVVANLKGLSWSSGVNAVTAFKDTLKPMLRKVQQGRCSLCRRFLYDDYATHLEHFIEKGIHRDFTYEVTNLSLSCGTCNIKKNGYNRTLNSLIKKRARRKGQQASKYCPVLAVKISANAPMPVSSASYRWIHPYFDRYSDNIEIEKGWIFTGKSRKGQRTIRSVKLNALAQIERRALAERLEARPGRLSKLLGATAELDKYRAGHLFKLVTKQLWKRREASDV

SEQ ID NO: 85432 - protein, 450 aa, Pseudomonas sp. TAD18; identical to SEQ ID NO: 85430

SEQ ID NO: 85433 - protein, 241 aa, Pseudomonas sp. TAD18; identical to SEQ ID NO: 85431

SEQ ID NO: 85434 - protein, 409 aa, Shewanella frigidimarina
MKQIQHVSLTLPHTGEPIDISLKGHNLIITGGNGCGKTSFIKQLHDDIIRNSDSQKSLQNLIQLLQQAEDQVKQGASNQNYNHFQNRGRELLKEIDKAKSIRISMRDNAEFIQEYADKHFVLSYYKAERQSEISVDDTRPSLQSLKTRESSKAMSEHFGVVFEKYLVAQKVIFNDIVATEDTKAQSQADRIQSWLYKVEHDLRYLFEDDELELKFNREKQSFEIHQADKSPFQFNELSSGFSAIMYIYSDLLMKVELKDIPADQLKGIVLIDEIDAHLHVSLQRKILSFFTQAFPNIQFIVTTHSPFVVQSVNDAVIYDLSKREQLEDLSMYSYESILKGLLGVESTSDLLKDQLDEMAQLVNETPLNKKRLNELIANIEPHEAKLDARSRAFLLLGKNAILDSNDGEE

SEQ ID NO: 85435 - protein, 221 aa, Shewanella frigidimarina
MFNVTRTYPAPDSIDKGKYNEKDVLSALKPMFLEKCYLCERDEIQDAEVEHFVPHQSDVALKYDWENLYYSCSRCNSIKSNTHVNLLDCANNAIDVSKLISCMMPSAPSEKVTVKAISTKPTVQTKNTVTLLDKCYNLENTALRGISRESLMEQMWEHYTDLLLARQTLRKKKAAAMDKQQAEQVIAAMLDLEHPFSVFWRYYYLNDAFLMEKYSKLRAVF

SEQ ID NO: 85436 - protein, 583 aa, Burkholderia ubonensis
MQLKHLSIPHFRNLRGVEIDFATQLSCLLGEAADAPPKAIRSHALIGQNGTGKSNLIEALITIFRDIDLDRDAAMDYMLEYEIRGQTVRIQADTAKQKRPFVWTNGKSESQGYLLKNRELLPSHIFAYYSGRNERIEALFQEHQRRFNQRQEITTDEVLPGQLLENFTASDADIRAVEEAKRRRETRLKQAGDDRLRRLFYCRGGHSQLVLLACLLSDDPIFQKVLNNLHIESLESALFVLKEPHRLRTKRREGKFDENELSEGDPRFWYARGNVVSEFLDKLWQVAWAPIEQEATRQVDFRGRTEKQKQLYLFVPSHAKLKQLGESVGGTDSFFRYAEGAYIGDLIDEVRITVKKRDDHGGKVSFTQLSEGELQMLTVLGLMRITREDHCLFLLDEPDTHLNPIWKLRYFDDIEGVLSAGAGQLMQGESQILITTHDPMMVGSLKREQVHILRRNGQRTLVETPDEHPQGMGVTGLLKSELFGLSSTLDIETERRLFRRNELFVKSARTREEDAELSRLSAELADLGFSTADFRDPDYALFVRKMAQHRKFRKPTLTPEEQAEQDRIADDIIDEILREEDGK

SEQ ID NO: 85437 - protein, 285 aa, Burkholderia ubonensis
MIFIDLEHKKPTDADIPGWVPWTQAQWDAWLVKSRRLVTDMAAFEAVGKRDERNALIAANSAHWGALKEWMLALSGGKCWFSEVRELYSHYDVEHFRPKKEARALDGTERDGYWWLAFDYMNFRVCGNVGNRKKGGWFPLKDGSLCSSYAAPCEESEARYLLDPIDDDDVSLIAFDEEGKVIPAPGTSDWEQERVNVTVKRLKLNEHAPLAEERRKVWQKIDGLIKDFYAAKAKCSHGNNPAAKAKLLEVRSRVREMTKRSAELSAVARWCIQVRNEPQLSRLVS

SEQ ID NO: 85438 - protein, 415 aa, Burkholderia ubonensis
MDLDSVQGADATQAPEDELFGCLLQGIEKSLRSGQGPHFTYIIGNNGTGKSRQLARIAGHFTGEQGTPQIIGCISNAVYDRFTLTNRGQIEYLGARTSGNAVFHAAIDRQLSKIILKGILRNKSVVRRLEQTLGMDFMFSMRAPESGKIEFQKLVDRRKLKGSPISSFLSRAEQALVSGFLGRQFRFSRLSREQATALQKFMELNPDVRIFVRRRDGTHSTIDFDQLSTGEQNRALTYAKVLSVAQEAALILIDEPEISLHLHWQMAFHQSLCEILEGYRRYHVVVATHSPVIISEGAKYNGDDARVVVLEREVHEEGASLTFRHHKFGDVASHERLVLRDFNTATYHTAAVNVEIAESVLNAVERPNEIDHIVTRLESMSAKLGLSNEDERNIRAAINVVRNHVSTIGAEENDQ

SEQ ID NO: 85439 - protein, 240 aa, Burkholderia ubonensis
MMSLAKTDIEKDTLRRLLHYVDDETLTGTSAWTCFSSPRAEHVYDEDEPPITFTTDERNSLKSLKKRVVERLERRNRRACAYCKRPVGNYGYGWNIEHVYPKASFPASTFSLQNLTIGCVDCNQWKAARVDKKTLAEGLTIIEPVANGFRYGDHINLVHIATEDICFIKYRPTSKAGKQTYEKLQFTDIERSTIIDSVNDDLAALHRRMNDLLASAQSGDSHTELVALLGQLKSNIYRLG

SEQ ID NO: 85440 - protein, 514 aa, Acinetobacter baumannii; identical to SEQ ID NO: 82756

SEQ ID NO: 85441 - protein, 213 aa, Acinetobacter baumannii; identical to SEQ ID NO: 82749

SEQ ID NO: 85442 - protein, 514 aa, Acinetobacter baumannii; identical to SEQ ID NO: 82756

SEQ ID NO: 85443 - protein, 213 aa, Acinetobacter baumannii; identical to SEQ ID NO: 82749

SEQ ID NO: 85444 - protein, 415 aa, Burkholderia ubonensis; identical to SEQ ID NO: 85438

SEQ ID NO: 85445 - protein, 240 aa, Burkholderia ubonensis; identical to SEQ ID NO: 85439

SEQ ID NO: 85446 - protein, 427 aa, Flavobacterium columnare
MKLSKLHIDQYRHLENLDFDFTYPMDFHDETMRGKPLNKICFIGQSGTGKTKLLELIHKDISNLLSTELDEDSKIWINFNKYDSTIGLQINENNFSFKEGNYYLNGNIIQRSSNKSTFTSTLIKEAKSLFYFTAELLSTKNLEFFEKEPILLIEKSRTFSFIDQFAVNENQNIIFNDNIEEEIWIRLLNSSINYLQNFLQFATELINSGNVLDNSSQNKIDAWKSENINPLIDFSEKFNIILEKIQLEVDLTNAKNIIPLKNKNTGENVDIKNISTGTKQLLLNSLPLYKLETNESIVLIDEPERSLYPDMQMELMDHYQRLAQNAQFIIATHSPFIAASFEPCERFILYFDEEGKVAVRQGTSPIGDDPNDILKNDFELEFLMNEKGRRAFERFRELKREIATVENEEEKDKLLDEILILAKAYKF

SEQ ID NO: 85447 - protein, 194 aa, Flavobacterium columnare
MRKQVKFTDSLAKDLSYIIDGDNSKLCQILFNEQKGFCAYTETYLGRTDQKDIDHFNPSKSFTDRNKYQNLFLCKAQWNREKSNKWDKYQPILYPLEENFEKRISYNQDLKLFEATDREDREAVNLVKLLKLDDYDLSIERKKYIELCFELIQHYENPTVYFQKIIQKNINHLQFIRSLEIEFNIDIWKMIPQP

SEQ ID NO: 85448 - protein, 465 aa, Salmonella enterica subsp. enterica serovar Tennessee; identical to SEQ ID NO: 81888

SEQ ID NO: 85449 - protein, 241 aa, Salmonella enterica subsp. enterica serovar Tennessee; identical to SEQ ID NO: 82615

SEQ ID NO: 85450 - protein, 465 aa, Salmonella enterica subsp. enterica serovar Tennessee; identical to SEQ ID NO: 81888

SEQ ID NO: 85451 - protein, 241 aa, Salmonella enterica subsp. enterica serovar Tennessee; identical to SEQ ID NO: 82615

SEQ ID NO: 85452 - protein, 465 aa, Salmonella enterica subsp. enterica serovar Tennessee; identical to SEQ ID NO: 81888

SEQ ID NO: 85453 - protein, 241 aa, Salmonella enterica subsp. enterica serovar Tennessee; identical to SEQ ID NO: 82615

SEQ ID NO: 85454 - protein, 458 aa, Salmonella enterica subsp. enterica serovar Tennessee
MLNFRCFRQLDITFDEHITILVAPNGAGKTAVLDAIRLALFPFIRGFDASLSVKDKSLAIRTEDVRLVFRPEALNMEMSSPAIITATGEWESGKTATWMLNKRGEQPPHEDKTAAQLTRWGEQLQTLVREEHNLQQVELPLMLYLGTARLWYQERYEAQPTEQRLDNSAFSRLSGYDDCLSATSNYKQFEQWYSWLWLSYREHQITQLESPSAKLKEGVRVQRMKEAIQAIQQTINCLTQEVTGWHDLEYSSSHNQQLVMNHPQHGKIPLSQLSDGLRNAVAMVADIAFRCVKLNPHLRDEAALKTQGIVLIDEVDMFLHPAWQQQIIQSLRSAFPLIQFIVTTHSPQVISTVKRESIRLLEQDENGNGKALMPLGATYGEPSNDVLQSVMGVDPQPPVKEKADLQKLTAWVDQGKYDEPEAQQLMAALQVALGDQHPQLQRLQRSIARQNMLKGKAQ

SEQ ID NO: 85455 - protein, 198 aa, Salmonella enterica subsp. enterica serovar Tennessee; identical to SEQ ID NO: 81885

SEQ ID NO: 85456 - protein, 458 aa, Salmonella enterica subsp. enterica serovar Tennessee; identical to SEQ ID NO: 85454

SEQ ID NO: 85457 - protein, 198 aa, Salmonella enterica subsp. enterica serovar Tennessee; identical to SEQ ID NO: 81885

SEQ ID NO: 85458 - protein, 458 aa, Salmonella enterica subsp. enterica serovar Tennessee; identical to SEQ ID NO: 85454

SEQ ID NO: 85459 - protein, 198 aa, Salmonella enterica subsp. enterica serovar Tennessee; identical to SEQ ID NO: 81885

SEQ ID NO: 85460 - protein, 458 aa, Salmonella enterica subsp. enterica serovar Tennessee; identical to SEQ ID NO: 85454

SEQ ID NO: 85461 - protein, 198 aa, Salmonella enterica subsp. enterica serovar Tennessee; identical to SEQ ID NO: 81885

SEQ ID NO: 85462 - protein, 465 aa, Salmonella enterica subsp. enterica serovar Tennessee; identical to SEQ ID NO: 81888

SEQ ID NO: 85463 - protein, 241 aa, Salmonella enterica subsp. enterica serovar Tennessee; identical to SEQ ID NO: 82615

SEQ ID NO: 85464 - protein, 458 aa, Salmonella enterica subsp. enterica serovar Tennessee; identical to SEQ ID NO: 85454

SEQ ID NO: 85465 - protein, 198 aa, Salmonella enterica subsp. enterica serovar Tennessee; identical to SEQ ID NO: 81885

SEQ ID NO: 85466 - protein, 458 aa, Salmonella enterica subsp. enterica serovar Tennessee; identical to SEQ ID NO: 85454

SEQ ID NO: 85467 - protein, 198 aa, Salmonella enterica subsp. enterica serovar Tennessee; identical to SEQ ID NO: 81885

SEQ ID NO: 85468 - protein, 458 aa, Salmonella enterica subsp. enterica serovar Tennessee; identical to SEQ ID NO: 85454

SEQ ID NO: 85469 - protein, 198 aa, Salmonella enterica subsp. enterica serovar Tennessee; identical to SEQ ID NO: 81885

SEQ ID NO: 85470 - protein, 458 aa, Salmonella enterica subsp. enterica serovar Tennessee; identical to SEQ ID NO: 85454

SEQ ID NO: 85471 - protein, 198 aa, Salmonella enterica subsp. enterica serovar Tennessee; identical to SEQ ID NO: 81885

SEQ ID NO: 85472 - protein, 458 aa, Salmonella enterica subsp. enterica serovar Tennessee; identical to SEQ ID NO: 85454

SEQ ID NO: 85473 - protein, 198 aa, Salmonella enterica subsp. enterica serovar Tennessee; identical to SEQ ID NO: 81885

SEQ ID NO: 85474 - protein, 458 aa, Salmonella enterica subsp. enterica serovar Tennessee; identical to SEQ ID NO: 85454

SEQ ID NO: 85475 - protein, 198 aa, Salmonella enterica subsp. enterica serovar Tennessee; identical to SEQ ID NO: 81885

SEQ ID NO: 85476 - protein, 458 aa, Salmonella enterica subsp. enterica serovar Tennessee; identical to SEQ ID NO: 85454

SEQ ID NO: 85477 - protein, 198 aa, Salmonella enterica subsp. enterica serovar Tennessee; identical to SEQ ID NO: 81885

SEQ ID NO: 85478 - protein, 458 aa, Salmonella enterica subsp. enterica serovar Tennessee; identical to SEQ ID NO: 85454

SEQ ID NO: 85479 - protein, 198 aa, Salmonella enterica subsp. enterica serovar Tennessee; identical to SEQ ID NO: 81885

SEQ ID NO: 85480 - protein, 458 aa, Salmonella enterica subsp. enterica serovar Tennessee; identical to SEQ ID NO: 85454

SEQ ID NO: 85481 - protein, 198 aa, Salmonella enterica subsp. enterica serovar Tennessee; identical to SEQ ID NO: 81885

SEQ ID NO: 85482 - protein, 458 aa, Salmonella enterica subsp. enterica serovar Tennessee; identical to SEQ ID NO: 85454

SEQ ID NO: 85483 - protein, 198 aa, Salmonella enterica subsp. enterica serovar Tennessee; identical to SEQ ID NO: 81885

SEQ ID NO: 85484 - protein, 458 aa, Salmonella enterica subsp. enterica serovar Tennessee; identical to SEQ ID NO: 85454

SEQ ID NO: 85485 - protein, 198 aa, Salmonella enterica subsp. enterica serovar Tennessee; identical to SEQ ID NO: 81885

SEQ ID NO: 85486 - protein, 458 aa, Salmonella enterica subsp. enterica serovar Tennessee; identical to SEQ ID NO: 85454

SEQ ID NO: 85487 - protein, 198 aa, Salmonella enterica subsp. enterica serovar Tennessee; identical to SEQ ID NO: 81885

SEQ ID NO: 85488 - protein, 465 aa, Salmonella enterica subsp. enterica serovar Tennessee; identical to SEQ ID NO: 81888

SEQ ID NO: 85489 - protein, 241 aa, Salmonella enterica subsp. enterica serovar Tennessee; identical to SEQ ID NO: 82615

SEQ ID NO: 85490 - protein, 458 aa, Salmonella enterica subsp. enterica serovar Tennessee; identical to SEQ ID NO: 85454

SEQ ID NO: 85491 - protein, 198 aa, Salmonella enterica subsp. enterica serovar Tennessee; identical to SEQ ID NO: 81885

SEQ ID NO: 85492 - protein, 458 aa, Salmonella enterica subsp. enterica serovar Tennessee; identical to SEQ ID NO: 85454

SEQ ID NO: 85493 - protein, 198 aa, Salmonella enterica subsp. enterica serovar Tennessee; identical to SEQ ID NO: 81885

SEQ ID NO: 85494 - protein, 458 aa, Salmonella enterica subsp. enterica serovar Tennessee; identical to SEQ ID NO: 85454

SEQ ID NO: 85495 - protein, 198 aa, Salmonella enterica subsp. enterica serovar Tennessee; identical to SEQ ID NO: 81885

SEQ ID NO: 85496 - protein, 458 aa, Salmonella enterica subsp. enterica serovar Tennessee; identical to SEQ ID NO: 85454

SEQ ID NO: 85497 - protein, 198 aa, Salmonella enterica subsp. enterica serovar Tennessee; identical to SEQ ID NO: 81885

SEQ ID NO: 85498 - protein, 458 aa, Salmonella enterica subsp. enterica serovar Tennessee; identical to SEQ ID NO: 85454

SEQ ID NO: 85499 - protein, 198 aa, Salmonella enterica subsp. enterica serovar Tennessee; identical to SEQ ID NO: 81885

SEQ ID NO: 85500 - protein, 465 aa, Salmonella enterica subsp. enterica serovar Tennessee str. 2691; identical to SEQ ID NO: 81888

SEQ ID NO: 85501 - protein, 241 aa, Salmonella enterica subsp. enterica serovar Tennessee str. 2691; identical to SEQ ID NO: 82615

SEQ ID NO: 85502 - protein, 465 aa, Salmonella enterica subsp. enterica serovar Tennessee; identical to SEQ ID NO: 81888

SEQ ID NO: 85503 - protein, 241 aa, Salmonella enterica subsp. enterica serovar Tennessee; identical to SEQ ID NO: 82615

SEQ ID NO: 85504 - protein, 465 aa, Salmonella enterica subsp. enterica serovar Tennessee; identical to SEQ ID NO: 81888

SEQ ID NO: 85505 - protein, 241 aa, Salmonella enterica subsp. enterica serovar Tennessee; identical to SEQ ID NO: 82615

SEQ ID NO: 85506 - protein, 465 aa, Salmonella enterica subsp. enterica serovar Tennessee; identical to SEQ ID NO: 81888

SEQ ID NO: 85507 - protein, 241 aa, Salmonella enterica subsp. enterica serovar Tennessee; identical to SEQ ID NO: 82615

SEQ ID NO: 85508 - protein, 465 aa, Salmonella enterica subsp. enterica serovar Tennessee; identical to SEQ ID NO: 81888

SEQ ID NO: 85509 - protein, 241 aa, Salmonella enterica subsp. enterica serovar Tennessee; identical to SEQ ID NO: 82615

SEQ ID NO: 85510 - protein, 465 aa, Salmonella enterica subsp. enterica serovar Tennessee; identical to SEQ ID NO: 81888

SEQ ID NO: 85511 - protein, 241 aa, Salmonella enterica subsp. enterica serovar Tennessee; identical to SEQ ID NO: 82615

SEQ ID NO: 85512 - protein, 465 aa, Salmonella enterica subsp. enterica serovar Tennessee; identical to SEQ ID NO: 81888

SEQ ID NO: 85513 - protein, 241 aa, Salmonella enterica subsp. enterica serovar Tennessee; identical to SEQ ID NO: 82615

SEQ ID NO: 85514 - protein, 421 aa, Pseudomonas syringae pv. syringae
MRLDRLHLQNFRCYEDAHFDFQPGFNLVVGVNGSGKTSLLLGVAGCFGNLLGSIGVHQPSIAESDVRFELVKFEDRIRFERSYPLVLTAQGGAFEHQEWHVSLERSSLQTNFSALNSLVFSENLISIDGATHGDLPVFAVYQANRRWLTMSVTAEHAAQSKPSRLDAYTSWFDAASNLKNFETWFIGKTLERFQRLARTGFPGILTDELTWINSAIQCALPESKGIEYDMEMRGLMVDIDDRKTPFNDLSDGQRGMVALFADIARRICLLNPHMGKDVLSKTNGIIVIDELDIHLHPVWQRTIAPALKKAFPSIQFIAASHSPQVIGSLQPGEVILLNNHDGSHPRATYGLDSSSILEEVMGVPQREPEIEELLDQLFSTLENNELEKARSQLDALKKKAPDLPEFAGAEALLKRKEIIGR

SEQ ID NO: 85515 - protein, 215 aa, Pseudomonas syringae pv. syringae
MRRIIKGTEPASFTEWKASANEDWTPTYPTLQNPQKRDLHDPLLQEQNFSCCYCGREIELDSSHIEHFRPQDHYLPLALEFSNLHASCLRETTPGSPLHCGHYKGNWFDEDLHISPTEDDCEQRFRYLLTGKIQSTSHTDLPATTMIEKLALDIAYLTKRRQEAITGVFDEQFISSASDAELANLVDSLRSGTANTSIAFGHVVARYAEQLLTQR

SEQ ID NO: 85516 - protein, 449 aa, Pseudomonas syringae pv. syringae; identical to SEQ ID NO: 80910

SEQ ID NO: 85517 - protein, 216 aa, Pseudomonas syringae pv. syringae; identical to SEQ ID NO: 81085

SEQ ID NO: 85518 - protein, 421 aa, Pseudomonas amygdali pv. morsprunorum
MRLDHLHLQNFRCYEDAHFDFQPGFNLVVGVNGSGKTSLLLGVAGCFGNLLGSIGVHQPSIAESDVRFALVKFEDRIRFERSYPLVLTAQGGAFERQEWHVSLERSSLQTNFSALNSLVFSENLISIDVSTHGDLPVFAVYQANRRWLTMSVTAELAAQSKPSRLDAYTSWFDAASNLKNFETWFIGKTLERFQRLSRAGSSSVFNDELTWINSAIQCALPDAKGIEYDMELRALVVDMDDRKIPFNDLSDGQRGMVALFADIARRICLLNPHMGKDVLSKTNGIIVIDELDIHLHPGWQRTIAPALKKVFPSIQFIAASHSPQVIGSLQPGEVILLNNHDGSHPRATYGLDSSTILEEVMGVPQREPEIEALLDELFSTLENDELEKARLQLDALKQKAPDLPEFAGAEALLKRKELIGR

SEQ ID NO: 85519 - protein, 227 aa, Pseudomonas amygdali pv. morsprunorum; identical to SEQ ID NO: 81187

SEQ ID NO: 85520 - protein, 315 aa, Pseudomonas amygdali pv. morsprunorum
MMDTLGAAVPIEALFDQLGLQTKFRISLSATSKRKFSEALSSPDALLEYIHNYSNYQRRMQVDMFTSTSKKDVMSIFEGYKHLRQQTDKSHYFDIDLKSDGRGHSEIYDFLNIVRRVGLIKDVHLELFRVGAYESYAFSNASSGETQLLYGFSSILRYACDDSIIFIDEPEVSLHPAWQIRYVGLLKKALVAVKNCHLIIATHSHFILSDLDEANSSLHVFKKEKDGGISIENLEYSTYAWSPENILYSVFNVRTIGNHAFEKDLQEALNLIAVKDSDLVRLSVLASKFQGLVFDSSDPLNKVIGAIRGYSDGHH

SEQ ID NO: 85521 - protein, 209 aa, Pseudomonas amygdali pv. morsprunorum; identical to SEQ ID NO: 81059

SEQ ID NO: 85522 - protein, 327 aa, Pseudomonas amygdali pv. morsprunorum
MKFRHRKPLEFLPENSEALVIGYGATRLLPQGRHKSRPGETYAKVDNLFNPFLPLTDPSKWLLAETEDRWIEVNQALAKLLPDGHKFSVAKNDGKVWACSSDGSKRLIKHLSDGYQCMIGMAVDIIEVMSIVYESMESAEGIVLIDELGSHFHPAWRLHCLGALRDAFPRIQFIYSTHDPLCLRGLTEGEVTVLKRDKMGQIYALEDLPPVEQLRVEQLLTSEHFGLKSTVDPEMERSIRRYEALAIQPNRTDEEDREYQGLVKSLTDERYLGTTRRERLALQLLDVDSIPEIPVSSRVSAKNLSQATVQKLRWLLKEIKPVQDAES

SEQ ID NO: 85523 - protein, 279 aa, Pseudomonas amygdali pv. morsprunorum
MIKIDRSRGVEPATLGAAAALEIAENEARVEQGITRKNKLKFTAYSDAAVKVELIKIFGRKCCYCESLLKGTQRSAIEHYRPKASLRIAKADGTYESRIGYYWLGGDWDNFLISCSDCNSTITHEHQDGGTAVSGKGTYFPIMVEKQRATCPDEILREQPILLNPCVDEPSEHIYFSEDGAVHALELGGVRSLRGAGTIELIGLHRSELVQMRARHRYIVLSAIRHTVKAMEEGCDPGADLEDLLRLLKPGEPYLAYTHMLVRNYMVNYLEMLGLDEMM

SEQ ID NO: 85524 - protein, 421 aa, Pseudomonas amygdali pv. morsprunorum; identical to SEQ ID NO: 85518

SEQ ID NO: 85525 - protein, 227 aa, Pseudomonas amygdali pv. morsprunorum; identical to SEQ ID NO: 81187

SEQ ID NO: 85526 - protein, 421 aa, Pseudomonas amygdali pv. myricae; identical to SEQ ID NO: 84730

SEQ ID NO: 85527 - protein, 227 aa, Pseudomonas amygdali pv. myricae; identical to SEQ ID NO: 84561

SEQ ID NO: 85528 - protein, 421 aa, Pseudomonas savastanoi pv. nerii; identical to SEQ ID NO: 81186

SEQ ID NO: 85529 - protein, 227 aa, Pseudomonas savastanoi pv. nerii; identical to SEQ ID NO: 81187

SEQ ID NO: 85530 - protein, 421 aa, Pseudomonas syringae pv. syringae; identical to SEQ ID NO: 84776

SEQ ID NO: 85531 - protein, 215 aa, Pseudomonas syringae pv. syringae; identical to SEQ ID NO: 80909

SEQ ID NO: 85532 - protein, 449 aa, Pseudomonas syringae pv. syringae; identical to SEQ ID NO: 80910

SEQ ID NO: 85533 - protein, 216 aa, Pseudomonas syringae pv. syringae; identical to SEQ ID NO: 81085

SEQ ID NO: 85534 - protein, 449 aa, Pseudomonas syringae pv. syringae; identical to SEQ ID NO: 80910

SEQ ID NO: 85535 - protein, 216 aa, Pseudomonas syringae pv. syringae; identical to SEQ ID NO: 81085

SEQ ID NO: 85536 - protein, 421 aa, Pseudomonas syringae pv. syringae; identical to SEQ ID NO: 84776

SEQ ID NO: 85537 - protein, 215 aa, Pseudomonas syringae pv. syringae; identical to SEQ ID NO: 80909

SEQ ID NO: 85538 - protein, 274 aa, Pseudomonas syringae pv. syringae
MVIRALREILSIDGRFDVIRRDIASKQCYVVTGIRDDGSPLSQSSLKVASSGFRSILAMACDVMRGLMNPSIYPDFESLQTARAVVLIDEVEAHLHPRWKMRIMRGLREALPNVTFIATTHDPLCIRGMNDGEIVVLRRVQLRQGTTDAGLQSQVEAQTDLPPLSELRIEQLLTSDLFQLHSTDDPEMDQQFAHIADLLAMPSEQLEPEQLRTLKRFNDDVASALPVGTSEAHRVVQDAVAEYLQIRARTSVQRVADAKASVKAKIIQALKGIL

SEQ ID NO: 85539 - protein, 309 aa, Pseudomonas syringae pv. syringae; identical to SEQ ID NO: 84521

SEQ ID NO: 85540 - protein, 421 aa, Pseudomonas amygdali pv. ulmi
MRLDHLHLQNFRCYEDAHFDFQPGFNLVVGVNGSGKTSLLLGVAGCFGNLLGSIGVHQPSIAESDVRFALVKFEDRIRFERSYPLVLTAQGGAFERQEWHVSLERSSLQTNFSALNSLVFSENLISIDVSTHGDLPVFAVYQANRRWLTMSVTAELAAQSKPSRLDAYTSWFDAASNLKNFETWFIGKTLERFQRLSRAGSSSVFNDELTWINSAIQCALPDAKGIDYDMELRALVVDMDDRKIPFNDLSDGQRGMVALFADIARRICLLNPHMGKDVLSKTNGIIVIDELDIHLHPGWQRTIAPALKKAFPSIQFIAASHSPQVIGSLQPGEVILLNNHDGSHPRATYGLDSSTILEEVMGVPQREPEIEALLDELFSTLENNEREKARLQLDALKQKAPDLPEFAGAEALLKRKELIGR

SEQ ID NO: 85541 - protein, 227 aa, Pseudomonas amygdali pv. ulmi; identical to SEQ ID NO: 84791

SEQ ID NO: 85542 - protein, 449 aa, Pseudomonas syringae pv. syringae; identical to SEQ ID NO: 80910

SEQ ID NO: 85543 - protein, 216 aa, Pseudomonas syringae pv. syringae; identical to SEQ ID NO: 81085

SEQ ID NO: 85544 - protein, 421 aa, Pseudomonas syringae pv. syringae; identical to SEQ ID NO: 84776

SEQ ID NO: 85545 - protein, 215 aa, Pseudomonas syringae pv. syringae; identical to SEQ ID NO: 80909

SEQ ID NO: 85546 - protein, 846 aa, Serratia marcescens
MVYDDEDLELAKAQAREIWKMLDYVRGASPISSYRSLAYSIFFIRYLQSNTGQHFEAPRFDSFNAISNYSYELINCAVQLGFINNEVSGFLCDYLEKTLRLFENIDESFVRHAIKDGVMSKHHSIASLSLSELDLLFAENEGKSGGEFYTPRDVNNLVAAIGLSYQPKSICDPFAGAGNTAFSFADIDYKIVTIDTQEVNKDAYFKLIISRIIRGVKGRDYFGDSLSQPTYQQNKYDLIVSFPPFGMKIPKATRDNIHYKARNNWLDIAGNLPESRSDWFITLSMLQALSEGGKLLVGMPSGALTRGGSEARVRQYLVSHGIIEQVILLPKNIHYSTSISTVLLVLNSGSNITNSRGVKFVDASLFYEPTRGRNVLTPDNINEIVEAIHSDGRFSISLHRSQIAERDFNLDPSLYVRKDLKVSEVTVKNFRGYSEFKVPMHPCLTVLVGENGAGKTSILEALACGLGPFLTAMPDAKGKLIKKSDIRIDSKGIASYARISIETTSSLSWDLVAKGKDVSEPPKIGTTALTSYASHLVDSQSEFPLIAYYGTSRALNSTNSKVAINPFEKEVRGEGYDSALDAKVNYGIIKNWFSKIEVDELRKRDELKDHKFIHPAKRLVSETVYQIVERATSLEFDKDSNDVVVHWKNEKNEYVKLTLEQLSEGYRNMVALTIDLVRRAYLLNPTSSNPLAVNGIVLIDEIELHLHPRWQQKILNDLTHLFEKIQFIVTTHSPQVLTTVKADSIRIVSADAVEAKLVKGTSTYGSESSRMLEDVLGGSIRPQHIEIVKKLNRYTKLVEADQWDTDEALELKKVLYEWGGQTEAELQRLETDIRIREFERDNENNQ

SEQ ID NO: 85547 - protein, 262 aa, Serratia marcescens
MKIINKGVEPNRFGAFRAAHPDALWERDEDSIGEAFRCCSARYQETQQQLRADQGNLCAYCEQDLLSGTNGALDDCRIEHFHPKSKRELGEPNWGLEWSNLLAVCCGGNQSRVVNPEERFDIEPENYSCDVPKGNKILDQIILNPLRLPNLNIWRFSRSTGEISVNEKLCLSLGLDVEMAHQTIEKLNLNSPRLMRFRKTVMDNLNNLITESLNSGKTVDQAVSSIAISIFRRNRAGDWPSFFSTARFYLGQQAELVLAHPI

SEQ ID NO: 85548 - protein, 470 aa, Serratia marcescens
MIFNLKIKNHEVFGDSEIVLSDDGVAKDANYYTLILGDNATGKSELLKAMIDSVVFMDNHSELQKKRKKEKKELTYELNNSSEYTCPDCIIASSSNLNDKFPVKITKSKINGERYKYLGIRSANNNAFVGKYKSIFYHSFIKIIENKKRLDTLKSSLEYYDFPLDFSFKFVVSKLASPLIGYGHLMGDYESFLNAARYALGKISESTSMGKDKILPILNDEGVMKVIYESSQLLFNKGNEHNLTLNLGSVVSCNDYIASSKYITILLRYGIISVEEFSIETEHTFGFKNASSGQFNLFSSLLTLSSELMDNTLLLIDEPEISLHPKWQVMYMSALREIIGKYKGCQVVIATHSHLLVSNMPIKDSSVLMSKKDAAGRITFSRLDCSPTGWSAESVLYNVFGVLSSRNSVFEVDVRKLAMYMSDWKDENICEYKEILRRLNRFELATNDPLRELVTKAKEYLDERLSNAKL

SEQ ID NO: 85549 - protein, 226 aa, Serratia marcescens
MLSYKFTRPRSPVEYIEKQIDFVRRFNDIGGGAWNGKIKDKIGFIRGDIKVRDEIRVFIKTKLKENQENFCYYCGESFDVFNNDDKCIHIDHILPKKAIHGRYGRFTFEPLNLILCCYVCNMTLKEDKDYGTASDDETNYSGYDFTIIHPYLDDITAHLEVNRIGAVELINEDKSKGDFMINEFNLNDTYRVERRFSSICARGMSVLLSQGMEDLVNRVLDASSAR

SEQ ID NO: 85550 - protein, 414 aa, Serratia marcescens
MYLHEVDADFFKGFDRIKIPFNTRFTVLSGPNGVGKSSVLFAIASAITISYGPLPLNEQTQCKIEFTDRNNNRDCCGFGPNSYKMISRRVSQFIGGPRDYLFGDGNAKYIFKNDIAEYFSPLFIGPNRNIFYQKIEGMKSESTPHEYRKEYLNNAIKNLANGYTPEIKQWMINRYFIIEKDWAVEEKKNWDYIISHLDFIFGGDGRFSFGNIERDLEPNFTLDGALVYLEDLSSGFKSILSIVLSIVEWIEKTNDRSNMDIETATGVVLIDELDAHLHPSWQTKIREILQTLFPCIQFIVTSHSPHIISSAEAGEVIVLKREGKEMGYDVIDKPLDAWKTDDIYSLIMGVSTVHQQTLSDVVNKIEDLISGKFFEEALSLIDEYSKKIPDSDPTAMILKKQIDFVQLKIERGVK

SEQ ID NO: 85551 - protein, 244 aa, Serratia marcescens
MIKINRGNEPAVLSANKGPWTRDLLTEVEKYQGYDKIPDDVKKKVVSHYRNEQIKGVLFATSHDKCAFCECIPSEGGNYVQVEHFHPKSTYPNECFAWENFLPCCGICNNNKGTLDTKNVEILNPYDDEIDGAFSVSYLKILPNLQNVKAVNTEKEVSLNSDRLISSRVGMLAKLQIQTEEIRQWTDVLLESDTDRKYEIRLGKLKDKVNTLEEFTKPECSHSFFCSEIIKGDIYYLKAKELIG

SEQ ID NO: 85552 - protein, 414 aa, Serratia marcescens; identical to SEQ ID NO: 85550

SEQ ID NO: 85553 - protein, 244 aa, Serratia marcescens; identical to SEQ ID NO: 85551

SEQ ID NO: 85554 - protein, 717 aa, Serratia marcescens
MRKIRRLKADTPTILKSGRIVEEVSKLRKYYLQSEELRRYSRPPVNKEIFYDESVRVSLRKTFHDCCAWCETYLTPREEEIVHFRPIGNARGLNDDESVESYGWLAYIWDNLFLSCPECNRAQRNYFPVESVRAPVLSTWEEANSLERVLLINPCRDDPLRHLSLSSDGSLQALTDKGEHTLLIFNLNRSGLVFARAEQIRIVRAMVFENNGSVEEFNSYYSSDKCLVGVTNFIVSMFLKEYSRRQGTYSTIKIESFIKDSLQNYHFNFDYPINTPIEIYEDSIALKIPSDYYDRLAKKIGDEDKASRHLKIIEIRGFKGISKFTLNIKHGDSKSLAPCVMLLGENATGKSSILQSIALTMMTESQRGKLHLSYDDFISRDRGEWTVDNIQPAVIKLIFNDGFNCAFQIDENFNASGEGSENIVFLAYGARRFVKPLKRTSQGNGIICQTLFNPVALLSNPTKWLQECDEIVFQSVARAMKEILALKQDDIIYRNELRHVMVHAHKRNTPLENMSDGYKALFYVAIDIMRHMLKRWENLEYASGIVIIDEIETHLHPRWKMQIVGAFRRAMPGVQFIFTTHDPLCLRGMFDGEVHVLKRDEIYSITEEEDLPGFQGLRTEQLLTSEYFGLLSTDDPDLERRLEDINRKEGSNQAEYIRHIEKELSEITVLGTTLSQRVVHEALARYLISVKRKMPEAKDVKEDAIRAILNVLEQKGY

SEQ ID NO: 85555 - protein, 302 aa, Serratia marcescens
MIKIDRSVQPVPVSLTTAGNVVDNERIAARRYYAVVPAPSKTYKFKRYKEEDIVEALEHLFHGKCAYCESKYIGTQKMDVEHYRPKGKVNESQGHPGYWWLALEWENLLPSCIDCNRRRGQKSYTLQDDGTFVFIDDTENAGKECAFPVSGVYRAQGRQDDLRLEIPLLINPCEHDPRDHLRWHINNLKLPLLLANSVQNLPDERGVKSIEIMGLNRFGLVTKRAEVLQPVVVQINSIFELIDITATLPPGEARDRYLAKIGRDIDALQTCYEPSREYAGMIKSYIDSHMDTLKEELARLVA

SEQ ID NO: 85556 - protein, 507 aa, Serratia marcescens
MFRINSIMNDSRDKVRVHDFSEDSHNNYYTILTGDNASGKSSLLSKAINFFLFSNVNNNDRNPAVELECLSERNPSKIIAICNSKFDRFTSNKILNDKLNNKEATRITMSYIHPEVNDNTRRGISGIVDQCIKNSLRHKNIRGLQDANRVKEAFMMFGLQSDLHLKCTLNTQNIKYVLSILSSLVNGGVILSDEGITHTKKIDYSKNEELKNKNFKLDKSIEIILRESEYKNHLDGLYDTLLMLDAGKFTQGNFSSIYFSVAEGTISTESKYLFDDLNEAEIINILFVLDVINVSDIQVMHLNSKKEVNIVSLSSGQRTLFGNAIVLSGYVEKNCMICIDEPENSLHPEWQLNFMRFISLLCPDTLEAHILIATHSPQIISGMQFDNGCVLSLENRDNFDSIIRKENKYEEGGFYELQPLKAYREQSAGKQLTGVFKSPGYKNDFIIKKLLLILSKISKKIALTKDDNEFMDEISILIDKKRIPEGDPVQLIFKQILSFEYARNSDD

SEQ ID NO: 85557 - protein, 224 aa, Serratia marcescens; identical to SEQ ID NO: 83969

SEQ ID NO: 85558 - protein, 414 aa, Serratia marcescens; identical to SEQ ID NO: 85550

SEQ ID NO: 85559 - protein, 244 aa, Serratia marcescens; identical to SEQ ID NO: 85551

SEQ ID NO: 85560 - protein, 414 aa, Serratia marcescens; identical to SEQ ID NO: 85550

SEQ ID NO: 85561 - protein, 244 aa, Serratia marcescens; identical to SEQ ID NO: 85551

SEQ ID NO: 85562 - protein, 414 aa, Serratia marcescens; identical to SEQ ID NO: 85550

SEQ ID NO: 85563 - protein, 244 aa, Serratia marcescens; identical to SEQ ID NO: 85551

SEQ ID NO: 85564 - protein, 414 aa, Serratia marcescens; identical to SEQ ID NO: 85550

SEQ ID NO: 85565 - protein, 244 aa, Serratia marcescens; identical to SEQ ID NO: 85551

SEQ ID NO: 85566 - protein, 507 aa, Serratia marcescens; identical to SEQ ID NO: 85556

SEQ ID NO: 85567 - protein, 224 aa, Serratia marcescens; identical to SEQ ID NO: 83969

SEQ ID NO: 85568 - protein, 717 aa, Serratia marcescens; identical to SEQ ID NO: 85554

SEQ ID NO: 85569 - protein, 302 aa, Serratia marcescens; identical to SEQ ID NO: 85555

SEQ ID NO: 85570 - protein, 846 aa, Serratia marcescens; identical to SEQ ID NO: 85546

SEQ ID NO: 85571 - protein, 262 aa, Serratia marcescens; identical to SEQ ID NO: 85547

SEQ ID NO: 85572 - protein, 414 aa, Serratia marcescens; identical to SEQ ID NO: 85550

SEQ ID NO: 85573 - protein, 244 aa, Serratia marcescens; identical to SEQ ID NO: 85551

SEQ ID NO: 85574 - protein, 414 aa, Serratia marcescens; identical to SEQ ID NO: 85550

SEQ ID NO: 85575 - protein, 244 aa, Serratia marcescens; identical to SEQ ID NO: 85551

SEQ ID NO: 85576 - protein, 507 aa, Serratia marcescens; identical to SEQ ID NO: 85556

SEQ ID NO: 85577 - protein, 224 aa, Serratia marcescens; identical to SEQ ID NO: 83969

SEQ ID NO: 85578 - protein, 717 aa, Serratia marcescens; identical to SEQ ID NO: 85554

SEQ ID NO: 85579 - protein, 302 aa, Serratia marcescens; identical to SEQ ID NO: 85555

SEQ ID NO: 85580 - protein, 421 aa, Pseudomonas amygdali pv. eriobotryae; identical to SEQ ID NO: 84730

SEQ ID NO: 85581 - protein, 227 aa, Pseudomonas amygdali pv. eriobotryae; identical to SEQ ID NO: 84731

SEQ ID NO: 85582 - protein, 451 aa, Pseudomonas syringae pv. avii
MQNYRCFGEFEIDFDPHLTILIASNGGGKTTILDAARVALWPFVKGFDLGGQTGKSATIQIEDVRLAPFGSGNMESQVPSVIEAKGIWWEKADDCRWLQQRVSLKKSTNTIGDAGSKALTLYGKSLQDSVRSDAHVTLPMVTYLGTSRLWFEGRFSSAAAQTTLDKSEYSRTSAYLNCLSYSSSFKTFTAWYIWMYRSYREAQLIALERGEEMSDTGQRFEKIISAVKEAIDRLIKAPTGWHRLEYSASHQQQLVMHHPDQGILPVEMLSDGLRNTIAMVADLAFRACKLNPHLGERAPLQTPGIALIDEVDMFLHPFWQQTIVGSLRAAFPAMQFIVTTHSPQVLSTVRRENIRVIGKDAQGRLIASRPLAMTYGEPSNSVLRSVMQVDPQPPVDEKPGLLQLTEWVDKGRYNEPQAILLMQQITEALTEQHPQLQRLKRSIKRQKALRG

SEQ ID NO: 85583 - protein, 189 aa, Pseudomonas syringae pv. avii; identical to SEQ ID NO: 84593

SEQ ID NO: 85584 - protein, 421 aa, Pseudomonas amygdali pv. dendropanacis
MRLDHLHLQNFRCYEDAHFDFQPGFNLVVGVNGSGKTSLLLGVAGCFGNLLGSIGVHQPSIAESDVRFALVKFEDRIRFERSYPLVLTAQGGAFERQEWHVSLERSSLQTNFSALNSLVFSENLISIDVSTHGDLPVFAVYQANRRWLTMSVTAELAAQSKPSRLDAYTSWFDAASNLKNFETWFIGKTLERFQRLSRAGSSSVFNDELTWINSAIQCALPDAKGIEYDMELRALVVDMDDRKIPFNDLSDGQRGMVALFADIARRICLLNPHMGKDVLIKTNGIIVIDELDIHLHPGWQRTIAPALKKAFPSIQFIAASHSPQVIGSLQPGEVILLNNHDGSHPRATYGLDSSTILEEVMGVPQREPEIEALLDELFSTLENDELEKARLQLDALKQKAPDLPEFAGAEALLKRKELIGR

SEQ ID NO: 85585 - protein, 227 aa, Pseudomonas amygdali pv. dendropanacis
MRRVIKGTEPASLAEWKASANEDWTPTYPTLQNPQKRDLHNCLLQEQNFSCCYCGREIELDSSHIEHSRPQDHYLPLALEYSNLHASCLRETTPGNPLHCGHYKGNWFDEDLHISPTEDDCEQRFRYLLTGKIQSTSHTDLPATTMIEKLALDIAYLTKRRQEAITRVFDEQILASISDTELTLLVQGLRSGDANKQLAFSHVVARYAEQFLASLNPPPEKSSVKNT

SEQ ID NO: 85586 - protein, 421 aa, Pseudomonas savastanoi pv. fraxini; identical to SEQ ID NO: 81186

SEQ ID NO: 85587 - protein, 227 aa, Pseudomonas savastanoi pv. fraxini; identical to SEQ ID NO: 81187

SEQ ID NO: 85588 - protein, 540 aa, Serratia marcescens
MNDAKRRVDNVFSEFIELINNDDSEKSIKASPVLKLLNDSLNKDNLYIKKVTVSDFKRLREVIVNLEDDLTVFVADNGYGKTTLLDAIAISLSWLRSNIQKKDKPGSYIRETDINNSKDALYASITTTFKVQNLNTNVLITSTKEGVSFKRSNELQEIKSLATMYRYVNTFLDDSSLPVMAYYSIVRSVVGGGIDNKRKNNKNKVSWSKFDVYDDFIFDRNDFGEFLNWLMFLSNKSLHENASTVHTSESLKIEIERINSTIEQLSAVSNIDSNIINTLALSLEEKKSQFKQVSNVGGLNSSVLYNNVISAILRFLPEFENINLVYSENEFKLVLTKSGIELDAQQLSQGEKTILTLVGDLARRLSLLNPELENPFEGKGIVLIDEIDLHLHPTWQQKIIGRLLTTFPNVQFILSTHSPQVLSTVPARSIRILEEVQDELGNVSIKATNPRYQTKGLMNSDALLYGMGTDPAPPVNEVKWLDEYKAAIELDQFDSESALILRDNIIKHFGKEHPLVIECDQMISLMKFKREIRNNKEGEK

SEQ ID NO: 85589 - protein, 222 aa, Serratia marcescens
MKHLHRVHPGPDVLRKYDCKTQTWDDVSSSDKKAIWVELVKMQGKVCAYCERKIDLHKEGDKHIEHFKRKGSHKGLTFDWGNLFGSCGEKKRCGFYKDKQEYNESDLLKADVLDPNDFFLFIYSGDVVVKPGVNAQSKKIAEVTLSVFNLNPKYGGVKAERRSALEKGMSAMMGYIKIAQELIESGGDVDGVSQYVRDCYYEHIEKMDFISARKHVFDAFLP

SEQ ID NO: 85590 - protein, 452 aa, Pseudomonas syringae pv. broussonetiae; identical to SEQ ID NO: 84758

SEQ ID NO: 85591 - protein, 216 aa, Pseudomonas syringae pv. broussonetiae; identical to SEQ ID NO: 81063

SEQ ID NO: 85592 - protein, 421 aa, Pseudomonas syringae pv. castaneae; identical to SEQ ID NO: 84724

SEQ ID NO: 85593 - protein, 227 aa, Pseudomonas syringae pv. castaneae; identical to SEQ ID NO: 81187

SEQ ID NO: 85594 - protein, 846 aa, Serratia marcescens; identical to SEQ ID NO: 85546

SEQ ID NO: 85595 - protein, 262 aa, Serratia marcescens; identical to SEQ ID NO: 85547

SEQ ID NO: 85596 - protein, 717 aa, Serratia marcescens; identical to SEQ ID NO: 85554

SEQ ID NO: 85597 - protein, 302 aa, Serratia marcescens; identical to SEQ ID NO: 85555

SEQ ID NO: 85598 - protein, 507 aa, Serratia marcescens; identical to SEQ ID NO: 85556

SEQ ID NO: 85599 - protein, 224 aa, Serratia marcescens; identical to SEQ ID NO: 83969

SEQ ID NO: 85600 - protein, 507 aa, Serratia marcescens; identical to SEQ ID NO: 85556

SEQ ID NO: 85601 - protein, 224 aa, Serratia marcescens; identical to SEQ ID NO: 83969

SEQ ID NO: 85602 - protein, 717 aa, Serratia marcescens; identical to SEQ ID NO: 85554

SEQ ID NO: 85603 - protein, 302 aa, Serratia marcescens; identical to SEQ ID NO: 85555

SEQ ID NO: 85604 - protein, 846 aa, Serratia marcescens; identical to SEQ ID NO: 85546

SEQ ID NO: 85605 - protein, 262 aa, Serratia marcescens; identical to SEQ ID NO: 85547

SEQ ID NO: 85606 - protein, 470 aa, Serratia marcescens; identical to SEQ ID NO: 85548

SEQ ID NO: 85607 - protein, 226 aa, Serratia marcescens; identical to SEQ ID NO: 85549

SEQ ID NO: 85608 - protein, 717 aa, Serratia marcescens; identical to SEQ ID NO: 85554

SEQ ID NO: 85609 - protein, 302 aa, Serratia marcescens; identical to SEQ ID NO: 85555

SEQ ID NO: 85610 - protein, 507 aa, Serratia marcescens; identical to SEQ ID NO: 85556

SEQ ID NO: 85611 - protein, 224 aa, Serratia marcescens; identical to SEQ ID NO: 83969

SEQ ID NO: 85612 - protein, 480 aa, Serratia marcescens
MFTLLSFNITHKENEIYDCIFTDIQRHIRNLPLSSIIIGENGSGKSYLLSQVADFFRFIQRIKIKEKKPYYKYESASVRYLIDSDLIVIKKEKNKIFCFVNDIPSDISLVRLPTKVIAMSFMVNDKFSFSRFEEDDFYDYRGVRATSNASYTSTIKRMITNSLILSIGYRDKLKAVKDTLHFLGMSEKLAITYNLNRKTLLKRQLPLNTILKKIDAILRRKQYVNESEFYKIKKNPEVILHDIDILREECKEKNGRIHLNLDLSDEGRGVKTSLFQSLSRLEKLEFISNPDVEFYKKDNFSFEETSSGEKNIIFTILNLIASIKRDSLLLIDEPELSLHPAWQMKYINFIKKSIAYNFDCHLLFASHSHFMVSDLEPESSSLTSINQYDGKRICEHIEYSTYAWSVDNILYKVFHLRTIRNAQVEMDLYELSALISQKSSDIKRVEKILTHLERIVLDVNDPLNLILEQGRVYIGDYHDK

SEQ ID NO: 85613 - protein, 191 aa, Serratia marcescens
MNKINSFKPFVGGSWDRKDKEIIIFKRLLRKQLLTAQNDCCAYCGLPLGETGKTEIEHLVAKGGPKRPKHVEFTFEVDNLYLSCNLCNSPLKKGTKETIIHKDPISYSNCTFSIVHPRYDTPNMHYSWVVNPIEILIQGISDKGRESIKMFKLDSIPHTEARARIEMSKRFKMLNDPQQIELVMAALQYNP

SEQ ID NO: 85614 - protein, 846 aa, Serratia marcescens; identical to SEQ ID NO: 85546

SEQ ID NO: 85615 - protein, 262 aa, Serratia marcescens; identical to SEQ ID NO: 85547

SEQ ID NO: 85616 - protein, 846 aa, Serratia marcescens; identical to SEQ ID NO: 85546

SEQ ID NO: 85617 - protein, 255 aa, Serratia marcescens
MKIINKGVEPNRFGAFRAAHPDALWERDEDSIGEAFRCCSARYQETQQQLRADQGNLCAYCEQDLLSGTNGALDDCRIEHFHPKSKRELGEPNWGLEWSNLLAVCCGGNQSRVVNPEERFDIEPENYSCDVPKGNKILDQIILNPLRLPNLNIWRFSRSTGEISVNEKLCLSLGLDVEMAHQTIEKLNLNSPRLMRFRKTVMDNLNNLITESLNSGKTVDQAVSSIAISIFRRNRAGDWPSFFSTARFYLNSCAE

SEQ ID NO: 85618 - protein, 408 aa, Serratia marcescens
MLCSISKINILIPYSRKKVNIQLDGKSLIITGGNGCGKTSFITAIYNYLKKGIDDPNNNSIEYLMNQINHYKHQIENIGRDGGNYNYYKDMLEKNKDRLEEINNFNIETDYIDNKDIRSLLRFHSATRQSAISSPNQAPKHSVLIEENKHFPNDKDGSQFFESYLLSLKKNQSYAIAFDKDENEAKRINLWFDKIQLDLRSLFEDPGLGLEFDTKDEKFYLHQDGKDRYTFQTLSAGYSSILSIYTDLIMRVEMWEVSPDNIQGIIFIDEIDAHLHVSLQKQILRFFIKSFPKIQFIVTTHSPFVVTSVADSVIYDLTANEQIIDASSYSYGVVMEEIFGVLPDSHALTDKLTHIENLVKNITKENIFELEEIISSLASNKDNMSDNTQAFLDSVQLKLIKTKKNIRR

SEQ ID NO: 85619 - protein, 217 aa, Serratia marcescens
MFNVIRTIPAPASLSDKKTYDGDDVHSALQECFHEKCYLCETKKPLDINIEHFDPHMGDITKKFSWTNLYLVCSRCNNIKLIKYKNLLDCCSISVWDRVKLTPGFSPKAKKFIITPQFPDDKTIETAQLLNDIYNNDNTINKRLTARSLRTQVVQTTHKLTQHMIVYHSEDSTDEEKENALDKIKVMIKKSYPYSAFCRWMIKDDEDLDKLLTPIMD

SEQ ID NO: 85620 - protein, 846 aa, Serratia marcescens; identical to SEQ ID NO: 85546

SEQ ID NO: 85621 - protein, 262 aa, Serratia marcescens; identical to SEQ ID NO: 85547

SEQ ID NO: 85622 - protein, 846 aa, Serratia marcescens; identical to SEQ ID NO: 85546

SEQ ID NO: 85623 - protein, 262 aa, Serratia marcescens; identical to SEQ ID NO: 85547

SEQ ID NO: 85624 - protein, 507 aa, Serratia marcescens; identical to SEQ ID NO: 85556

SEQ ID NO: 85625 - protein, 224 aa, Serratia marcescens; identical to SEQ ID NO: 83969

SEQ ID NO: 85626 - protein, 717 aa, Serratia marcescens; identical to SEQ ID NO: 85554

SEQ ID NO: 85627 - protein, 302 aa, Serratia marcescens; identical to SEQ ID NO: 85555

SEQ ID NO: 85628 - protein, 846 aa, Serratia marcescens; identical to SEQ ID NO: 85546

SEQ ID NO: 85629 - protein, 262 aa, Serratia marcescens; identical to SEQ ID NO: 85547

SEQ ID NO: 85630 - protein, 846 aa, Serratia marcescens; identical to SEQ ID NO: 85546

SEQ ID NO: 85631 - protein, 262 aa, Serratia marcescens; identical to SEQ ID NO: 85547

SEQ ID NO: 85632 - protein, 846 aa, Serratia marcescens; identical to SEQ ID NO: 85546

SEQ ID NO: 85633 - protein, 262 aa, Serratia marcescens; identical to SEQ ID NO: 85547

SEQ ID NO: 85634 - protein, 846 aa, Serratia marcescens; identical to SEQ ID NO: 85546

SEQ ID NO: 85635 - protein, 255 aa, Serratia marcescens; identical to SEQ ID NO: 85617

SEQ ID NO: 85636 - protein, 846 aa, Serratia marcescens; identical to SEQ ID NO: 85546

SEQ ID NO: 85637 - protein, 262 aa, Serratia marcescens; identical to SEQ ID NO: 85547

SEQ ID NO: 85638 - protein, 846 aa, Serratia marcescens; identical to SEQ ID NO: 85546

SEQ ID NO: 85639 - protein, 262 aa, Serratia marcescens; identical to SEQ ID NO: 85547

SEQ ID NO: 85640 - protein, 414 aa, Serratia marcescens; identical to SEQ ID NO: 85550

SEQ ID NO: 85641 - protein, 244 aa, Serratia marcescens; identical to SEQ ID NO: 85551

SEQ ID NO: 85642 - protein, 846 aa, Serratia marcescens; identical to SEQ ID NO: 85546

SEQ ID NO: 85643 - protein, 262 aa, Serratia marcescens; identical to SEQ ID NO: 85547

SEQ ID NO: 85644 - protein, 414 aa, Serratia marcescens; identical to SEQ ID NO: 85550

SEQ ID NO: 85645 - protein, 244 aa, Serratia marcescens; identical to SEQ ID NO: 85551

SEQ ID NO: 85646 - protein, 482 aa, Serratia marcescens
MFKLDTIKNHRKDDVIVSIDNKLNNESFYTLITGENGCGKSTLLSKAINSFLFINPKKSKECQVSSSSKSQPSRIIAICNARYNKFALKKTFLEKNKIYNPDYYIQADPTLEVGRALNEVIQLSLREITNTQNEINNKTVRTIQDKERCFKAFSMIGIHPEIRFNLELNVDRVCKIKDAYERQELNEPSHVSVVHSLSREFLYLARMNHISSSDIEEFFNFYDFIDNKTISLGEGVLHFDSPRYQILSEQTNTDLLRIGIAVGFIAPAKIKVQRDNSLKWVSHHDLSSGQQSLLLNAILISIFAKKNSLICIDEPENSLHPEWQINYMKFLDCLCPSNLQSHIFIATHSPQIISGLQSNNGCIVSLLNLNPMHKNNRNHISTTGEIISTNWQELHSASSYRRKSAAHQLVDIFKSPGFDNEAIINKLLLILTKQTKKIEINYEDENFIDGVQNLIRNEKIDDCDPVLVMYKQIKAIANLRGF

SEQ ID NO: 85647 - protein, 232 aa, Serratia marcescens
MILQAIEFKGDLLRHVETFDGDSGHWDGTDKIRVKLRGAIRKHYLAQQDYHCAYCNRFRQDFHGYCWDIDHIIPKDTHPQFTYEPHNYALTCKDCNTKKGEFNVLEPSVIAAVKYPKNSNDYIIINPHFDDYSVHMAVDYNFNKQVYHIPKTKKGTETFRMCNLSRFTEVIAKTSEVVEGENITIGFSDTEFREIYINYKAIMNNNELTPSERKQRLISRLTELLGVDMNNM

SEQ ID NO: 85648 - protein, 507 aa, Serratia marcescens; identical to SEQ ID NO: 85556

SEQ ID NO: 85649 - protein, 224 aa, Serratia marcescens; identical to SEQ ID NO: 83969

SEQ ID NO: 85650 - protein, 717 aa, Serratia marcescens; identical to SEQ ID NO: 85554

SEQ ID NO: 85651 - protein, 302 aa, Serratia marcescens; identical to SEQ ID NO: 85555

SEQ ID NO: 85652 - protein, 409 aa, Vibrio parahaemolyticus; identical to SEQ ID NO: 81298

SEQ ID NO: 85653 - protein, 221 aa, Vibrio parahaemolyticus; identical to SEQ ID NO: 81113

SEQ ID NO: 85654 - protein, 470 aa, Vibrio parahaemolyticus; identical to SEQ ID NO: 81302

SEQ ID NO: 85655 - protein, 214 aa, Vibrio parahaemolyticus; identical to SEQ ID NO: 81297

SEQ ID NO: 85656 - protein, 458 aa, Salmonella enterica subsp. enterica; identical to SEQ ID NO: 85454

SEQ ID NO: 85657 - protein, 198 aa, Salmonella enterica subsp. enterica; identical to SEQ ID NO: 81885

SEQ ID NO: 85658 - protein, 255 aa, Arthrobacter sp. ATCC 21022
MEKLDAAVASAKITSSKSLFWEIEADFSKENIGAKSNASREFSDSNLLRRAGLIRLESVILKRLGDGALLDLREASSGQISLATTFLGIAASITDGALVLIDEPEISLHPEWQAAYLGLAQRLFSSYTGCHFLVATHSPSVVAGMSETNANAVSLDLASVGPEVSSNYGGDSVDELLVREFGVYESGNLFLQKELARALDLASVGEISSDAFRHAVEVISPAAIELKDEPFGRLVASLLRAAKHADDSEVGSVSR

SEQ ID NO: 85659 - protein, 227 aa, Arthrobacter sp. ATCC 21022
MEYEYLPEDSQALRSHVGDGQDLWGADWGASDLEPVRSRLKKFHMANESQRCVYCRQQIIDQHAIHWNIDHIVPKSVVPDYSYFPKNLALCCWGCNQAKGKADPRTRQAVKHASYPSEARHYEAYHPYFDEWEDHFYMDEDSLVIIPRKGSAKAKKTIEMCRLKRLAEIKAQLAMDAKESRAIDTMRELMGKGNQSLILKFIAALDDFSGSKAEFSQLVREMQITGS

SEQ ID NO: 85660 - protein, 422 aa, Pseudomonas fluorescens; identical to SEQ ID NO: 85042

SEQ ID NO: 85661 - protein, 214 aa, Pseudomonas fluorescens; identical to SEQ ID NO: 85043

SEQ ID NO: 85662 - protein, 368 aa, Pseudomonas fluorescens
MHINFVVGKNGSGKSRHLQEVSQGSRRDTLIICNTVHDKFRTRPGVKKFSVRNLRNTPSNIIKSAFVELARESTYRLNAIAKVLEYCNYNPVLTFIAVLHKDAEETLSELSHMAMSSRRDFDISPNIIESLSESNSHGHIEFEINLTLSYIEPRIQEMLLGILEGEHHLRKLKLLKGVEVHVQHKDGNRFLRIDQASSGELTLIASQLFILTNMRNGSLILIDEPENSLHPQWQKDYVNTLGDLIGRYDVEVFIATHSPLIVSGVRNSEDSISFHYAETGNTTFFDHSVPSAEESLWEQFETITPESRYVSDHVVDLLEDLDNKKRTFDEVTQALESMARASYDERQGKVLQAAKKLAIEIHQEAQNV

SEQ ID NO: 85663 - protein, 217 aa, Pseudomonas fluorescens
MSDPLHPPLTDFAFTAEEEEAVKFALTTSKPWKHEHDDLKGVRAVLVALKHRIRSFHLKRQSSKCCYCRMNLHGGGSFIVDREHIVPKEKYRDLTYVISNLSVACKRCNMQLKKDDVEFLVSRDTILTNHGSSDQYRFIHPNFDKYSQFIKKISYEEDDQTYVKYTKSDHPKAEYTYSYFDLRALEVNSFDQGQGIDTSNVSNLIRERLDQEVSQLG

SEQ ID NO: 85664 - protein, 427 aa, Pseudomonas fluorescens
MQIKRFTLVNFRGIEKMELDFEGRKTVALVGINGVGKSSILDALAITLSNLTSRVVGKAAKSRTLSKDDIRAGEDYTRLELTTDLQNQPGTKDLSWAIALNKKGGKHPADRSSDLLALNVKADEFEYGIRHYESGFDDWITLPLAVYYDVHRAVLDVPLRVREQLVNAIAEGYDDALGHGGADFKRFFIWFRNQEDLENESSRDTPGYRDRELSAVRRAIETFTGFRDVRVRRKPALRMTVLKGDLEFNVLQLSDGEKCLLAMVGDLARRLTLLNREVADPLQGKGVVLIDELDLHLHPGWQRTVVANLEKTFPNCQFIITTHSPQILGELPAEAIMLLKDGRFIGHPERSLGLRSGEVIEELMGDVAQNRDVGHQLQAIHRYLDDDKLEHAEASLSQLRDKVGDIPDILEVQASIDSLRWAGESEA

SEQ ID NO: 85665 - protein, 239 aa, Pseudomonas fluorescens
MRSITKGAEPRELIEWRRENKDTPQNLFYGRGSSFPAEPVRRSLLREQFHLCAYTLRRLPTAQECGAKGQDTIFSCHIEHVLPQARHVDQSIAYDNMVACYPPSQSNVACEYGAEEKKAYDPARNPFVSPLSPHASRLFRFLRDGKVEGLSPEAVQTIEVLKLNHATLVNDRKAVIKGWLMPRGKPISAAAARRLSTEAETPDANLCLLQYCMALKQQAELHADKYEKRAVRTRGQVRP

SEQ ID NO: 85666 - protein, 306 aa, Pseudomonas agarici
MAASKELKRIDNGEQIDLPVLAFYRADRRWSSSGVSPEIAATTKISRLDGYIDWSNSAVNLKNFEGWMIGKTLERLQRLSRSKGTPEKYEDELQWVNAALKYALPESQGIEYDLELRNLLVSFNTNKTVPFNDLSDGQRGLITLIADIARRMCILNPHMGKDVLRNTSGVVIIDELDIHLHPAWQRTIVRALKTAFPKVQFIVASHSPQIIGSLRPKEIIVLDNGDSSHPRVSYGLDSSRVLEEVMGVSQREPKVESLLSELFRALENNNLEEAKARLLSLKAEAPDLPEFARAEALLKRKEILGK

SEQ ID NO: 85667 - protein, 213 aa, Pseudomonas agarici
MKQVIKGTEPASFTDWKASANEDWQPSYETLQNPQKRDLHLSLLLEQRHACCYCGREIDLHSSHIEHFRPQEHFEHLALDYENLHASCLRETKPGNPLHCGHRKGNWFEEKLHISPLEQNCEQRFCYLLTGEIQAFTNDAGATKMIEVLALDIAYLNNRREEQLLGFFDNDFLIDASEEDLRRTIEFFRWVENDHPVPFSHVIARYAEQLMSA

SEQ ID NO: 85668 - protein, 431 aa, bacterium P3
MLFSKKSCNFAAIKNDIMRIERLELRNFRCFEHISAKLHPKMNVMVGINGTGKTTMLEAIRIFVGAAFCELDKIENRISSPSIADDDVRLHNLESQYPVRIEGVVDVDKGLLPDKLAQWDRTLEKYGGRTKFDNSKDVKSLSKNIQSIIRDGKDIPIPVIAYYSTDRYKKEKRNTGLEADGSRLRGYYNALDSTTNIWFFLNIIKTETLWELQEGKKSAVLSMVRKVIVQCVPDCKEIKHDVKQDKLIITQANGEKVPFSSLSDGVRNVLSMVMELALRCYLLNPSQGENAPSKTPGIVLIDEIDLHLHPEWQLHILNDLTSVFGRIQFIVSTHAPLILSSLQDGEILSISDRKVYNFPNQYKRRPEQILKDMNTSIASDDIEKALADYRLLIEAGKGKSEEAVALRKKLVSALGEGHEELQRTDIMLQLF

SEQ ID NO: 85669 - protein, 240 aa, bacterium P3
MRYIPKPDYSSALTLLEDAQKKMREAGISELYEHFHEKEQLNSILREEQKLICCYCQRRIDHFQGDNERGSHNEHFEPEKGDNARTDLQLDYKNLYACCNASKGFEKRLQHCGEHKGSDVINRNFLAMRDCSEYFKYNTNGEILPQCSMNSFKEICEHRESLTDIQRDALQMIEVLNLNVDSLTEFRRNVQADVFKFALNKSQKQLEYKAQLLNTERKEYVQMVDMVLFFLKVFSQKAAR

SEQ ID NO: 85670 - protein, 540 aa, Vibrio cholerae O1 biovar El Tor; identical to SEQ ID NO: 80874

SEQ ID NO: 85671 - protein, 205 aa, Vibrio cholerae O1 biovar El Tor; identical to SEQ ID NO: 80875

SEQ ID NO: 85672 - protein, 431 aa, bacterium F083; identical to SEQ ID NO: 85668

SEQ ID NO: 85673 - protein, 240 aa, bacterium F083; identical to SEQ ID NO: 85669

SEQ ID NO: 85674 - protein, 476 aa, Burkholderia sp. LMG 29319
MHLISLAITDVRSIAKMTLDFSSDKPTARRWTLLLGENGCGKSTVLRCIALVLAGGDGLADLLSDPDAWIRHGRPSCKISATIEFEPGRHLDISLEMRRGDTLSEILDRNRESLVQFDQSLKQNSESAVALGYGVSRRLPVAGRRVTGLSRLTRSPRAGAFATMFLPEFPLISLEDWAIDLHYRKGAKGLSAIRDSLNTLLPGMEFARIDRVRGKLMFRTTDGPIALSELSDGYQSMAAWFGDLLFRITQTLPHAINPLMASGLLLIDELDLHLHPLWQRRLVQFLDKTLPNFQIIATTHSPQTAQQSSEGDLYVIRRHARTNAPELIPFVGEPKTMLLHQLIMSPMFGIDSMDSLEVEKKRAAARRLELTDSRTANQEKRLRNLATELSSLPEWTVSKDELVKLGVLTDTRRKTGQASHSPKPVISPTHLRAMRRRLEAKGDSMQGIVGRAPTEQRATERPSRASTPKKRRSAKA

SEQ ID NO: 85675 - protein, 280 aa, Burkholderia sp. LMG 29319
MIRLTRIRDEAHLKGFTGAALQEKLEKLLGYYFSDPGKGVDFKIKSRHVWKTAKNSLKIESHNKCAYCEADTATVAYGDVEHFRPKDHYWWLSYCYDNFAFSCQVCNQSYKGANFPVDQQRLARPKLPRALPTDVLKLSSYAKSLSPDPFVHKDNAITRLFRSELAHLPNPYQGQPEKLFGWKVTKSTKEVHVVPRKGSVRSTKAVVAAEKFLGINRSELLRVRFLHYESLETMVSLFQDSKYSPSAQKKMLARIQRMGDNDQPFAGMKRFFLRQWGLID

SEQ ID NO: 85676 - protein, 461 aa, Burkholderia sp. LMG 29324
MLTAFDFENRNFRLTTGDVVGDENKYTVIVGKNGTGKSRILKAIVEHFVDPDTLERRRSDELRLRTSPYLRLAYDYQPSNVIAISTSPFDRFPLPESRRLLIEHLGSGDAVYPSYEYLGLRGLFSRNLGLSFMSRTITSLIKSVYENSQHAKQICQVLNYLRYDGSIEARFQLDPSISTLRRILTEEDPIPALHDYLASRREVFRLNPLRNRDRTADVDDLIYALRRFVNALGRPRIDIKIDRFGAHSLNQVDLQIDNDFVLLLELGLLRLRGVSLRKLDTPDRIHLNEASSGEQSVVLGFLGIAGHIQDGSLICIDEPEICLHPEWQERYIQLLISTFRRFKRCHFVIATHSPQIVARLEEDNCFVLNIETAHIADAKVLIKRSSDFQLATTFGAPGYKNEYLSRELITLITHFSKVGELDDEQAGLARTLLKLRSVLDDADPVASLMKMLDEILVEQTK

SEQ ID NO: 85677 - protein, 243 aa, Burkholderia sp. LMG 29324
MKFIPAPVEYVEEKIKAKVDGYNLLKETEKSGKYWDQPDDAALAAVKKHIKDYYIGVQDGKCPYCRQQMLVKHNGAWDAEHIIPKDLHPRFLFDPENLCVSCKDCNGEKSNKNVLKNSNYKPKKLPRNKDAYIICHPHFDTYEDEVKVVMNPLFHIPKSEKGRKTIEICGLLRFAYKMSTYGTVSTGIADEIGVLHRSLASATEGGEQALILAAIKDKCDEGVELAKRARIADLVKRQSALTG

SEQ ID NO: 85678 - protein, 552 aa, Klebsiella pneumoniae; identical to SEQ ID NO: 82534

SEQ ID NO: 85679 - protein, 280 aa, Klebsiella pneumoniae; identical to SEQ ID NO: 82535

SEQ ID NO: 85680 - protein, 425 aa, Leptolyngbya sp. NIES-3755
MLLKNLTLNNVRAFSHAEFTFQPGMNLIVGINGVGKSTVLEVIRIVLATILPKFSLATIERTIKFKADDIKVGESSLTVSLNLQVLDTPIQCEFQYLRKAEVKLNPNNQVILDRLKQRVIPLAVYFSPQRAIASMAKSKDITYGVSTAFVDALKHRELRFLEFADWLFAQENLALENVPHVEKFIDTLNSVISYFLDSLGRPRAFQLVKIRDVKDKPHHKNIDVTTNFRIEKSGVGLTVSQLSDGERGMLALVLDLARRLAIANPDLEDPLQGKAVVLIDELDLHLHPKWQRTIVQKLTTTFPNCQFIATTHSPLIISEVPSSGLILLSQEDDQINVIQSGLYGFGFDTSWILRHLMDTDSRNPEAQTQIDRVEEALEDGDLDLARQHLEQLKTMLHGKDDEVIRLEASINNLEALADAMDTEAE

SEQ ID NO: 85681 - protein, 233 aa, Leptolyngbya sp. NIES-3755
MRWIRKQNEPRQLTEWRLKYKKDPNLGYELLRKNKEAIAAVHFSLLEEQGYLCAYTGTGIDENSSHIEHIKPQTHCQPIETVTYTNIVACCPGANKPDPPYGAKKKDHWPSPAEAHLFVSPLEPSCESKFRYAKNGEIKYQAGDLAAQITIKKLGLNHKLLIATRKATIQGVLGKTNNLSLKDAKQRLKQLQNQNSGKLEPFCFVIIQALEKYIKSIEFRRAQKQIQSKKTKK

SEQ ID NO: 85682 - protein, 420 aa, Leptotrichia wadei
MKIRKIHIKEYNGLKNLNINFKSNDKILDTIILIGVNGSGKTRILESIYHCFKIFKSTIVDLELFYEKNENEVLESLMDSEGLTEIEKEMQKDIDYIDCLRNIKYYNEDYKEGKNQNINSKIISQSFKKLKIFPKIIYVPTEINFQKVEIASPMLVQEYSFLNIVDSILIKDVPSYIATRIMEMANEQENTPMGEIRAAVFKEINEIFEILDLDIKISGISKNAKSIPIFTNSAGDKFDINELSSGEKQLFLRTLAIKMLNPENSIILIDEPELSLHPKWQQRIVDVYRKIGKNNQIIIATHSPHILGSVKKENIMLLDKDGEGKIVVRTGDELYDSYGQPTDRVLKDIMGLETTRNPKVFKLLEEAGELVDKNEYESEEFKTKYKKLREILGNKDEDLLLMDMDIQIRKKRGLKNVESK

SEQ ID NO: 85683 - protein, 217 aa, Leptotrichia wadei
MLKVNKKDEPEFFSEFKRKKNPKHWDVLNKPENLHIKPELKSYMLKNEQKIGDKSYCPYCEMILSFEDNDLKEDKKSHIEHIKPKSKFANLTFDYRNFLTSCSENKTCGHKKQSTWDNKLFINPVEENPEEYFSYSIRTGKIIPKKETGLEYEKAIKTIEILNLNENKLCDYRKSYINQILNSIKNSRNNDEKIEIINYFDELPTLKKFLIENIKIL

SEQ ID NO: 85684 - protein, 418 aa, Porphyromonas gingivalis; identical to SEQ ID NO: 82540

SEQ ID NO: 85685 - protein, 201 aa, Porphyromonas gingivalis; identical to SEQ ID NO: 82541

SEQ ID NO: 85686 - protein, 512 aa, Moraxella osloensis
MKIKQLQLQNYGRFEDLTIDFAPTEDRASNVTVIVGNNGAGKSQILQALATGLSWFVNGLTKVKSINNHSDKFEFEWTFDCEGVHIPKKMIKNNQSFSEIELFFNDENSKFGSSIKIDTSVNNGLDIASYGREMTNFEALLDFYRENIKNTKNFNLPLLAFYSVERNVSVSELEPSLSFKNHQFSGYLNALNAGSDYSQFFQWFRDNEDLENEINKTKYLKEHDEFLRIEIKIEQLEEIQEHIDDIDYFPNDEEKYKYSAKIARQIKEEKEKYNNLLIRNSFLKDTSNQIQTLPLKFVRQAIEEFTEFKNIRIQRQDTPTMIIEKDGEELDVNQLSQGEKSLLALVGDIARRLAILNPSLDDPLQGEGVVMIDEVDLHLHPKWQHDLIDKLVRTFPNVQFILTTHSPLIVSDSPNILVYSLENGNLHKTKNIYGEDANTLLNNIFDVPVRTPEVENDFNNIRRAISNQEFEIADNLINSIAKKVASGNTELLKVKLLLAQAKLAQKSATNLG

SEQ ID NO: 85687 - protein, 210 aa, Moraxella osloensis
MQKIDKKLPMPPIMAGWIKRHKNQPWNLKNDFSEGYDAIHQQLYEEQLGLCCYCCKSLVDEETRVEHLDCRSKYPKKTYEYDNLLLSCATENQCDKAKENKALPLTPLMNECDEEIKINFAGELVGNTHRAKLAIEILNLNQRKICNNRRLKYDEIIMLYLQNKEFLNLTETSTLEEIKHELNSFLNSIYGNTEEFYEIIYILKKITQIK

SEQ ID NO: 85688 - protein, 537 aa, Alteromonas addita
MNEKNLRNLKNRAHKGDILAKFELYNLFVDEDKVKAEKLKKELIEHLNSNGIRLEDIQLYSFRKFETLRIESGFDKNLTVLIGLNGDGKTSILEAISKTLSWLTANIVKEQGQGSPVNYSDIKNNSILFSDIASEFSSNSKYRYQARLSRAVKGSGKKRDSDVINLRKIADIWRTFSNEDDVCFPIFASYLVERSYPLSVEKRAGRKERMQWHDAYSNCLEGSGKFESFIDWFISTSKIANSSSSESIDKTENIKPIIEKLAFLADNKSNLSVDEYEKLKEVLSKFESKADVSVDSNSASIELSVLKRAISSVIPSVTDIWLSNSEGKDDIMVNIDSKVVNLNQLSDGQRTLLALICDLARRLMLLNKNRKNPLHGNGIVLIDEIELHLHPTWQQSIIPLLTKTFPNIQFVIATHSPQVLTTVDKKNIRQFDETNSDDEFWLAIPEFQSESSENNIVLEQLMNTPSAPETKTLELLKDVTYLVEAGLFGASDEHMHKLKNLESHFGDSHPNILRLKDSIKLMTLKKRIAERKQSKEE

SEQ ID NO: 85689 - protein, 218 aa, Alteromonas addita
MKRLTRPDEPTALKMIRDKGSRSWKEAPRADIWKALDEMQNKFCAYCERQLSDNKKHIEHFQSRSISPNLTFIWNNLFGSCGKDSWDSCGIFKDTKGRPYDHNKLIKPDQDNPREYLLFLTNGLVVPRPKTSPSTSEKAATTIKVFNLNAAPRLVGARREALRSSVNTVQEIYEWRESGEIDEDTFDEIIQEELESLEGREFETALRDIFEYNSIYGE

SEQ ID NO: 85690 - protein, 446 aa, Agrobacterium sp. R89-1
MCTFLLRSEFGTREVKMYVRRLKIRDLRVFRTAEVDLLYPGREQNESFEDVSRWPPRLDNVNVFLGNNGSGKSTLLSAVALSLMSPIAPSSGYRPRSLIRRSARGQVKSAEVSTEVVLHQQDGGRDGNASTFAAQILRRGDIEFLQPSTDVVDEQFFEDDNSAFFFVGYGATRRTEVLSANDLASRRKARAVRYERVASLFEEHFALTPISAWLPRWRDENPGRYKQVANLLKRLMPPSISFTEELEGGEYLFGYRTLRLPYSALSDGYRLYIGWIGDLLYHLCMGAPSGFKLVESRGVVMVDEVDLHIHPAWQRTLIPTLSRTLKNIQFIFTTHSPLLVSTLERSNIYNVMLGSGPTPEVRRPEEETFGLSADQLLRSEVFGLDSSRDPEFADKLRDLSQAAERGERGAALAFLRGASAGGGEDPPEAGDAPEWLKSFGERSKAL

SEQ ID NO: 85691 - protein, 292 aa, Agrobacterium sp. R89-1
MIRYAVLSKAELEARVDAVDAGWRTRAATRRNAFIAAGKFQEDASIWSDVKTVFMDLQHDKCVFCERVLGGKLTGKSEHDVEHFRPKGRVTNWPYPKRTPKLTYAFGTGVPSNTGYYWLAYDVENYACACKGCNSDRKRDYFPILGPRGVATTDIATLNASETPLLLFPHGSLGDNPELFITFEGVIAKPIHATGLEKIRAQVTIDFFSLNDREELLADRARVIRELFKTIRLTSDQDPAVQSAAYRDIDTITSNLSPQAACARAYLALAKTTPQKAWEIYLDVDRYLKPAR

SEQ ID NO: 85692 - protein, 465 aa, Escherichia coli; identical to SEQ ID NO: 81190

SEQ ID NO: 85693 - protein, 243 aa, Escherichia coli; identical to SEQ ID NO: 83883

SEQ ID NO: 85694 - protein, 418 aa, Bacillus cereus
MIIKNLEINNWNQFEKVNIDFHPRLTVLTGANGAGKSTILRIFSTLLGWRFNEIATPLKKSPTPLKYKIGGRRKTQPKEQQDMVNIGSIECFNGDTSKLFVPDLSQSASYYINYSNPNSNYYSNSTLNLRGINIPSHRIAYSYKEIGNIAPKPASRQQAFTTFNTSLMNRIFENYGDSPSFHMKTTLVSLALFGEGNTYVQENKEALDLFLGFIETLKILLPPTLGFQSISIRDGEVVLETTSGDFLLDAVSGGIGAILDLAWQIYMFDENKNEPYVVLIDEAENHLHASMQRRLMPSLIQAFPNAQFIITTHSPLMVNSVRDSSIFVLKYNKNSSVISELLDFENKAANASEILRDVLGVPVTMPLWVENRLEDILQNFKGYEITPESYSRLKNELASVGLKDHLPQALGILQGGNY

SEQ ID NO: 85695 - protein, 215 aa, Bacillus cereus
MISLIKTTKPIILEDKESDWTNELKSFLTSGTRVPDHIKGRYRHKDIKDALLLETHSKCAYCESKILHIDYGDVEHILPKSIFPEKTFSWDNLTIGCTKCNQSKSNYYDDKYPLLNPYVDYPEDKIIFRGAIPFAKPGCKDAYATIKKLKLDRPELIEHRSNLIKKIQPLIWQYENTEDDTLRKMLLQDLIEFTNKDQEYSSMIKHLLDSLAITA

SEQ ID NO: 85696 - protein, 385 aa, Alteromonas sp. Nap_26
MQEAHIYVGINGAGKSFKLGKIAKKALRLNRPVVAVSMSLNDKFPPNFKKRPYNFMGIKQGRSVYRKAIEDALIACNREEHPVQINTLLKILSYAGYDERIGFLVRGFDWSFESRFESESFTNNLSKDAVDNIFSLCLAYRRIHNENDSENLHWVTHYSKFGSQSVLDIESRFGEVPSGEILSELLKHKALLKKLKIIKDIRLFFEKENLNRKLFAINEMSSGELSLISTAFFLSHTLKDGGMLLIDEPENSLHPEWQLAYISRIKDLFPYTDYQFHIATHSPLIISGAQKEENTLIHRFDGSRFKEIDSTSKNIEDALIDQFGIITPKNNALSERCIEIINSVIDKKISKKEAIEKVSQFKNSSYEETQKQFLQSVQELIRDEV

SEQ ID NO: 85697 - protein, 203 aa, Alteromonas sp. Nap_26
MSKLKFSAEEVDILKEAYALGHQGWKLDKLTPIKQKIKAKKRLIQGEICCYCLRDTTGEAKMVLDIEHILPKSLRPRNMFTMKNLAISCKRCNLQIKQTKTDFLTVPINQLPKRAFKSGFYRFVHPNLDYVESHIERVFSGRTKSRIVKYVFPETSSKGRYTYEYFKLKELEVDTANNAQGRRKRKKIKDERIRVAFDALTQY

SEQ ID NO: 85698 - protein, 483 aa, Salmonella enterica
MSFYIESALVDNKRIELVPQSTHDIGNKYTVLIGRNGTGKSIFLSKLANSLCSIQMENKYLKRDFDINEKNNTKMSFNIVNDGVENEIRLEGRKFVGGDSKYLLPSVLTCISTSPFDKFSSERRFYNSKNEVNTFYHYFGLKELGRKNAIHAFIEKILYSKINSLLQSDRESFEKILGFLNYQPKIKLEFRTRISFKTLFKLDDEELVSQIERPIFTHTGVYRRSKSQSDYDVSRIRNALLFINDYILSSSDRRSSAEARYFDVEINALDENMINIPEIVMHEILYLMKLNLLSIRDIYLYKKSGDEVVLYEASSGEQCLLINTFGIANCIADNALILIDEPEVSLHPEWQEVYIELLMDVFSHKKGCHFIIATHSPQIISNLKKDNCFITTLENGKTYHAKDFINKSADFQLATLMEAPGHENEYLKRLAVNILSKISANEKLSEQDINDVLWLKDISKNIEPNDTVMFLIGLIVKSKVSLK

SEQ ID NO: 85699 - protein, 212 aa, Salmonella enterica; identical to SEQ ID NO: 83757

SEQ ID NO: 85700 - protein, 483 aa, Salmonella enterica; identical to SEQ ID NO: 85698

SEQ ID NO: 85701 - protein, 212 aa, Salmonella enterica; identical to SEQ ID NO: 83757

SEQ ID NO: 85702 - protein, 393 aa, Salmonella enterica; identical to SEQ ID NO: 82588

SEQ ID NO: 85703 - protein, 248 aa, Salmonella enterica; identical to SEQ ID NO: 82637

SEQ ID NO: 85704 - protein, 483 aa, Salmonella enterica; identical to SEQ ID NO: 85698

SEQ ID NO: 85705 - protein, 212 aa, Salmonella enterica; identical to SEQ ID NO: 83757

SEQ ID NO: 85706 - protein, 465 aa, Salmonella enterica
MRIDKLSLLNFRCFRQLDITFDEHITILVAPNGAGKTTVLDAIRLALFPFIRGFDASLYVKDKSLAIRTEDVRLVFRPEALNMEMSSPAMITATGEWESGKTATWMLDKRGEQPPHEDKTAAQLTRWGEQLQTLVREEHNLQQVELPLMLYLGTARLWYQERYEAQPTEQRLDNSAFSRLSGYDDCLSATSNYKQFEQWYSWLWLSYREHQITQLESPSAKLKEGVRVQRMKEAIQAIQQAINCLTQEVTGWHDLEYSSSHNQQLVMNHPQHGKIPLSQLSDGLRNAVAMVADIAFRCVKLNPHLRDEAALKTQGIVLIDEVDMFLHPAWQQQIIQSLRSAFPLIQFIVTTHSPQVISTVKRESIRLLEQDENGNGKALMPLGATYGEPSNDVLQSVMGVDPQPPVKEKADLQKLTAWVDQGKYDEPEAQQLMAALQVALGDQHPQLQRLQRSIARQNMLKGKAQ

SEQ ID NO: 85707 - protein, 241 aa, Salmonella enterica
MRHVIKTRRGTDALLTAHEQPPQNSDQSTRRWQHFGRENKAALMTLLLNEQYHLCCYSEIRADLRGLGYHIEHVENKSQQPGRTFDYQNLAASALDSENGLHLFGINAFGGHARGKQEAVDMAKFIHCHLPDCSRYFAYLSDGRIVPADELNTQEMERAEYTIDLLNLNSGFLQTERRNHWEELEQLFEEHIEKGWDLQQLLQLELVPSPDHKLHEFFSITRQFFQQEAEQVLQNHAPALI

SEQ ID NO: 85708 - protein, 469 aa, Pseudomonas monteilii
MKNFRCYADLEISLHSQLTVLVAENGQGKSTLLDAVRIALWPYVSSFDLSSTGYNDPANSIAIGDARLQRMSDGSMSRCLPSSVQMTGDYGGGLCSWLRYRDSEAEKTKTKSDGETRRMEQWVSALQQSIRDPQVGSQTLSVFGYYGTGRLWSEKKLTKAQKAKDETQDTDFYIRTFAYRDCLDPASTYKHFRAWFIWASQSYQEQRLKRLDGRDNQEELQQAELRLQVVRKAIDTFLQPATGWHSLEYSISREKTLVLQHDQHGTLNADQLSDGIRSVLAMIGDIAYRCIKLNPHLGAEAARQTSGVVLIDEVDMHLHPRWQQIILSQLQEAFTRIQFIVTTHSPQVLSTVPAECIRVLVAERDEDSGQQRMAVHPVTQQTQGVASSDVLAEVMGTDPVPDIAAARQLSRYMAFIQQNLEGSDEAQQLRAELNQHFGADHPQMLECQRLSRLQALKRRRPLRPGGAED

SEQ ID NO: 85709 - protein, 213 aa, Pseudomonas monteilii
MHRLQRGPAPICLARHRHGRDNWSALDGADRTEIWQTLEAMQSRRCAYCEAAIAEGNRHIEHFVQKGRDPRVTFQWDNLFGSCNREDSCGKYKDHGAGAYNPGDLLKPDVDDPDHYFVFVADGTIQLRAGLNDTDRQRASETLRVFNLDAEHGALRHMRQRESAGYVPIAEELWTLFDEFPEDEWQQLLDDELAATTHLPFVSAIRHTLCRMS

SEQ ID NO: 85710 - protein, 458 aa, Escherichia coli; identical to SEQ ID NO: 85202

SEQ ID NO: 85711 - protein, 201 aa, Escherichia coli; identical to SEQ ID NO: 83303

SEQ ID NO: 85712 - protein, 451 aa, Escherichia coli
MNIRTLKLTNLGRFEELDVHLAPVEEFKSNVTVFIGNNGAGKTSILKSLATSLSWFVARVRTEKGNGSPIPEDAILNGRSSATIELQVLNTHPATEAATPYRWLLARTASGKKSTTASSLQEASQLAAFYRDQYTQNSGASFPLIAFYPVERVVLDVPLKIKERHNFLQLDGYDNALNQGIDFRRFFEWFRNREDAENESGLPQDVLDKLSTRIDLDNTVLNALTAIMASSRDRQLTAVRTAISRFMPGFSNLRVRRKPRLHMSIDKNGQTLNVLQLSQGEKSLMALVGDIARRLAMMNPMLENPLNGEGIVLIDEVDMHLHPTWQRTIIQRLTTTFPHCQFVLTTHSPLVISDCKDVLVYSLDDGELTQLPSLYGQDANTVLLNVMDTDIRNATVAEKLNDLLDLIQKNDFINANALLNTLSLELPENHLELVKARMLLRKQEIKHARNN

SEQ ID NO: 85713 - protein, 219 aa, Escherichia coli; identical to SEQ ID NO: 81193

SEQ ID NO: 85714 - protein, 550 aa, Escherichia coli; identical to SEQ ID NO: 81922

SEQ ID NO: 85715 - protein, 216 aa, Escherichia coli; identical to SEQ ID NO: 81923

SEQ ID NO: 85716 - protein, 841 aa, Moritella sp. JT01
MGKFEDANSVAQAQAKEVWKLLEYIRGASPISDYRSLAYALLFIRYMQDKCGTHFNSPRYYSFDIIRNHIDELSQSCVNLELFSVDEGRYISQYIEDILLKNNNIDEDYIRLAIRSDLLNKNSSVARATLSELDILFSENESKSGSEFYTPQDVSSLVTALGLSYEPKSICDPFAGGGNTAFSFHEALNGCVRIDTQEINRNVHFQIVVNRIIRGIKGSDFVGDSLTKPEFSNNQYDLITSFPPFGLKIRKLARQHIIDSSNSPWLGLTYNLPESRSDWFVCLSMFSALKKQGKLIIGMSLGAFTRTGAEAFIRERLVNEGVIDKVILLPKSIHFSTSISTVLLVLDANTSHREKGIRFVDASLFYEPRRGRNVLSPDNIKKILESCHRDGRFSITATSDDIAKNDFNLDPSLYVEKTIKVSLVQLTNFRGYTDFTIPLHESLTVIVGENGAGKTSILEAIACGLGPFLTAMPDAKGKLIRKSDIHVGANGVADSARISIDTASSLSWDLATKGSDRNTLAKIGTLALSDYAKQIVDSDEQYPLIAYYGTNRALSTQSGKVSINPFEEVLRGEGYDSALDAKINYGILKNWFSKIEVDELKLRDEKKNHKLTHPAKKLITKAVKQIVDRVNDVTFDKGSNDVVVVWKNEQNKFISLSLEQLSEGYRNMVALTIDLVRRAYLLNPDMPKPLSVFGVVLIDEIELHLHPRWQQKVLSELTGLFPNIQFVVTTHSPQVLTTVKGECIRVVSSSSRVAEAVTSPYGGENSRVMQQILHVNPRPETEVSEKLKEYFFLIELGKGEEEAAIRLREELSLLTGGTEPMLVEADLAIKRVNWMKSRKSQ

SEQ ID NO: 85717 - protein, 252 aa, Moritella sp. JT01
MSIQHIEEPILLRDFRLATPNATWNQLKANSDVNNALKVTAIKKTGGLCVYCEHKLIAKIDYQIEHFYPKKGNDNSEFGNGIANRAIEWANLYPGCLGGTAKLAHFSVQQDIDCRTGANKRNKNKLTCGQKKGEADPEGVFISPLELNNQNPIFLFNEADGSISLNEDNCVTQNISVELGVNHITRLNLDSERLRGGRLALATSLRSEFNKAFEFDAETVDELMDDWLEIDEEGMYGHPFISLIYSKYSLEV

SEQ ID NO: 85718 - protein, 427 aa, Acinetobacter haemolyticus
MAFIHKHNSSGKTFTFYTDEITSKEKNIFTVLVGKNGSGKSRLLNSLVMRGIEERKYVLAFSNSMYHKFPQLNNDKTFGYLCYANNKNVLKNYAYCNALHGLMDQELVHLAIEKQLFHTMPLMQFKEWNIQNLIPLLILKLKQEPQRAYLLERVLDFLGFENNIHITFNRNKKSSDIFINAFNEKLLSFQNKIKHHEILKEIAINLYNNKLTDYYFPIARDLKTFSAVGYGIALDLWKIKKINFIKKGEKISYRDLSSGETSFLTLGLFLLIFLENDSIICIDEPEINLHPEWQSQVINFLNNVFQKFNQCHFFIATHAPQIISGANGGNIYIHDLEKNINQNINNIRNRSSDFQLSEVFNFPGNNNEYLIRKLIIVLNNLNTEENFHLDLESQELLKNIEILINNKKIHEDDKVFVLFSLINSYRG

SEQ ID NO: 85719 - protein, 219 aa, Acinetobacter haemolyticus
MQVCQIPSELQTFIDNYNKKNYQLWNDETNKDVQAFRSLIRAHYLSDQKLTCFYCKQYIFSTNGLHWQVEHILPKSLFPQFLFEPRNLIVICPDCNREKGDQNPHVSGDRACSQVTYPSKSGRYKIIHPLYDTYEDHIERVPANHCDYPDHYFLRVHTPKGKATVKMCDLNRFYQEFAGYKDMKGKQVAALDEFIEEKDINLLTREQKMELVQKIMASM

SEQ ID NO: 85720 - protein, 550 aa, Escherichia coli; identical to SEQ ID NO: 81922

SEQ ID NO: 85721 - protein, 216 aa, Escherichia coli; identical to SEQ ID NO: 81923

SEQ ID NO: 85722 - protein, 551 aa, Escherichia coli; identical to SEQ ID NO: 81868

SEQ ID NO: 85723 - protein, 222 aa, Escherichia coli; identical to SEQ ID NO: 81869

SEQ ID NO: 85724 - protein, 551 aa, Escherichia coli; identical to SEQ ID NO: 81868

SEQ ID NO: 85725 - protein, 222 aa, Escherichia coli; identical to SEQ ID NO: 81869

SEQ ID NO: 85726 - protein, 375 aa, Acinetobacter venetianus
MSKNLNYDIENIKPTLESYNLSEKFHYDSRINKRIIIETEELLYSLEKMSRLLNNFDKFTTLGSDLKVIIENIEDLSRNLKSSKVTFNYFTAFRQTQITHSTNTTSLDDYINHAKNGYENTLGQLFEQYLVNIKIDRSLALTESTNHELVYKIDNWFEKLNKDLKFLFEDDSTYLDFDIKTKKFSINQNSKKFSFQTLSSGYSSIFAIYTELMLRSQFLNILPDELSGIVLIDEIDAHLHISLQRKILPFFIKSFPNIQFIVTTHSPFVITSSNDDTVIFDLTNGDFIDDNLSKYSVESITKELFHVDTESIDLKESIDYIYNSMHSNITNFKKLNNELKKIQPYKSKLNIESKNIYMQALNFLIDNNELGDLDV

SEQ ID NO: 85727 - protein, 223 aa, Acinetobacter venetianus
MFEIVRSLPAPADLLRNKYNTAPILSALSKICYSKCYLCENDKVQEVEVEHFLPHAHHPALKFEWENLFYSCKRCNRIKGDNYEYILNPCDTTHNIFRNILIIAPSRANDSVIVKNLCVSTDPNYASSVKTVELLDRCFNDISTPARRISRRELINQLLEELSLILEIRGRLKSKRLTSFQEGEEIEKLKNMTSPHYPFSAFWRWYVLDDEILVTKMGTFINF

SEQ ID NO: 85728 - protein, 426 aa, Marinobacter sp. T13-3
MHISKLTLQRFRGAQDLPLDLDDKLNVFVGMNGAGKSSILDASAIMLSWLANRIKHAGASGRPIAESDIRNGESSANLAIQLCDEGTSFGWNLAKVRKGYSKKDLASVLISASETAKGIQAGITEHNGKVNIPLFAYYPVNRAVLDIPLRIREKHQFGLLSAYEESLTSGANFRTFFEWFREREDLENENRKYIDDLIKPDDFEFPDSQLTAVRRALEIFMPDFQNLTVRRQPLRMEVTKKGQRLTVNQLSDGEKCLMAMVGDLARRMAIANPEREDPLLGDGIVMIDEIDLHLHPKWQRLVVPSLRAVFPNCQFFISTHSPHVITHVKPENLFLMNMTDAGELEIVRPNESYGKTVDRVLEDLMGLETTRPDQVEDALRAIYGQINDGELDTARKGIAELERDIGEDPELVKAKVLIKRKELIGR

SEQ ID NO: 85729 - protein, 133 aa, Marinobacter sp. T13-3
MREQGYICCYCERRLTEGDSHIEHFQPQSDPTVDPLDYGNLLCSCQNQIRKGEPRHCGNLKGDWFDPELLISPLDANCEPRFGFEGDGWIKPADNNDRAACETITRLGLDLPKLNELRAGAIEPFLDDSLSHD

SEQ ID NO: 85730 - protein, 426 aa, Microcystis aeruginosa NIES-88
MRIKSIKLINYRGAVSLNIDFHRQLNVFIGVNGAGKSTILDSLAIMLSWLVNRLKNTNASGRKISETEINNGQGTAIIEITGVTEDSQEITWKIVKTRTGYIHAGEGSNFSQLNEYTQQIQRQITEHQGQINLPLFVYYSVNRAVLYIPLKIKTKHQFDSLSAYENALTSGSDFRTFFEWFREREDLENENRKYQDYLIKPEGFCFPDPQLEAVRETVERFLTDFTNLSVRRNPLRMEVTKKNEIVTVNQLSDGEKCLIAMLGDLARRMAIANPQNPDPLTGTGVIIIDEIDLHLHPQWQRFVVPKLLEVFPNCQFFISTHSPNIITHVQPESLHFMEQTEMGIKVHPVQESYGKNVDRILEDLMGLETTRPKEIAEALKDIYEQISQNQLEAAKNKINDLRAKIQDDPELIKAEVIIRRKEIIGK

SEQ ID NO: 85731 - protein, 167 aa, Microcystis aeruginosa NIES-88
MTEQGEICCYCESRLVDGECHIEHFKPQSDPTVDPLDYANLLCSCQANLRTGELRRCGNLKNSWFDENLLISPLNPDCESHFAFNYDGTIKPAQEDDQKAINTIEKLGLNLNQIKALRKAAIDPFLDEEIDNAQLKVFVNGYLCLDDQQRYNPFWTTIKYLFSDLIE

SEQ ID NO: 85732 - protein, 458 aa, Salmonella enterica
MLNFRCFRQLDITFDEHITILVAPNGAGKTAVLDAIRLALFPFIRGFDASLYVKDKSLAIRTEDVRLVFRPEALNMEMSSPAMITATGEWESGKTATWMLDKRGEQPPHEDKTAAQLTRWGEQLQTLVREEHNLQQVELPLMLYLGTARLWYQERYEAQPTEQRLDNSVFSRLSGYDDCLSATSNYKQFEQWYSWLWLSYREHQITQLESPSAKLKEGVRVQRMKEAIQAIQQTINCLTQEVTGWHDLEYSSSHNQQLVMNHPQHGKIPLSQLSDGLRNAVAMVADIAFRCVKLNPHLRDEAALKTQGIVLIDEVDMFLHPAWQQQIIQSLRSAFPLIQFIVTTHSPQVISTVKRESIRLLEQDENGNGKALMPLGATYGEPSNDVLQSVMGVDPQPPIKEKADLQKLTAWVDQGKYDEPEAQQLMAALQVALGDQHPQLQRLQRSIARQNMLKGKAQ

SEQ ID NO: 85733 - protein, 198 aa, Salmonella enterica; identical to SEQ ID NO: 83491

SEQ ID NO: 85734 - protein, 388 aa, Sutterella sp. KLE1602
LIWYAMTRQWPSEVNPQLTNSSIARPSSHSHTAVLKAEILGSQKNAKVQATFSADDDRWVFNRGNPVSPGLVFYLMADGSFAVWDSERNRKSNDIEAPPPAFVLTNKQVFNGLAGDGDAKLCNGLIADWAAWSDSISYADLAKQMNSVLLALSPSGEAYEAGKPVRVGISDSRRIPTIKMPYGIEVPITQASSSIKRIAELAYMLVWSVAEHTEIVNLKGKKIDTRVTILVDEVESHLHPRWQRSIVPALLEAIDVLYKQRGASVSTQIVITTHSPLVMSSVECKFNPKYDQWFDLDLIDGNNVSLTNREYIPMGSFENWLTSKAFDLTTSYSMDAEMVLRKANELLKKDCVKRSEISQVSSELAKVLPEMDPYWIIWNAELKRRGIN

SEQ ID NO: 85735 - protein, 213 aa, Sutterella sp. KLE1602
MIPVKPAPEPSTFNKKVRKPGRDFLKNLGITKQGDVADNIPWDKARFWAKCSKELDSAYNYICCYVGMRINNSSNRFESHSVEHFIPKSINPWLAYEWDNYRLACRKANSDRDKKPVIDPFLVGPDDFRLDLFTQKLFPNPILSKQKQQEVKDTIDNIDLNCDYWVKNRQNYYCEYLKMESEEEGRKYLQKNAPILLAELLRPSQKTTVVEDV

SEQ ID NO: 85736 - protein, 394 aa, Clostridium perfringens
MKIKNIHLSGVGGIEHLELDFNSGLNLICGTNGIGKTTILEAISNAFTIRSSNNLKRNTNFEKGIIDLTFEDKDNIEQKKTYEIKEFEAYKTDDIYKLSSDSFLILYFKTNRELDYKKVDGIKGDQPVSEVNAGNSINTGIQAEDAKSWLLNRQLFSKQENSLTSEQIDNLNLALSTFSILDKNIRFSRILPDSLDILVNTHQGEIYLEYLSSGYKSCLYILLGIIKEIEYRFKNPRINVKNFEGVVLIDEIDLHLHPEWQGELVRALKKMIPKAQIIATTHSPNILQSVSANEIIPLTLNKNGDIYKKDLQLGKYGLQGWTIEEILTDVMGLKTTSSKIYNETLRNFDNAMDNEDVEQIEENYKILCEMLHPNSPIKKILEIQVAGLRDDKTR

SEQ ID NO: 85737 - protein, 254 aa, Clostridium perfringens
MIKLDRPPKPIQLTEEVQKQLTEKFKDDNSKSVWKQQYIVDELLNMSSQKCCYCETKLLEESKYLHIEHYHHKSKYPDEVVEWNNLLPSCERCNINKGTHDTVRKPIINPTIEDPKKYLFIKNYRYKSKKRNKLGLETISTLYLNDTKKLVKVRFDICNALSDKLLDIEVLLDSHKDQDTIHTRTKNRIVNGIKDILRSAQPTEEYSAFVSSTILNDDTYSNIKKILQDLDLWDNELEELENTAKKIMLDCDDC

SEQ ID NO: 85738 - protein, 451 aa, Pseudomonas azotoformans
MQNYRCFGEFEIDFDPHLTVLIASNGGGKTTILDAARVALWPFVKGFDLGSQTGKSATIQIDDVRLAHLASGNMEPQIASVIEAKGVWEPNEAENIWLQQRTSLKKSTNTLGDLGSKALTGYSKSLQEKVRRDESIVLPLVSYLGTSRLWYEGRFTSAAAQTTLDRSEYSRTSGYLNCLSYSSSFKTFTAWYGWVYRSYREAQVISLERSTELSDLGVRFAQIIKAVKEAIDRLIQAPTGWHSLEYSESHQQQLIMHHPEQGILPVEMLSDGLRNAIAMVADLAFRACKLNPHLGDQAPLQTPGIALIDEVDMFLHPHWQQKILGSLRSAFPAMQFIVTTHSPQVLSTVRRENIRVIGKDVQGKLIASPPLAMTYGEPSNNVLHSVMQVDPQPPVIEKADLLLLTEWVDKGRYDEQPAIELMKALTTALSEQHPQLQRLQRSIKRQRALNK

SEQ ID NO: 85739 - protein, 190 aa, Pseudomonas azotoformans
MCCYSEVRPDQAGLGLHIEHVENKSQNPHRTFDYNNLAACALDSKTDLRAFRGLASEVFGGHAPGKSEAVDIHRFVSCHQPDCSRFFAYLSDGRIVSADGLSVEDQERASYTIALLNLNSPFLRDLRQRWWDELETLFDEHIEQDMSLHCLAGIDLVPRENQLSPFFSITRNFFGQIAEEVIEQDAPYLA

SEQ ID NO: 85740 - protein, 413 aa, Steroidobacter denitrificans
MAYFSRIALVDWRQFASIEIDLSKQVTILTGPNGSGKTTILNILSKHFGWNLSFVSTPYLGLKQARKLWSDVKRAREEELLDAAAASEAQSVGYITYDDGRKCILATTKTTKPQYRLAYANEQSVVGLHIPSHRPPATYQAVGEIPTNPTSIQQHYQDFQQLLFQTYGGARQSNKQQNPSYAQKRSLIALALFGYGNKAVASNVEYQQIFESFQEVLRLILPKEIGFERLEVRMPEVVLVTRSGEFAIDSMSGGINAMFGIAWQIHMYGAGKSECTVTIDEPENHLHPSMQRSFLPSLAAAFPRFKFIVATHSPFVVSSHRSSSVYGLTFSENHQVISSQLTEDEFAGTPNRILREILDVPSNLPIWVEDEIRKIFENASGDNPHALGERVLAELRRLGVVDAASDLNLEDGQ

SEQ ID NO: 85741 - protein, 219 aa, Steroidobacter denitrificans
MIRVVKGQRPEVLQQNEGSWLDEFLSDPQNGTKRYRYRTPEIKQALIAETHSKCIYCESKIGHNTPGDVEHKIPTSLVRERHFDWENLTIACTECNRRKNDYLDAERPFLDPYADNVEARLVHYGPVVAWVDGDAPAEITVRKLALNESTRLQLILRKIEKLEQLSILRGRIVNELSEPLRLILETRLEEMQSDGAEYAGMIRSAMRTQGSVRSIEQER

SEQ ID NO: 85742 - protein, 456 aa, Burkholderia megalochromosomata
MGRFQFVHQHYGRFPGSNTFTVIVGRNGTGKSRLLRSLILNLMGGVLSGEQWDRSERGGRYEPLGNLQKSEAPSHIISVSTSPFDRFPLPRRGNVVAGYTYLGLRGLPSSNLSLAYLSKIVSTLFLSAQSNPAQAEAVAGVLEYLAYEPTISVSFQLIPEVLLKELANAEHPHEALEERMRNSGPFFPNDAVNGYRQMFESPTEDVKRALDLVQSRRLSRRQRTIHLRLNKHGIAIGDTEGGSADFLSGDFVLAEALFLLRVGMLRLKDVVLFKRGERESFNITDASSGEQAVVLSLLGIGSQIRDGALICIDEPEICLHPEWQEKYIHLLYKTFSHFEGCHFVIATHSPQIVAQLPAGNCHVMSMETGTAEPANSYSHKSIDYQLAEVFRAPGYRNEYLSRTALTLFSSVSKKRGFDLEARITMGKLESMIHLLNNDDPVLDLILALKEMRSAYE

SEQ ID NO: 85743 - protein, 217 aa, Burkholderia megalochromosomata
MSEIVEPVSFPPDLETLIERKKADATFTHKDWSCDELEPLRSLVRRHYRRVQKGRCAYCRKDVSLTSALNCHVEHIAPKSKYPQFMFEPKNLCVVCADCNEIKREQEVANAEPDTLASRTGRISYPRSSNGFRIVQPHFDEYSKHILVYRGFFIDRTDKGNFTIGACKLNRRLREFGWDEKIVEDGELLEASQEFIEASDAIARLAALNRIRDACLS

SEQ ID NO: 85744 - protein, 581 aa, Lysinibacillus sphaericus
MELFRQFIELREEQERLTNLINDIQENGFEINFIKKKIYLYKNGIAYIGLDCQNIEREKLISVFLIKESKSRRIQEIDSYFIDYFNANLKDIVINLEIENLFLESKAYLLEELFMLEQLISEDLTVDFRINSIKFEEYKCFKDEEITFEERITVLVGKNASGKTSILDAISVAIGAYLSGIDESTDTKSILKSDVRFTSKDVHGTKVVKHHAPTRINFNSDFINKRFDWSRTRSKLKSTKLTTKDSKQVVNLSRFLYREINNNDLRNITLPVFSYHGTGRVANFTKNMNQLEKTENISRFFGYKDCLKPASNYKTFISWYSKMQYRAFMLNKRIEVLDQVTKCLKETFVFLTEEDKNKVSDVIYLEGSLHLKYSNGDMIPIEFLSDGYKDIIGIISDIAYRMAILNPHLEKDVIKATPGIVLIDEIDLHLHPRWQQKIIKLLKNLFPKVQFVVTTHSALVVSSTEYREAKELKVVEENLNENFTIVAEIIGDSKEWYIHDILRNVFHVDPLLHTRLTSEYIDQDEVDDLINDLNEYVKKYLVSREEHILKKINTLNGKLNTCLTPNTPKKRVVDALMEMVR

SEQ ID NO: 85745 - protein, 243 aa, Lysinibacillus sphaericus; identical to SEQ ID NO: 80951

SEQ ID NO: 85746 - protein, 422 aa, Marichromatium gracile
MKVLSLTLLNFRGIESLHVDFTQRTTAFVGINGAGKSAVLDALAIGLSQLTWRLDGQPLKARPIALDDIREGADFARITLTAQLRGEGLQWSIVTNRLKGSYPDPLRKSDLTALNAAVSALHEEWKHVEREWQEPHDLPLAVYYDVNRAVLDIPIRVREQFQDKPSDVYRDALDHGGADFKRFFIWFRHREDIENEQRRDHPAFRDPDLETVRTAVDLFTGFRDLRIRRKPLRMTLVKQGLELNVTQLSDGERNMLALVGDLARRLCLLNPNRERPNEGQGVVLIDEIDLHLHPGWQRTVVASLERAFPNCQFIVTTHSPQVVGELAPESVMLLRGGALLGHAPRALGLSSGEVLEELMEGRARNPEVAAQLDTIHRHIDDDRLAEAQAALDQLRARIGDIPEVLAVQASIDSLGWLMDEEA

SEQ ID NO: 85747 - protein, 240 aa, Marichromatium gracile
MRSIVKGAEPRALIQWKADNAQTPENLVYGGGGFPAEAVRTALLAEQCHLCAYTMKRLKTVAECQEQGRDTTDACHIEHLLPQARKAPGEDIDYRNMVACYPPSRSKIACGYGAQAKGDFDPTTGPFVSPLSSNAERHFELDARGGITGRTPEGMATIQVLRLDHAALVNDRAAVIRGALRPKGKPLSAAAARRLAGEVMRPNQEGCLPAHCVAVASAALALADRAERRAARMRRQGDTR

SEQ ID NO: 85748 - protein, 750 aa, Bacillus cereus
MEQIESIEDLKPGSIIDNKNLARIFKCSSQGGMRRSLKTNSLVLLSFKNKSPYEEIKKEGELLLYTGMGRKGDQSLDFMQNKTLLHSNEMGVKVYLFEVEEARYTFIDRVILGSSPKQGVQLDLDKKLRKVWLFPLLKVGCSEEIHHFLQKQPRKVLEEKKIISYPKYELSLHSVDPLSQLMIEKGIDTLIGPGGWYFTATQYYYNPNTKSKHKIGNINFLSETQNIKKGIVFENQNKFINPFFLTAPDPLDNALQEKESSPEEGNFLIRKIKYKYPNSEWISVEFVQGERRSDGPFITLMIGPNGTGKSTILSNIQKILLDVYNYKKAFIKTHMSREIDYTLEYQLGKIIYTIINENRNRKFLKNGKEVPFNSLRFPRKLIASAFSINDRFTFMQQSEEPLEEYSYLGIKSSDNVARVGETSKNLVLNIVSSSQKGNFTKMLRYIMEYVKLCPVIKIEYRTKNNERLKDIITESNIVTLQNKFLKKIKKKKFRNTSLIDHQDIMEFINGFSDKDPSIFSMKNDNISITFHLNAEEQYYKYYENFHMLWHLFEIGILQEPVVYIKKKDFFKLEDASSGESQYLTTMINILSKIEEDSLVLLDEPEISLHPNWQNKYVHGIKEIFKHNHSSCHFILATHSHFMVSDLEKGKSSLVSLEIENEFKTWIRLRDEETFGWSVEDVLFNIFGMATDRNYYLADELDKILLAISLGEITEDIKARVNYLNQMSENLKEADPLKEVITLISSKVIKG

SEQ ID NO: 85749 - protein, 436 aa, Bacillus cereus
MYRLTDAEKRSIKEYEYEWDEPKLKYLKYKIKSSLIQNPLNDNICYYCKSPLDCGTTPGDIEHIVHKSKYEIFTYEPINLTLACDRCNTAKGSEDILITDLPDSYTEEDYPLHSDAFKIIHAHIDLYEEYIQIQDYIFFVGIDQNNKGENTIKCCNLNRLDLALSKIKQVKSENAVSSPVKKMINGAVDSEKTLKEIEKIFEKPSHEEMFEAIINLNKDINTIKIVNQLSKIDDLETNLDPEKITDLKKFITCFREIEAYYNMIDELHKRTNLLSQLMDLPLKDDVILPTMGKLLLNRRGLQQLKEEISTREFSRFQKRSKTVLLTLLEELLDSYDLSNVEALLPRLNIIMLVMQCVTDIYKDKTIIELLPGLNPTLVRTVSQDAERILPYECYNSQISIMFHMKSIYEEIFSNWDKVVFNKSKVLARKINHFINK

SEQ ID NO: 85750 - protein, 538 aa, Vibrio alginolyticus
MEEKFSKTIRRLISRSNKGDFSASFQLAQSYDEGFSVERDKEKAQHYLSVCASQLKENKFRIKSIKLNNYKGFEFLDLKLSKESSTTVLVGNNGCGKSTVLEAIKKCLTHLNSRLATKSNNGDLIEEIEIKNGEDFSSIGAEFEIEQQVINMELMQKTALSSKRVRGSYTQINDICQILRQANESDPQLSLPLFCSYTVERANDVTTKDIEESDEIKDEHVWNKAKAYSKSLSGKADFKLFFRWFKELIESDNELSSNADELRVKIQAKEKEINSPLLKELINKHPELEHLLDSHKKELADYKEQLNSIYTIDEKSLDIVKDAIYKFLPGFSDLKLQRKPLDLTLNKNGTQLSVLQLSQGEKTILALVADIARRLTLLNPKSLSPLEGSGIVLIDEIDLHLHPSWQQKIIQRLESTFPHIQFVVTTHSPQVCHTVDSSSIWLLKDGKKYRAPKGTRGAVSSWVLKNLFEVDVRPPDDEITQNLKRYRELVYDDKYDTVDALELKKQLSRHFGSAYEDLVQLDLYIDNRKWEKEYEEDQ

SEQ ID NO: 85751 - protein, 263 aa, Vibrio alginolyticus
MRKINKSQAPNELTIYAISNPDDTWDSFRRNKSKDAKKIKNRIFSEQNYICAYCEIELCEDNVFEHHRRVEHFNSKSGWVVGDAQPNWHLDWNNVIGVCIGGTDRNNTEQFVMPDNKSCDSYKEHLETNHGESKKWLGKIVSPLEDNLSSDMFNYSLADGKLEVNLDTANLKTFEHNNFGTSSELLESTIEKLNLNCDRLNLARREVQFSLERLIASFRKTNDINKFKFMLRKWAGVDGPLYFQTTRDILVRENRIARKALED

SEQ ID NO: 85752 - protein, 390 aa, Acinetobacter venetianus; identical to SEQ ID NO: 81480

SEQ ID NO: 85753 - protein, 243 aa, Acinetobacter venetianus; identical to SEQ ID NO: 81481

SEQ ID NO: 85754 - protein, 316 aa, Acinetobacter venetianus; identical to SEQ ID NO: 81478

SEQ ID NO: 85755 - protein, 139 aa, Acinetobacter venetianus; identical to SEQ ID NO: 81479

SEQ ID NO: 85756 - protein, 458 aa, Salmonella enterica subsp. enterica
MLNFRCFRQLDITFDEHITILVAPNGAGKTAVLDAIRLALFPFIRGFDASLYVKDKSLAIRTEDVRLVFRPEALNMEMSSPAMITATGEWESGKTATWMLDKRGEQPPHEDKTAAQLTRWGEQLQTLVREEHNLQQVELPLMLYLGTARLWYQERYEAQPTEQRLDNSAFSRLSGYDDCLSATSNYKQFEQWYSWLWLSYREHQITQLESPSAKLKEGVRVQRMKEAIQAIQQAINCLTQEVTGWHDLEYSSSHNQQLVMNHPQHGKIPLSQLSDGLRNAVAMVADIAFRCVKLNPHLRDEAALKTQGIVLIDEVDMFLHPAWQQQIIQSLRSAFPLIQFIVTTHSPQVISTVKRESIRLLEQDENGNGKALMPLGATYGEPSNDVLQSVMGVDPQPPVKEKADLQKLTAWVDQGKYDEPEAQQLMAALQVALGDQHPQLQRLQRSIARQNMLKGKAQ

SEQ ID NO: 85757 - protein, 198 aa, Salmonella enterica subsp. enterica; identical to SEQ ID NO: 82641

SEQ ID NO: 85758 - protein, 458 aa, Salmonella enterica subsp. enterica; identical to SEQ ID NO: 85756

SEQ ID NO: 85759 - protein, 198 aa, Salmonella enterica subsp. enterica; identical to SEQ ID NO: 82641

SEQ ID NO: 85760 - protein, 458 aa, Salmonella enterica subsp. enterica; identical to SEQ ID NO: 85756

SEQ ID NO: 85761 - protein, 198 aa, Salmonella enterica subsp. enterica; identical to SEQ ID NO: 82641

SEQ ID NO: 85762 - protein, 458 aa, Salmonella enterica subsp. enterica; identical to SEQ ID NO: 85756

SEQ ID NO: 85763 - protein, 198 aa, Salmonella enterica subsp. enterica; identical to SEQ ID NO: 82641

SEQ ID NO: 85764 - protein, 458 aa, Salmonella enterica subsp. enterica; identical to SEQ ID NO: 85756

SEQ ID NO: 85765 - protein, 198 aa, Salmonella enterica subsp. enterica; identical to SEQ ID NO: 82641

SEQ ID NO: 85766 - protein, 458 aa, Salmonella enterica subsp. enterica; identical to SEQ ID NO: 85756

SEQ ID NO: 85767 - protein, 198 aa, Salmonella enterica subsp. enterica; identical to SEQ ID NO: 82641

SEQ ID NO: 85768 - protein, 458 aa, Salmonella enterica subsp. enterica; identical to SEQ ID NO: 85756

SEQ ID NO: 85769 - protein, 198 aa, Salmonella enterica subsp. enterica; identical to SEQ ID NO: 82641

SEQ ID NO: 85770 - protein, 458 aa, Salmonella enterica subsp. enterica; identical to SEQ ID NO: 85756

SEQ ID NO: 85771 - protein, 198 aa, Salmonella enterica subsp. enterica; identical to SEQ ID NO: 82641

SEQ ID NO: 85772 - protein, 458 aa, Salmonella enterica subsp. enterica; identical to SEQ ID NO: 85756

SEQ ID NO: 85773 - protein, 198 aa, Salmonella enterica subsp. enterica; identical to SEQ ID NO: 82641

SEQ ID NO: 85774 - protein, 458 aa, Salmonella enterica subsp. enterica; identical to SEQ ID NO: 85756

SEQ ID NO: 85775 - protein, 198 aa, Salmonella enterica subsp. enterica; identical to SEQ ID NO: 82641

SEQ ID NO: 85776 - protein, 543 aa, Salmonella enterica subsp. enterica
MNKMNLETCYVDFLELESHVINEDYLKESVELQKLISTLNESKFHLNKIGIHDFKRIRELQISLEDDLTVFVGDNGFGKSTILDAIAIVLSWLRSNIEKESKPGTYIKSHEVNNSVDVEYASIDANIKLKDFNTSILITKAKEGAYYSRNNELLEVKKLASIYRLVNKYVDNASLPLMAYYSIARSYIGGGVDRKRKNAKTKTVWSKFDVYDEIEFDRNDFTDFFQWLVFLHNRASQEKLSESQTTINALFSDIQSLKATLTQLSAIDNIDSTVIKGLELSLKEKLNYMKSLQSGEHKFNNAVSLYDSVINTILKFLPEFQWIKLVYGDDDYKIILKKGEVELDIQQLSQGEKTIFTLVGDLARRLILLNPNLSNPLLGYGIVLIDEIDLHLHPQWQQTIIERLTSTFPNVQFVITTHSPQVLSTVSSRSVRILQEVEVDGVNDLIVSHPDYQIKGVSNQDALLYGMRTDPIPSTKENGWLEEYKKLVELNRYSSDEALLLREKVVKHFGLDHPLVQECDDLISVLEFKNKINQHFSGSKDIK

SEQ ID NO: 85777 - protein, 227 aa, Salmonella enterica subsp. enterica; identical to SEQ ID NO: 82595

SEQ ID NO: 85778 - protein, 458 aa, Salmonella enterica subsp. enterica; identical to SEQ ID NO: 85756

SEQ ID NO: 85779 - protein, 198 aa, Salmonella enterica subsp. enterica; identical to SEQ ID NO: 82641

SEQ ID NO: 85780 - protein, 458 aa, Salmonella enterica subsp. enterica; identical to SEQ ID NO: 85756

SEQ ID NO: 85781 - protein, 198 aa, Salmonella enterica subsp. enterica; identical to SEQ ID NO: 82641

SEQ ID NO: 85782 - protein, 458 aa, Salmonella enterica subsp. enterica; identical to SEQ ID NO: 85756

SEQ ID NO: 85783 - protein, 198 aa, Salmonella enterica subsp. enterica; identical to SEQ ID NO: 82641

SEQ ID NO: 85784 - protein, 441 aa, Sorangium cellulosum
MRCFARGEVPLGAQVTVVIGQNGSGKTSIIEAIASLAPGDGEGLDRFPLRRGASGGWIALHGTGAEPLARWVDGEGRAERARLPRGHHVFAYGQYRALRPPARPRQAAGPTLLGPEWEPALARPLPAHLEDALRRPATRTLVDFDEYLFRDLSAYVALLEERGEDDPAARAVWERLRAWLLGLDRRIEGVDIVEQEGRRVVAFRRSGVTLSITELSDGYRAMLSVVLDLAIRYAQLFSALDDPLAGEAMVAIDEVDLNLHPRWQRRIIDQLTRLFPRTRFVLTTHSPAVVQAAIDDKEREIQVLVLDEKPGEGTTVRPLTKGDLERLDGAEVDSVMVDDAVFDVPSRLSPTYEALEVKAAELRRKVEGGTATARDRQVLLETLDQLQGVLAREEEREGKGPLLSEIARTQIALLRRLDAQLAAKGGGRRDPAPAKRRKAAR

SEQ ID NO: 85785 - protein, 246 aa, Sorangium cellulosum
MDAALPDAAAFWRKARAFEKLAEQGAKRRKGFASYAPEVLPSDEKGKPDFPPVWRTDARVRQAIAGMSHGLCAYCQSPVSSSHPGAGGEERPPGQVEHFRPKARFPAQAYEWKNYFLACMACNGAKHDKWPAGGYVRPDEGRPGSRFVFAENGEIEAREGDEQARCTVEDFGLKRYWLTQHRGTAIQCHLDFVRRLMGRAGIRLQDMLITRPVAFSEAINQNVRRVWALGQRKRRRPSRGRPRRGR

SEQ ID NO: 85786 - protein, 410 aa, Sorangium cellulosum
MMFELAPRLNLFAGDNGLGKTFVLDVAWFALTGTWPGYPAAPRRGPAVKPEIVRDTRDGEVVHRVASSFDFEEQQWRTVYPSEASSRSGLVFYARVDGSFSVWDPLRPAGHLQFPLGVKSMGPVPGFHFTPSQIWNGLTADDYDGSVLCNGLIRDWATWQLQRGSAFDLLTRVLEVLSPKPGETLRPGSSTTRVSLHDVRDIPTLDMPYGNVPVVLASAGMKRILSFAYLLVWMWREHVEAAKLRNIPPERGVVVLVDEVEAHLHPQWQRVILPALLRVSRELEPSIETQLFITTHAPLVLASAEPHFDEARDALFLFDLDAAEVTVSRPAWKPRGDASAWLTSDVFDLAQARSVEAERAILDAMAAMRRPDLPIEDAKRIHEELHDVLKDTDPFWVRWLVRARQAGLTP

SEQ ID NO: 85787 - protein, 192 aa, Sorangium cellulosum
MIHVPLQPEPARFDALVRQPGRRALAANVEHLPPYWRECLDDLRDGYRGICAYLCVLVPRGTGARSVDHVAPKSKRRELAYEWSNYRFVCSLMNARKRDFDDVLDPMEIPDGWFVLELSFLQVLPAEGLHDEARACVQATIERLKLNDKECIAAREMYYTAYLDKGLTLELLQEWSPFVAREVVRQGLARRE

SEQ ID NO: 85788 - protein, 454 aa, Sorangium cellulosum
MLHLDRLTLRNFRCFAACEVELHRKLTVLVADNGRGKTAILDAIGIALGLFVDTVSGIRKYRGFEREDVRHVPAADGAMRAALPTEIVASGSVDGKRTRWGRALRGDDARARTTTKDAEELRRAAQGLRDRIDAFAAEPGKARPLLPLVAFYGTGRLWSEHRLTEGKRGPDPATLGRLSGYIDCLSSSSSFKTFVAWYEDMANAARSPASVAYGPQERPEKLLAAVRKATRTVLAPTGWHSLDWDFEQRKLVVEHTEHGRLPLSMLSDGVRNMVALVADLAHRCVRLNPHFGEEAARSTPGILLIDEVDMHLHPRWQQLVVDLLRNVFPEMQMVMTTHSPHVLSTVDVDSIRVLRLRDGEAVLDTPTFQTRGVESADVLAAIMGVDPVPQVEEARWLSRYRALIEDGMAETPDAEALRGKLVRHFAPNHPVILDCDRLRRFQAFKLRRARPEGA

SEQ ID NO: 85789 - protein, 215 aa, Sorangium cellulosum
MRKLDRGSVASPPCLAGYRHGRHTWDNVDAADKAAVRAALDEMQGRRCAYCEGDLDALGQHIEHFRRKHVFPHLTFAWVNLYWSCDQRDSCGRHKDHDAGPYNPDDLLDPCVDDPDRFFRFRSDGTIDVRPDLSASDARRARETLRVFNLDPGHGRLRSMRRRALEAYCARETGILEALEGFTPEDRRTIISEELASTSGEPFSTIVRHFFEDVI

SEQ ID NO: 85790 - protein, 553 aa, Sorangium cellulosum
MHLNTQLVEDARGNQRTRAKLSLHGPIPWPEDPASWWEEDNPGKLVEHDLQSPTMEGRVPAYLDVLAPDDLDEEGFSAALQELRKELSTSPQAWVRCGSVAAHFWLASRIEPQQSSILDALLEAANIRYRRRRLRVSLRISRLVLTDFRGIDQLTLVLSPRQTTVLVGTNGSGKTTLLDAAVLLLSQLQSGIDQKIPPRKFTDADIMNGRLSSSIETTADVDGYRVTWSLVHEHGGEASTHEGERLLALGEQIARIRAEIARGDICLPVTVYYTVNRTVLDIPLRIRARHPFDPLEAYEGALTGGRSNFRLFFEWFRNREDLENERRIHDSRHRDHQLEAVRRAIQSIVPEFSGLRVQRAPLGLVVTKGEWTLYVDQLSQGEKCLLAMVGDLARRLAMANPFADDPLQGGGVVLIDELELHLHPGWQRRIVPALERTFPNCQLLVTTHSPAVLGHVEHDAVVILKPEGTGVRVARPDTSKGMDVNRILEDLLDVPARPEEFQAKLDELHRRIDEGDTVGARALHEELSATLSSTDPALVKAEVLLRRREAARR

SEQ ID NO: 85791 - protein, 197 aa, Sorangium cellulosum
MAFKAAANADWTPRYRDLDKKPVRAALAREQGYLCGYCESRVGERDGDCHIEHVDPQSVNPARALDYTNMLASCQGSDAQPPVPRHCGGARGNEQLAVTPFMEDCGAFFLYGSDGRIEAASEPAKHEAAKQTIRVLCLDIGRLKAARRAAIEGALEGLEDLSADAWRTEAAFYDQPGADDRLAPFCSAIQHVLLSFA

SEQ ID NO: 85792 - protein, 471 aa, Sorangium cellulosum; identical to SEQ ID NO: 82236

SEQ ID NO: 85793 - protein, 268 aa, Sorangium cellulosum; identical to SEQ ID NO: 82237

SEQ ID NO: 85794 - protein, 446 aa, Sorangium cellulosum; identical to SEQ ID NO: 82240

SEQ ID NO: 85795 - protein, 212 aa, Sorangium cellulosum
MIPFERAPEPAGFDASVRQPGQRWLAKGDARSTPGYWRRAARDLRAAFKDLCGYTAMWLSTPGTVDHFVSRDEDPSLAYAWTNFRYAAAWINSSKSALRSDQVLDPFEGGDGWFEIILPSCQMVLTDRCPPEVRDRAQTMLKRLKLGDGESVVSFRQEWYRMYCEGELSLEGLARKAPLLARAVRKQREQAAAEPAASDGAPRSRPAEASGA

SEQ ID NO: 85796 - protein, 413 aa, Sorangium cellulosum
MRLLDLSIQNIGPFDEARLEFLSAHDDPVPVAIITGENGTGKTILLDAIRGLFGEYYGRLERAIWRNGTPFQAEANLFIDGQRERLLSKQKQYSQGAFDFLPHHSKISRLPIDVEGGQQCPNWVVDFWRSSLPADAYTISQLARPAPKSFLSNALKGIQRNAAVTELVCAFDYLRGSDDPRDRRDGEVLYETIRRIVELSVLDGELSHVDRRAFMPMVRQSGQLVPLSNLSSGNAYLIQHMIGLLGKMYAVHVLRETDASELCKTPGLLLIDEAENHLHPRWQKRFLGDVLSIFPNLQIIATTHSPFIVGSVPGARVFVCRYDRERKTCVVDDATDLYANKPVEEILLSPAFDGTQPFGEEISRLLEERKAAFEAGDSVRRKEIEKQLKDKNPEYFSYIDIEERLQSLRGEGE

SEQ ID NO: 85797 - protein, 218 aa, Sorangium cellulosum
MIPIKRLPAPDVLARNEDRWRTAFLKQRAKDPQKRPSSKQYAHPDIVSTLETMSHHKCFYCEQSTKQTRREVDHYIDIAEDPTRAFTWANLYLACWECNHQKQPYRAIPVTDCLDPCAPDAQPSAHLMFEKELIRAREGSAQGLATIKKYRLDRKDLDHKRLKQLQLFNEALVRIKDAQIADGRKNMNESEKALLRSFCQPDFPFSLMFQVYLERHSL

SEQ ID NO: 85798 - protein, 263 aa, Sorangium cellulosum
MNNALKGIQRNAAVTELVCAFDYLRGSDDPRDRRDGEVLYETIRCIVELSVLDGELSHVDRRAFMPMVRQSGQLVPLSNLSSGNAYLIQHMIGLLGKMYAVHVLRETDASDLCKTPGLLLIDEAENHLHPRWQKRFLRDVLGIFPNLQIVATTHSPFIVGSVPGARVFVCRYERERKTCVVDDATDLYANKPVEEILLSPAFDGTQPFGEEISRLLEERKAAFEAGDSVRRKEIENQLKDKNPEYFSYIDIEERLQSLRGEGK

SEQ ID NO: 85799 - protein, 170 aa, Sorangium cellulosum
MSHHKCFYCEQSTKQTRREVDHYIDVAEDPTRAFTWANLYLACWECNHQKQPHRAIPVTDCLDPCAPGTQPSAHLMFEKELIRAREGSTQGLATIKKYRLDRKDLDHKRLKQLQLFNEALVRIKDAQIADGRKDMNENEKALLRSFCQPDFPFSLMFRVYLERHGLYSSH

SEQ ID NO: 85800 - protein, 446 aa, Sorangium cellulosum
MLRSLHLEGVGPADRLDLELGERLNVLTGDNGLGKSFVLEVAWWALTGTWTDRPVLPRPGKEEGARIAGEAEPGTTRHQFEGKYDRLAQQWSDRFERHMGRSWTDTPSGAVISSWVRGLVPVLHVRTNGACSVWDPCRNIPSLGSALYRLSSSPSPDPQPYLFEERQLWDGLGHEGRPVCNGLVQDWVTWQLEAADGDEAHPFQLLCRVLEQLSHPEETMKPGKPVRLYLDDVRKFPTIELPYGTIPIVHASAGMKRILALSYLIAWSWSEHVQASRLIGWKPSDRIVLLMEEPETHLHPKWQRHIVPALLGALSGLSPSMRPQVLLTTHSPLVLASMEPHFKPARDKLFVFELDGADVTVRELPWAKRGDAIGWLTSPVFGLEQARTIEAERAVEAAEAFMRGETGALPEGLRSEDAIHRELVRLLPDQDRFWPRWIVRRERVGA

SEQ ID NO: 85801 - protein, 212 aa, Sorangium cellulosum
MIPFERAPEPAGFDVCVRQPGQRWLAKGDARSTPGYWRRAARDLRAAFKDLCGYTAMWLSTPGTVDHFVSRDEDPNLAYEWTNFRHAAAWINSSKSALRSDQVLDPFEVGDGWFEIILPSCQMVLTDRCPPEVRDRAQTMLKRLKLGDGESVVSFRQEWYRMYCEGELSLEGLARKAPLLARAVRKQREQAAAEPAASDGAPRSRPAEASGA

SEQ ID NO: 85802 - protein, 287 aa, Sorangium cellulosum
MSNALKGIQRNAAVTELVCAFDYLRGSDDPRDRRDGEVLYETIRRIVELSVLDGELSHVDRRAFMPMVRQSGQLVPLSNLSSGNAYLIQHMIGLLGKMYAVHVLRETDASELCKTPGLLLIDEAENHLHPRWQKRFLGDVLSIFPNLQIIATTHSPFIVGSVPGARVFVCRYDRERKTCVVDDATDLYANKPVEEILLSPAFDGTQPFGEEISRLLEERKAAFEAGDSVRRKEIEKQLKDKNPEYFSYIDIEERLQSLRGEGECSRSSDCRRLMCSLEMKIAGAPHS

SEQ ID NO: 85803 - protein, 166 aa, Sorangium cellulosum
MSHHKCFYCEQSTKQTRREVDHYIDIAEDPTRAFTWANLYLACWECNHQKQPYRAIPVTDCLDPCAPDAQPSAHLMFEKELIRAREGSAQGLATIKKYRLDRKDLDHKRLKQLQLFNEALVRIKDAHIADGRKNMNESEKALLRSFCQPDFPFSLMFQVYLERHSL

SEQ ID NO: 85804 - protein, 435 aa, Sorangium cellulosum
MLLEAANVRYRRRRLRTSLHISRLVLTDFRGIDQLTLGFSSRQTTVLVGTNGSGKTTLLDAEVLLLSRLQAGILEEKRPPRGFTDADIMNGRLSSSIEITADLGGDSVTWSLLHERGGEMPERNEERLLALDEQVVRIRAEIARGDVCLPVAVYYPVNRAVLDIPLRIRTRHPFDPLEAYDGALAGGRSNFRLFFEWFRNREDLENERRIQYSQHRDHQLEAVRRAIHSIVPEFSNLRVQRSPIGMVVTKGEWTLYVDQLSQGEKCLLAMVGDLARRLAMANPFADDPLQGGGVVLVDELELHLHPGWQRRIVPALERTFPNCQFLVTTHSPAVLGHVEHDAVIILKLEGTGVRVDRPDTSKGMDVNRILEDLLDVPARPEEFQVKLDELHRRIDEGDTVAACALHTELSATLSRTDPALVKAEVLLHRREAARR

SEQ ID NO: 85805 - protein, 207 aa, Sorangium cellulosum
MRRGPEPSELREFKAAANTDWTPGYRDLDRKPVHAALAREQGYLCGYCESRIGERDGDCHIEHVEAQSVNPARSLDYTNMLASCQGSDAQPPVPTHCGGARGKAHLPVTPFMEDCGTYFLYGSDGRIEAVSEPMNREAAKQTIDVLRLDIGRLKAARRAAIEGALEGLEGLSADDWRTEAARYDQPGADGRLVSFCSAIQQLLLSYA

SEQ ID NO: 85806 - protein, 401 aa, Sorangium cellulosum
MAYITRIHVEKCRNVRQLDIDLSVSLPAGDADGPASARRQKFRHLILTGPNGSGKSGVLEAIRDEVSTGLVPPHHQQLTLPLVADGRNALVWSCENDELDRMFQRGDIIAVYLSATRRLRRHDVPGPKKLRWDPADLRPEQQVASKLLQFLVNKRTEMAYAAEDGDQHTASRINLWFENLEHRLRQLMEDKGLTLEFDRRSYNFHFRKSDGYVFDFNTLADGHASVLALLAELLIRVDAAQQSRDDFTFEPEGVVIVDEIETHLHLSLQEQILPFLTDFFPRFQFLVATHSPAVVASVPNAVVYDLKKREQTLSDDFRGVRYGTLMTEHFGISSEIDLDSTQKLLRLRELARRSPRTLEEERVLAELAALLSARSPTLAVEVWMAKEQLGTPGAAAAEQVR

SEQ ID NO: 85807 - protein, 230 aa, Sorangium cellulosum
MIDVERPAEAPPSLGAGKTYTGADVMEALHLAFHGKCYLCETPIALGTFEVDHRRPRADQRFTHLICAWDNLFPTCTTYACNQRRRKRYPDGGLLDPGQGVERRIFQRVEGAVSISLRKAGTVDIVFRAADPADAAAVNTAEELDRIHNGTHSSAIPKADALQRAILEHVSSVSIEVYRFVTLSARPTSEPAAIDDQRRRVQALVSRRAPYAMLVRSVFASLDAVRALFD

SEQ ID NO: 85808 - protein, 291 aa, Sorangium cellulosum
MGASALTEPRGDDPIATLFDEHVPLRNAEEWLLQADYAANKPSPHQERARARRDAVRSMLIELLPEVEDIQILADLDDNPARPRPGILLETPYGWVPLQGLSLGYKTLLAWMVDFASRLYERYPDSENPLAEPAVVLVDEIDLHLHPAWQRKLLSYLSERFPNVQFIVTAHSPLVVQAAENANIVVLRREGDHVVIDNSGAAVRNWRVDQILTSDLFGLPSARPPALDALLAERRDILTKPRLSAADRRALERIEREIGELPSGETPEQMEAMDIIQQAARSLKKAGGASG

SEQ ID NO: 85809 - protein, 264 aa, Sorangium cellulosum
MIRVKKAEQAPRKLRDMAPAARAAVCASYRCARASIQRGAATLDFVAAVYAHPTVKKALETAHHGKCCYCESKVKHVAPGDVEHYRPKAAVRQARTAPIERPGYYWLAYGWENLLFSCVLCNEKHKRNLFPLRDPRKRARSARAKLAAEAPLLVHPAQEDPEQIIGFRDEYAYSIEGDPRGEATIDEVLQLNERPPLLERRREHLAILRAMQVIAGQPDVDPADRARARAWLDRSVADDAEYAAMTRAALRSPSARREASRPAR

SEQ ID NO: 85810 - protein, 441 aa, Sorangium cellulosum
MRCFARGEVPLGAQVTVIIGQNGSGKTSIIEALASLAPGDGEGLDRFPLRRGASGGSMALHGIGAEPLARWADGEGSAERARLPRGHHVFAYGQYRALRPPARRRQATGPALLGPEWEQALARPLPSHLEDALRRPATRTLVDFDEYLFRDLSAYVALLEERGEYDPAARAVWERLRAWLVGLDKRIEGVEIVEQEGRRVAAFRRSGVVLSITELSDGYRAMLSVVLDLAIRYAQLFSALDDPLAGEAMVAIDEVDLNLHPRWQRRIIDQLTGLFPRTRFVLTTHSPAVVQAAIDDREREIQVLVLDEKPGEGTTVRPLTKGDLERLDGAEVDSVMVDDAVFDVPSRLSTTYEALELKAAELTRRVEDGTATARDRQTLLKLLDELQGVLAREEEREAKGPLLSGIARTQIALLKRLDAQLSEKKGRRDDPAPARRRRSAR

SEQ ID NO: 85811 - protein, 262 aa, Sorangium cellulosum
MIRLRRDGVEAPADWRETVDAAFPDAAAFWKTARAFEKLTEQGATRKKGFARYAPDVLPSNRKGKRDFPPVWRTEGCVRAVIAEMSRGFCAYCQSPVSSTHPGKRGKDRPPGQVDHFRPKARFPAQAYDWNNYFLACMACNIAKGDAWPSGGYVRPDEGEPGSRFVFARSGTIRARKGDEQAKRTIEDLDLKRDWLTQHRGKAIERYLKFVVPLIGRPGFPIEMLLIDGPDEFSEAINQNVRRAWARGRQKKRPYARTRRAR

SEQ ID NO: 85812 - protein, 250 aa, Sorangium cellulosum
MTELICTFDYLRGSEDPRDRRDGEVLYEAIRRIVELSVLDGELSHVDRRAFMPMVRQSGQLVPLSNLSSGNAYLIQHMIGLLGKMYAVHLLRETDASELCKTPGLLLIDEAENHLHPRWQKRFLRDVLSLFPNLQIIATTHSPFLVGSVPGARVFVCRYDRERRTCVVDDATDLYANKPVEEILLSPAFDGTQPFGEEISRLLEERKAAFEAGDNLRRREIERQLKDKNPEYFSYIDVEERLQALRGEGA

SEQ ID NO: 85813 - protein, 166 aa, Sorangium cellulosum
MSHHKCFYCEQSTKQTRREVDHYIDVAEDPARAFTWTNLYLSCWECNHQKQPHRAIPTTDCLDPCAPDAQPSAHLVFDDELIRAREGSAQGLATIKKYRLSRPDLDHKRLKQLQLFNKALGHIKDAMIAEGRKHMNEKEKALLRSFRAPDFPFSLMFNVVLERLHL

SEQ ID NO: 85814 - protein, 443 aa, Sorangium cellulosum
MRIDEIRLINFRAFERFALHLEPRLTVLVGRNGTGKTTVLEGLAVALGAWLSFFNASRDDRPIPKSAARFVTTMHGGVPSMATCYPVRVEASGETPLGHVEWARELRGADSRTTTGVTKSGREGPLEATRFMPRGIEDAISGAKAVALPVLAYYGTGRLWHHKRDRNPERASLKSRLQGYRAALEAASDQKGFEAWMAWREEDRVQRLARAAEEGRPLTEVRSPELEGVSAAACTCLEGARRIYYSANHQELRVDFVDGSSLPFVALSDGQRNLIAVAADIAWRATQLNPSLGAEAPARATGVVLIDEVDLHLHPAWQWRVLDDLLRAFPGIQFVVTTHSPQVMSAAPRGSVRLLDPDHQAHRVERIAGKDTNTILEDILGAPSRLKETREKLDELARLIDDGQLAEAKALLAELSGLLGEDDAQVVAARWELSMAETGDAPD

SEQ ID NO: 85815 - protein, 232 aa, Sorangium cellulosum
MRRIEKDREPACLADLRGTPGAAWSSVHGTQRQQMREHASKEQHGLCAYCMSRLPGPPSAEGMKIEHFKTRALSPELVFDWGNLLGVCLGDVGIHDGGGAHRDRYHCDTYRGHLPREEQRIELNPAASPPDVSSMFSYTNQGEMRPARGLEPAMRASAEAQIERLNLNIARLQRNRRAVIEALRSEFQKKAPRAARVKALLELSSTPDSTGLLPPYCQAAAYYLEKKLRQLG

SEQ ID NO: 85816 - protein, 441 aa, Sorangium cellulosum
MRCFARGEVPLGAQVTVVIGQNGSGKTSIIEALASLAPGDGEGLDRFPLRRGASSGSMALHGIGAEPLARWADGEGRPERTRLPRGHHVFAYGQYRALRPPARPRQATGPALLGPEWEQALARALPAHLEDALRRPGTRTLVDFDEYLFRDLSAYVALLEERGEYDPAARAVWERLRAWLVGLDRRIEAVELVEQEGRRVAAFRRSGVVLSITELSDGYRAMLSVVLDLAIRYAQLFSALDDPLAGEAMVAIDEVDLNLHPRWQRRIIDQLTRLFPRTRFVLTTHSPAVVQAAIDDREREIQVLVLDEKPGEGTTVRPLTKGDLERLDGAEVDSVMVDDAVFDVPSRLSPTYEALEVKAAELRRKVEGGTATARDRQALLAMLDQLQGVLAREEEREGKGPLLSEIARTQIALLRRLDAQLSAKGGERRDPAPAKRRKAAR

SEQ ID NO: 85817 - protein, 246 aa, Sorangium cellulosum
MDAALPDAAAFWRKARAFEKLAEQGAKRKKGFASYAPEVLPADEKGKPDLPPVWRTDARVRQAIAGMSNGFCAYCQSPVSSNHPGTSGEDRPPGQVEHFRPKARFPAQAYEWKNYFLACMACNGAKHDRWPAGGYVRPDEGRPGRRFVFAEDGGIEAREGDEQARCTVEDFGLKRYWLTQHRGTAIQCHLDFVRRLMGHPGIQLQDVLMTRPVAFSEAINQNVRRVWASGRRKRKKASRARPRRAR

SEQ ID NO: 85818 - protein, 263 aa, Sorangium cellulosum; identical to SEQ ID NO: 85798

SEQ ID NO: 85819 - protein, 170 aa, Sorangium cellulosum; identical to SEQ ID NO: 85799

SEQ ID NO: 85820 - protein, 405 aa, Serratia plymuthica; identical to SEQ ID NO: 82302

SEQ ID NO: 85821 - protein, 207 aa, Serratia plymuthica; identical to SEQ ID NO: 82303

SEQ ID NO: 85822 - protein, 475 aa, Aeromonas veronii
MEIRQLKLENLGRFQSLDINFAPTDTVTSNVTVLIGNNGAGKTSILRSLATSLSWFVARLRSDKGSGSPLPEEVILNGTPTTTSEIILQDQGTEFSWLLTKTRKGRKGNRQSQLNEASRLADNYRVRLAENDSASLPLIAFYPVERIVLDIPLKIKERHTFQQLDGYDNSLNQGVDFRRFFEWFREREDIENEREGDVFLDFYSKNTQLIDDMMEIAESASSRLDQIKDFDIEALTKEFSQITKMMNVMKHVETQTKDPQLNAVRSAIESFMPGFSNIRIRRKPRLHMSIDKEGQTLNVLQLSQGEKSLMALVGDIARRLAMMNPNLENPLHGDGVVLIDEIDMHLHPQWARTIISRLTRAFPNCQFILTTHSPLVISDCKDVLVYSLDNGNVIQVPSQYGQDANSVLLNVMDTYVRNEAISKQLNDFMDLVHDKKLDDANILFDKLAAELPADNLELTKARLLLRKEALRREKN

SEQ ID NO: 85823 - protein, 209 aa, Aeromonas veronii
MKKINKGPEPVSLTAFKKTNPLARYQDLSDVERQDIRQSCSREQFYLCAYCCQAISGANQDTMNEHVVARRLAPERSLDFSNIVASCTTPKQCDSSHDSQHLPLTPFMSECENEFRFKLSGRVEGVTDRAREAIRVLNLGDTEENNKGLIEKRKQLVNTLIWKDYGNPDSLSIEDDRELLNELINELNQPQDGKLEPFAPVLVNILTQL

SEQ ID NO: 85824 - protein, 442 aa, Chryseobacterium sp. GSE06
MIISYTKRSKTYQFCKPSADYKNVFTIIVGKNGSGKSRLLNDIISNFIPSHLAKKISTAKDGFLMRSSEPTKVLAVSTSPYDKFPLTRSLFGLKFPEGNYSYIGIREIRSSDFSLGFISKIIKELLHVRLSNPEQFHKIIDVLGYLGYNGELQVKFETVISSAQIRRFLESRKTEDDFRHIFFKNNTARINTGFFETGEKLDFVKLEYLQKIFMSYEFSKYMRSPTVTINADSIELQMDLEDLLFILEAGLLRLKDVYIRKIENNRIYPINEASSGEQCIFNTFIGIACKIADNSLIVIDEPEISLHPAWQERYITLLMDTFQHYKGCHFIIATHSPQLVSKLSNENCYVLKMDDGELMDGELIANNSADFQLANVFNTPGFKNEYLGRIAFSIISKVGKTNKFDSEDLENFTIIQSQIKNMQHNDPIRKLFDLIKDLKRNA

SEQ ID NO: 85825 - protein, 218 aa, Chryseobacterium sp. GSE06
MPDINQPVVYTPAIKKRILGFLSKSDLKSSDWSDDDIKDIRKFIRDYYRNITRKCFYCRKEISLRSVDNCHVEHIIPKSEQIQFMFEPRNLCVVCSDCNIIKSKKEVSGQIETVTKNGKLYTMYPRSSNAFIVVHPHFDNYDDHIHHCGDIYISKSKKGSYTIHICELNRKVHEYGMDSNPLTQSELFDIFHDIMNSDDVVQQSKYMNKLREHFIKAG

SEQ ID NO: 85826 - protein, 587 aa, Chryseobacterium sp. GSE06
MLDLVEVHEELYLYLLEQRKRNSELKFTFRKSNHANRLEEGYWFYGNENYLAISFWEGMDWKNRTPNICFTIDSKGKCTLEINVSDSTIKKEFIERYFLERTLNLEKIGKKYIIKYDNVFSEYSNRIYDLNDYKSVFDFFLHTDKENIDDIIRSNSDFFEMMGSSENEISFLSSEEFLKRHNKIRQYRKRKQEIDNEDEFVIKEDKPWKLFSINIKDYGLINDLSIEIKNKKNQWIFLTGENGSGKTNLLRAMATTLGNRMLSKNEFEENPNFKVIANFIYKNKLQEYNRIGNGEVKGKRKPYIQGLAMYGPYRLDMVVDKMNKAKFKKELNKEESFKSLFKVGTPLLSIDKQFEFWRSGSKREKNLFQKREYYIKSLIIDVVHNLVDIRFTIENNKKITKYIFTNDQNQEYSLVWEKLSTGTKSTIAMLGDILIRLFNQQSDILDPAELRGIVIIDEIDLHLHPKAQKELVINLSRTFPNIQFIVSSHSPIPFIGAPEESVFITVERDQNNNIKATMLDIDISNLLPNTILSSPIFGFDSIINVQHNPNESLITENDYQEAAFYKILNRKITERTIQLGIDNDSDN

SEQ ID NO: 85827 - protein, 302 aa, Chryseobacterium sp. GSE06
MIQITRKDYNDIPEPLTRPGTFRQIERAVAEMNGDKYNTTYYKDEVVVNKLKAFSVHKDNLDAGDKPKCYYCESYVDHVATLQVEHFRPKAKVDEIDNNSLSHPGYYWLGLEWSNLLLSCPSCNGKNAKGNRFPLVDFNNRARAINPIGNSPLSFDRTHCIANQSPLLDEEPLLINPEYEDPTPYLTFNDVGQIQGIGEKGEKTVDILKLYRDPLLAARQVKLNEIIKNIELACAAREMGKINDDGLKVWLEAECTKVLELDNVRNEYCLWGRHIIANFESCVVSKIAIYKDELRNAFQEVR

SEQ ID NO: 85828 - protein, 437 aa, Acidovorax citrulli; identical to SEQ ID NO: 80934

SEQ ID NO: 85829 - protein, 209 aa, Acidovorax citrulli; identical to SEQ ID NO: 80935

SEQ ID NO: 85830 - protein, 422 aa, Pseudomonas sp. MS586
MRLDRLHIQNFRCYEDATFDFQPGFNLVVGVNGSGKSSLLQAVAVSFIELGNAMKPSQTSLKNEDIRFVIDRFENRSRFERKFPLLVHGIGSFFGAIDWVLKRDAEDLPHLVDSVFDAEIDKLKQKINLAIPVDLPVLAFYRSNRRWQGVGVSAEFAAKQRVSRFDAYVNWFDAVADLREFESWLIGRTLERMQNLLDSNTQSLEFDDELYWVNTAIERAIPHAQNLRYDLRLQSLLIDLDGKTIPFNELSDGQRGMIALFADIARRMCILNPHMGKDVLKNTSGVVIIDELDIHLHPAWQRSIVPALRQAFPKVQFIAASHSPQIIGSLKPEEVILLHNGDPTHPRVTYGLDSSSVLEEVMGVTQREPEIEDLLSELFSTLEDNDLEKAKSQLEALKKKAPDLPEFAGAEALIRRKEILGK

SEQ ID NO: 85831 - protein, 214 aa, Pseudomonas sp. MS586
MKRVLKGTEPASFTDWKNSANDEWSPTYPTLQNPQKRDLHNALLKEQGFFCCYCGREIDASTSHIEHFRPQEHFEELALEFHNLHASCLRETKPGNPLHCGHKKGNWFDENQHISPTDENCEQRFRYLRTGEIQPKDSDDLPATKMIEVLALDIAYLKNRRQDTIRRLFDDEFVMQISEEELERLVTAIRNTAIPNQKPFDHIIARYAEQLLGR

SEQ ID NO: 85832 - protein, 409 aa, Vibrio parahaemolyticus; identical to SEQ ID NO: 81298

SEQ ID NO: 85833 - protein, 221 aa, Vibrio parahaemolyticus; identical to SEQ ID NO: 81113

SEQ ID NO: 85834 - protein, 470 aa, Vibrio parahaemolyticus; identical to SEQ ID NO: 81302

SEQ ID NO: 85835 - protein, 214 aa, Vibrio parahaemolyticus; identical to SEQ ID NO: 81297

SEQ ID NO: 85836 - protein, 216 aa, Hymenobacter sp. PAMC 26554
MPGRGSPRQGVRFKTPYGWVRLRDMSLGYQTLVVWLTDFADKLFVRYPDSKNPLEEPAIVLIDEIDLHLHPSWQRKLLKSLSEIFINTQFIATAHSPLVVQAAGDAGANVVLLRREGDQTVVVPDLPDVHRWRIEQILSSELFDDTSPLSPQTEADLKRRNELLLKKRLTAKDKAELAQLDAALTTQPIGTNAPERRAEDLLAQLARNLGKADVLQ

SEQ ID NO: 85837 - protein, 273 aa, Hymenobacter sp. PAMC 26554
MIQITKSQPAPLPLPSSGTRHRQKLEARQAADPAACQVPDNKVLATRDGIYNDARVKERLRADQHDKCCYCESYFSSTSYGDVEHFRPKAGYRQAAADDLHKPGYYWLAYEWSNLYFACQLCNQRYKGNLFPLADPTRRAVAHTDALAAEQPLLPDPATENPATHLTFVQDAAQALDACGAACIQVFGLDRPELIKRRLDKLKSLKQAHFLSGLDMSLPLNPVIEAYFQKLRLTYAESVDMVAYAKQIWEAAALDAAEFAGMVRANFPALPRR

SEQ ID NO: 85838 - protein, 413 aa, Fusobacterium necrophorum subsp. funduliforme; identical to SEQ ID NO: 81144

SEQ ID NO: 85839 - protein, 160 aa, Fusobacterium necrophorum subsp. funduliforme; identical to SEQ ID NO: 81145

SEQ ID NO: 85840 - protein, 413 aa, Fusobacterium necrophorum subsp. funduliforme; identical to SEQ ID NO: 81144

SEQ ID NO: 85841 - protein, 160 aa, Fusobacterium necrophorum subsp. funduliforme; identical to SEQ ID NO: 81145

SEQ ID NO: 85842 - protein, 413 aa, Fusobacterium necrophorum subsp. funduliforme; identical to SEQ ID NO: 81144

SEQ ID NO: 85843 - protein, 160 aa, Fusobacterium necrophorum subsp. funduliforme; identical to SEQ ID NO: 81145

SEQ ID NO: 85844 - protein, 413 aa, Fusobacterium necrophorum subsp. funduliforme
MKIKKIEIKKLKGIKNLSLSFENEGKPLDIIVLAGSNGTGKTTILEAIKNIFVGDYSDYGNENFPVRMEIFFESLEEVAISKSKMSSKETNIKQWKILNAFRNYSSLKEELEQEFFDYQLAKNLKILPKIIYLPTRTNFQNVNTKTTALKASNHFVNIVDNEIFKDIPSYIATRVYYVANTQENLTLKEAKEKVAEEINSVFKILDLDIKFIGLSKDEESNPIFSNSAGEEFDINELSSGEKQLFLRTLSIQMLNPKNSIILIDEPEVSLHPEWQQKIIEVYRKIGSNNQIIVATHSPHILGSVRKENIFVLVKDTEGNITVKTGEELYASYGQPTDKILEGIMNLSSARVPEVASKLENLRQLVDNNKYNTEEFKEKSEELHEILGEKDIDLMLIDMDVELKQKENLNAQSE

SEQ ID NO: 85845 - protein, 158 aa, Fusobacterium necrophorum subsp. funduliforme
MKENLKKSLLKEQEGNCCPYCEVKIHLERSHIEHIKPKDKFPKFLHEYDNMIACCVSNKNCGATKANQWDNLFINSVLDNPEEYFKYDIKTGRILPIDEVGYKFDRAETTIRFLNLNEKNLCDKRKVYILKFRDTQKEYRKFFQEFPSLKRYLQNVLT

SEQ ID NO: 85846 - protein, 413 aa, Fusobacterium necrophorum subsp. funduliforme; identical to SEQ ID NO: 81144

SEQ ID NO: 85847 - protein, 160 aa, Fusobacterium necrophorum subsp. funduliforme; identical to SEQ ID NO: 81145

SEQ ID NO: 85848 - protein, 413 aa, Fusobacterium necrophorum subsp. funduliforme; identical to SEQ ID NO: 81144

SEQ ID NO: 85849 - protein, 160 aa, Fusobacterium necrophorum subsp. funduliforme; identical to SEQ ID NO: 81145

SEQ ID NO: 85850 - protein, 413 aa, Fusobacterium necrophorum subsp. funduliforme; identical to SEQ ID NO: 81144

SEQ ID NO: 85851 - protein, 160 aa, Fusobacterium necrophorum subsp. funduliforme; identical to SEQ ID NO: 81145

SEQ ID NO: 85852 - protein, 413 aa, Fusobacterium necrophorum subsp. funduliforme; identical to SEQ ID NO: 81144

SEQ ID NO: 85853 - protein, 160 aa, Fusobacterium necrophorum subsp. funduliforme; identical to SEQ ID NO: 81145

SEQ ID NO: 85854 - protein, 413 aa, Fusobacterium necrophorum subsp. funduliforme; identical to SEQ ID NO: 81144

SEQ ID NO: 85855 - protein, 160 aa, Fusobacterium necrophorum subsp. funduliforme; identical to SEQ ID NO: 81145

SEQ ID NO: 85856 - protein, 413 aa, Fusobacterium necrophorum subsp. funduliforme; identical to SEQ ID NO: 81144

SEQ ID NO: 85857 - protein, 160 aa, Fusobacterium necrophorum subsp. funduliforme; identical to SEQ ID NO: 81145

SEQ ID NO: 85858 - protein, 413 aa, Fusobacterium necrophorum subsp. funduliforme; identical to SEQ ID NO: 81144

SEQ ID NO: 85859 - protein, 160 aa, Fusobacterium necrophorum subsp. funduliforme; identical to SEQ ID NO: 81145

SEQ ID NO: 85860 - protein, 413 aa, Fusobacterium necrophorum subsp. funduliforme; identical to SEQ ID NO: 81144

SEQ ID NO: 85861 - protein, 160 aa, Fusobacterium necrophorum subsp. funduliforme; identical to SEQ ID NO: 81145

SEQ ID NO: 85862 - protein, 413 aa, Fusobacterium necrophorum subsp. funduliforme; identical to SEQ ID NO: 81144

SEQ ID NO: 85863 - protein, 160 aa, Fusobacterium necrophorum subsp. funduliforme; identical to SEQ ID NO: 81145

SEQ ID NO: 85864 - protein, 614 aa, Vibrio sp. 1048-83; identical to SEQ ID NO: 83370

SEQ ID NO: 85865 - protein, 275 aa, Vibrio sp. 1048-83
MRKVIITGTPPADWVAEADAITAQLLAAADDIARQAIVDKNEKHWRDQRIRGWLMSQFANKCWYTEAEESVSPIHVDHFRPKGRVKNLDGSYEEGYWWLTFNWKNYVIAGHLINTKKSDFFPLMEGERRAAVNSSEVQLKLEGAVLIDPLTDQTRLISYERDDDGCIAVLAGDIDDLEKFKAEKTIEILGLNRIDRLNQKRGKKWDDCLKDIQDYRGARAHGAHALVWLVKETAIARLKERIKYDAEFSSVAEACIRKQAPEAVIAAVFERRSNM

SEQ ID NO: 85866 - protein, 581 aa, Lysinibacillus sphaericus; identical to SEQ ID NO: 85744

SEQ ID NO: 85867 - protein, 243 aa, Lysinibacillus sphaericus; identical to SEQ ID NO: 80951

SEQ ID NO: 85868 - protein, 396 aa, Bacillus thuringiensis; identical to SEQ ID NO: 83634

SEQ ID NO: 85869 - protein, 257 aa, Bacillus thuringiensis; identical to SEQ ID NO: 83635

SEQ ID NO: 85870 - protein, 434 aa, Tistrella mobilis
MPAGIIGVPCLAPAGRRGSVAEDLILYADTLSIYDFKCFGKAVLRLHHPRRRNDLRLKNVNLVLGDNGAGKSSVLRALAIAVLAPALLGSGFVPYRLVRRSGQEEVDGRQALLKVDGIVDAAETEYRPSRRKFELLAKIDARPGDRDRLHLDSTPATPIAALLDDDTSPAFFVVGYGATRRVETGDYVPSSARRARGLRYQRIAGLFEDHLALRPMQDWLPRLRYRAPDRYDAAVRRINDVLPEDIRFTGEIDSNDQYLFTFRGVETPFPALSDGYKAFIGWIADLLGHMTDVLPDGGELDDLAGIVLVDEIDLHLHPSWQRRIVPDLARVFPKLQFVFTSHSPIVAATVESANVFVTDTDDHGLATIRQLDEKTLGRTPDQLLLSGYFGLETTRPETFRKEAQDLFTRAAGGDGRAALEYLERLVGGSERGGA

SEQ ID NO: 85871 - protein, 184 aa, Tistrella mobilis
MNGPGGGGGSGYYWLAYDVENYLGACKICNTIMKGTLFPVAGTRCVAPGTPAQLAGERAYLCHPLNPSDADPQDLITFDGVLAIPAHASGFDRARADLIISLFRLNDREELVNERARQIVLFGGYFEKHHRGDRSPRIAEILNFADNPGIPHASCVRAHARMWADDPGRAREIWALCEKMTFSL

SEQ ID NO: 85872 - protein, 583 aa, Pseudomonas aeruginosa
MQLLRIRIPTFRNLRDLDIAFATHLQAMEGAPQDVLPKSIRSHALIGQNGTGKSNLLEALITIFRDVDLNREAEFDYTLEYGIRGHVVRIEADKAKQKRPYVWVDGKGESQGYLLKNRALLPTHVFAYYSGRNERIEALFQEHQRRFNERQEITTDEVLPEQVLENFTGSEADIRAVEDARRRRDIRLKQAGDDRLRRLFYCRGGHNQLVLLACLLSDDPVFQKVLKNLHIESLESALFVLKEPHRLREKRRSGKFDEQELNEGDPRFWYARGNVVSEFLDKLWQVSWAPIEQEEIRQIDFRGRTEKQKQLYLFVPSQDKLKQLGELVGSTDSFFRYAEGAYIGDLIDEVRITVKKRDEYGGKVSFTHLSEGELQMLTVLGLMRITREDNCLFLLDEPDTHLNPIWKLRYFDDIEGVLASDDGTLVQGESQILLTTHDPMMVGSLKREQVHILRHNGSRTVVDIPDEHPQGMGVTGLLKSELFGLSSTLDIETERRLFRRNELFVKQPRSPAEDAELSRLSAELADLGFSTADFRDPDYALFVRKMAQHRRFRKPALTPEEQAEQDAIADSIIDEILREEAAE

SEQ ID NO: 85873 - protein, 292 aa, Pseudomonas aeruginosa
MIWIDLKNKYPTTAIPNWDPKATAQQWIPWTQERWDAWLARSKQLVAELAALDAAGKRDERNALIDANSGHWGELKGWLLALSAGKCWFSEVRELYSHYDVEHFRPKKEAKTLGSAVRDGYWWLAFDYMNFRACGNVGNRKKGGWFPLKDGSLCSTFADQCEESETRYLLDPIDDDDVDLIAFDEEGKVIPMPGTSEWDQQRVQETVTRLKLNDHVPLAEERRKVWQKVDGLIEDFKAAKARCGGNNPAAKAKLLEVRSNIREMTSRTAELSAVARWCVLFRNDPLLSKLVS

SEQ ID NO: 85874 - protein, 451 aa, Pseudomonas fluorescens; identical to SEQ ID NO: 84628

SEQ ID NO: 85875 - protein, 209 aa, Pseudomonas fluorescens
MRKIIKGNEPAELTKWMRDNPKGRYCDLTHEERNSIRQACIEEQHGLCAYCCHAITQETAHNEHVAARETRPHRTLDYSNIVASCNRSKQCGKAHAHQTLPLTSLMDECETELKFYLSGRVAGLSPRAITSIQVLNLGDCRENNRTLFSARKSILDTLLFDYGMEGNDLEAEDGELLKMLLEDLRLPDAHNRLKPFAPILVNVIRQLTN

SEQ ID NO: 85876 - protein, 404 aa, Hyphomonadaceae bacterium UKL13-1
MSVRNVRCFGDPPESLSLAEPDNEAQPARWTVILGANGVGKTTLLRALALLRTQFEPEVSYIGIVWGRFKRQKLDTCLFSYRTSQSDAKLSARIRFATESGHFLTATISPSQVLPIAAYGAGRNWNDLSADDLWPQGTLFDRSAVVRNPSEILSRLEFREIKEQIKGPSRFQMYRDALTNGVLPDVSDLRTVFAENDKAVVEFKTQDGWITLDDMSWGYQVFAAFAADYASRLIDWYPDSEAPLKEPGICLIDELDLHMHPKWQREVISQLSEVFPATQFIVTAHSPLVVQAAEEANLVLLERYEDDKSRVRIRNDVEAIQGWRIDQVLTSDLFGLESSRPPSFAKSLQERSDLLKKDKLSKPEQARLNALNDVAMSLPTEDQDWEARAKRALALASDELKSAS

SEQ ID NO: 85877 - protein, 257 aa, Hyphomonadaceae bacterium UKL13-1
MIRLTRPPEPPTFTRVNGKARRKREELEQAFAASPALRGGQQKPVFDSSVWASAKPALMAAQHKKCAFCESRVSHISYGDVEHFRPKAGYHSKRNEPLIQPGYWWLAYSWNNYSVSCQICNQLLKKNLFPLGPNGVRATGPADDLLAEDALLVDPMLDNPLAHIEFREELAVARGASEKGAATIDILGLNRPDLSESRRERWVLVRALIIERMAKMENGSPTLELDTLLVEAIRPEKEYSAMSRDLLARLAPELLAP

SEQ ID NO: 85878 - protein, 445 aa, bacteria symbiont BFo1 of Frankliniella occidentalis; identical to SEQ ID NO: 83966

SEQ ID NO: 85879 - protein, 193 aa, bacteria symbiont BFo1 of Frankliniella occidentalis; identical to SEQ ID NO: 83967

SEQ ID NO: 85880 - protein, 313 aa, Corynebacterium variabile
MISYYSSKRLWAHHNASRKTAVLTRSRTAGYDGCLSPLSSYKQLQDWVKAATLADFQQQSRQREVTGATGLGDRLRGIADAVDTVMKNEGWSGFHYDFAEEELAMFHPEHGDLLMTFLSDGVCAMAALTADLAQRCVRLNGHLGADAPRRTSGIVLIDEVDLHLHPAWQHQVLPALTEAFPRVQFVVSTHSPQVLSTVPQECIRSVFQDADGAWHAEEPQRLVKGLKSSVALQEIMDVDPVPAVPEARLIEEYTALIENGQQDSDEGRDVRHRLEEFYGPKHPVVADADRLIRFQRMKLRSQSAAPRREAEES

SEQ ID NO: 85881 - protein, 217 aa, Corynebacterium variabile
MRGFSRPSPGPECLKAVPVGTPWGDFGSSCKDQVRSALRMMQTGQGSALCAYCESVLGPRSGTHIEHFVSRSRDPGLTYEWHNLFLSCGHADHCGQYKDSRKASSCDLSDLIRPDSKDPDAYLHFHSSGEVWVREGLSGGERTRAQTTIDVLNLNAPSLKAARRALITQARDMILQDLDFLEGLEDEDRQEVLAEDIDAFQSGPYPTAGRHFFTHLV

SEQ ID NO: 85882 - protein, 477 aa, Grimontia sp. 96-237
MKIDKITLENFRCYTSLEISFHPEMTVLVANNGQGKTSILDAVRVALWPFVSQFDLANTPFKDPANTITIDDVRIIKADNAKRAAGFGVLDEMVRKFPASVTATGDYGSGPTQWQRYRDSEAAKSQTKDDKNCRDLKAFAKDLQKQVRDLTLTPVTLPVFGYYGTGRLWKEKRLTESKRGNNANDENIRTFALRDCLDPASSYRQFEDWFTDAYKKVLEHQIAQLQQGATFIDVDPKLKTPVKVVQDAVNEVLKPVGWKNLQFSQRDDESLVLRHDDYGVMKADRLSDGIKNMLAMIADIAYRAVLLNGHLGEEAARKSPGIVMIDEVDMHLHPQWQQTVIGSLRTAFPKIQFIVTTHSPQVLSTVSAESIRVLKHETDSNSGELVSAAEQKGMQTIGIPSSDILIDYQEVNPIPPVQEAQWVAEYTALIEQGQHETNTGKTLRQKLIEIYGDSHRVLLDADKLIRFQSFKQKSKKD

SEQ ID NO: 85883 - protein, 228 aa, Grimontia sp. 96-237
MHKLNRGNTEAPQCLSDYDHNTQTWDDFGGECKKRLRAALAQMQGIPGVTTEDASEYGVRCAYCEDAIHHAGHIEHFRRKNRNHFPELTFEWNNLFLACGSNDHCGHYKDRRGADAYNPDNLIKPDVEDPEDYLYFHSSGEVRPRVGIDANKELKANETIRVFGLKDQTLTSSRARALKTYKEKMLDELDEIANWEPELIAEYIQQEIENTQWQAFSTTIKHFLAGAC

SEQ ID NO: 85884 - DNA, 1260 bp, Bacillus cereus m1293
atgtttaaagttaggacgttggatattcaaaggattaatggtatcaaagatttattcatagagtttaatccaggattaaattttatttgtggacctaatggtatagggaaaactactatattgaattgtatttcaagtgcatttcacaggagtgggctatcatctgggatatttccacataataatgctaaatatggtgaatttaatattggtgtggaagatcatttgttctcaaaaagcgcttgtttttatgtaggtgaacatcgagaaaatatattttcattagagtatcagaaaactaaaaatatgcatagacatattaatgattacaggggaaattgtatcaattttaatattcgttcaagggcttttgaatacagtctgcagatggtaggagagagatttaatcatataaagtcatggttgtatacaaattattataaagatgagatggatcttcataaattttataatttacagcttgttcaagaatgttttaatttattggatcctaatatcagttttggaagaattaccgaaacggttgttactgatagacatccgttgagtaggcatgctatgtacaaagggaaaatcggggtaaatgttaattcaattttaaagcatggaaggggttatacggttagacctaaaaaccttgatatgtttgtaaacacttctcatggtgaagtgttagtggaatgtttgtcttcaggatataaatcttctttaacagttttattaggggtaattagggggatagagtcgtcctcaacaacaggtctagtggacgagtttaatggaataataattattgatgaaatagatttgcatttacatccgcaatggcaagctaaacttgtggatgctattagaaaattagttcctaaagcgcaggtaatttgtacgactcatagtccacatataatacaggttgcaaaaccagaagaagtaatagctctaggagaggatgttaatggtaatatttttgttaaggaaattccagctcctagcgaatatggttttcaaggatggacaattgaagagattcttacagatgtaatgggcttagcgcaaacaatgtcctccttatttgtagattcgttagaaaaatttaatgtagctttgcgaagaggtgatagggaaaagttgatgcatgaatataaaaaacttcgaaaaatgctacatcctaagaatccattagcaacattgctcagtgtacaagcaggagagttaatgatttgggaggatttcaaatga

SEQ ID NO: 85885 - DNA, 579 bp, Bacillus cereus m1293
atggaagttgagcattttcaccctaaatcgttatatcctgatgaggttgtgttatgggggaacttatttccgatttgtagtcgttgtaataaagcaaagaatgactatgatacattaataaatcctatcatcaatccatgtttacataacccaaaagcacatctgtattttgagcattttaatatatttggaaaagattccagtccattaggagtattaacagaaaaagttttaaatttaaatgatatggtacaagttgtcacccctcgcttcagagttggaatgcttgtaatacaaaaacttaaagaaattgcccaaatggttgaaaggtatgataaacaatctgcacttgttggtgatgattatgacatcataaataggacgaaagctcttttacaacatgcgacgcctaaaatggaatatagtgcaacagtagctactgttatcatatcttctagtttttatgggaaaatgaaagaacaaatgattactaaagatttgtggaatgcagatttagagcaattagatgaaattgctaaaggaatatctttagaagtaaggatacctgcaataacttga

SEQ ID NO: 85886 - DNA, 1623 bp, Vibrio cholerae O1 biovar El Tor str. N16961
atgaatgagccaactagaatccccaaatatgttaaagataaaattagacaggctaaacagggagatctgtactcatcctttactgtttctgagtattactacgatggtgaagttttagaaagggacatagaacagagtgaactatatctaagaaacgtgtcacgtattatcaacaatgctaaaatcagactcagaaatatctccttgtatgattacaagaaattctccaaattaaaattcacgtcatcagaaaaaaatacaacgatcattattggtaataacggttccggaaaaagtactatccttgaatctatatccaaatgcctacaatttctttctgataacatcagaatccaaaataataacaactacaaattccaagattcagaaattaatatccattcaataagcggacaaaccattgtaagatgtattttggaaatagaaaatgatttttctttttcatgtagcctaacaaagaacagagaaaacatatcaagaaaagtgtctagtgagcttgaagaatttaaagctctagcacgcatgtaccaacgctctaatgaactggataataatactctctcttaccctttattagcctattatccagttgaacgttcagtaactcttaaaagagatgacgctgtaaaatattatgaacgaaaaaaagccaaatatagtgataaaagtgaaggtctaaaaaatgcctttgatggcacatctaatttcaatgattttttttcttggtacaaagaaattgatgatattattaatgaattcaaagcaaatgactctataacaaaggaggaaattgaatatttattatctaagactgataacaaagagaaaataggaagtcttatttctcaattactagagaaaaaaaataattacaacaataatgaagatagagaatttttaattagacaacaaaaagtaattcaagagtccataaaaacttttgtatccgatatagatcaagttaagataagtagaacacctcacttagatatgacagttataaaaaatggaagtgagattagtatttttaatctatctcaaggtgagaaaacacttatcgctttggtttctgatatcgctcgaagattagtaatactaaatcctagcttagaaaatccgttaaatggatatggtattgttttaatcgatgaaattgatcttcatttacatcctaaatggcaacaaactattgttcaaaaactagaaaataccttcccaaatatccaattcatcctatcaacgcatagcccactagttctaacaacagttacttcggaacaaataaaaataattaatgaattagactatagattcaaattactatctccaacaagcaatccatttggcaaaaatgcctcggatgcactagctatcatggaaacatccgaatctccattagttcatagtgaagaaattttagctcttataaaaaaatatgaatctctggtgaaaagaggacaagaagattgtcgaaagaccaaagagattaaaaaacgcatagaaagcactggatatacatttgatatagcagacattgaaatgtggcgttttatagcagaaaatcgtgaattttttatcgataaatctgaaagtgatgactaa

SEQ ID NO: 85887 - DNA, 618 bp, Vibrio cholerae O1 biovar El Tor str. N16961
atgattccattatcacacaataatactcctactgaacttgaaaattatgtcaaattaaaaggtcaatctttgaccattcaagatttcagtgcacatgactttcaaggagtaaagaaaattgtaagagatagactacacactctccaaggtgaactatgtgtatactgtgaaaaaaaatatagcgttgatgaaatgcaagttgaacatattaaaccaaaatcgggaagaaatgctcaacctaatctctgtttcacctacagtaattatgctgtttcatgtattcaagaaaatcgtaagactcaaacttgtggacaaaaaaagaaagataacattttatttattgagccgacatcaccatcatgcaatagtcatttctctttagacactgatggttttataaatcctcgcgggtttaaaaacagaaaagaaaagcatagtattcaaactacaatcgacatgttaggcttaaataaaccacacctacaactagaaagaaaaaaacaaatagaaagattaatatacattttaaaagcaacaaaacacaatagacatgaactaaccaataaatttataaaaagtggtaattttaaatatattttacgagaacttacaatgtga

SEQ ID NO: 85888 - DNA, 1332 bp, Sinorhizobium meliloti 1021
atgaccgcgctgcgcctcgacaagctatcgctgacgaatttccgttgcttcgcccattgcgaaatcgcattccatcccggcctgaccgtgctggtcgcggagaatggcagcggcaagaccgccgtgctcgacgccgcccgagctgcgctctcggtcttcgtcaacgcgatctacccgccggagaagtccctgcggatcgaacggagcgatgtacgcttgatccccggtcaggagcgcaggatgtcgccgtgtctgccgaccgaatacgaagcgcaagccaccgttcagggtgaggctgtgacgtggaagagctcgataaggacttacggcgataaagtgcggccagacttccggcaccttggcctgatgaaagcggctgcgcagcccttcctatccgatatgaccgttctcccgctcatcgcttattacgggacggaccgcctctggagcgaacgacggcagaccgaatatcgccgctcctccctcacaaatgtcggagagcgcgtcgccggctatgccgactgcctcacgtcgtcatcgtcattcaagggcgtttcggcatggttcgagcatcgcttcaggcagacagcatcgccttcattccgggagagcctgcaaaccaatttggcgatgatcgaaggcctaaagagggccacagacacggttcttcaccccaccggctggtcaagtctccgctgggatgacgagctccataccctgacggccaagcacgaggagagaggcgaactaccgttgtcgctgttgagcgatggtgtccgcaccatgcttgcgcttgtcgcagatgttgcgcgccgctgcgccagcctcaatccgcaactgagcgaccgcgccgcgatcgggacgcccggcgtcctcatcgtcgatgaagtagacatgcatctgcatccccgttggcaacagcaggtgttaggcttgctgcaaagcgcattcccggcgctacagattattgtcagcacgcacagcccgcatgtgctgtccaccgtcgacaagtcgtcgatccgcgtcctccatgtcggcaacggggacgtggtgatcgagactcccctgattcagaccaaaggcgtcgagagcgcggatgtcctggctaccgtgatggacgtggaccctgttccgcagcttgcggaatcgagcgccctcagcgcctatcgcaagctcatcgaggcgggcaaagctgaagggcaggaggcctccgacttgcgacaacgcctgatcgcgcactatggcgaaagccatccggtcatgctggaggccgaccgtctcatccgcttccaacgcttccggctcgccaagagccggccggagggcgcatga

SEQ ID NO: 85889 - DNA, 648 bp, Sinorhizobium meliloti 1021
atgaggaaactcgatcgcgtcgtctgccccacgccgccctgcttggacgggtatcagcaaggcgcgcactcctgggacgatgtgacgcctgaccacagggcggagatcaggacgcatctggaagagatgcaaggccgccgttgcgcctactgtgagggcgacatcgacactctgggacagcacatagagcactttcggcgtaagggtgatcctgcctatcgccatctcacgttcgattggagcaacctcttttggtcttgccaccaagaggatacatgcggtcgcttcaaggacaaccgggcgggcgcattcaatgcatctgacctcatagacccgtgcgctgacgatcccgacagcttcttcatctttcaggtagacggaacgatcagtatccgacatggcctttcgccaactgaccaacaccgcgccaaggaaacgttgcgtgttttctcgcttgatgccgagtggggccggctgcgcgccatgcgaaagatcgcggtgtccggatatgttgatgacgccgattcggctttcaacgaaggttggccgcccgaagatattcgcgcgtacttcgctgaagagcttgagtatgcgcgcctcttgccattttgcactgccatccggcatgtgctgactgaaagacaatga

SEQ ID NO: 85890 - DNA, 1338 bp, Xanthomonas axonopodis pv. citri str. 306
atggaacgagtgatcgagatctaccacgacggtgtcttgcttcgtctggtcgacgaagctgaagtcggtgtaagagacaacacatatacggttgttgtgggggagaacggcgttgggaaaagccgcctgctgtcggacattgctcgggtacggatcagcgactacaacctaatggctgcttggcgcattgacgctccggtctttcctgtggtcattgcagcgtcaacaagtccgttcgacaaatttcctgccccgccaaggcgacttgcgaaagcacagaagaactaccgctatgttggaatgcgcggtgagggtatgtacggcgcttcttccgctgtatcgttgctgtcttccgcggctcgcgggttgctatcgaaactgtccgaaactccacctagcttgaacctactggaggttctggattcattgaagttctctccagtgttcaactttgtcttaaagccgcagtttgaacgctcgcgcgagaatgagacctcaagtcgttacaggggtgacagatcctccttcacgtctggcgcttacaggtacagcttcgatacccgcgtcgcatccatccttgaggcgaccgacagcttgcaagcagtactgagggacctcgacatcgcctcttcccttatggatgcgcctggcgcgttgcgcctcacagttgatttccgaagtagcgtcgcgactcttggcggcacggtgatagagtccagccatcttggcgcaattctgaggttgttcgaagagaacttgcttcggctgatggacgtcgaggtggagaagtatggacgacagcctttcagccttaagcgagcaagctctggtgagcagtgcttgcttgtgttgatgctcggcgtcgcagggcacattcaagaccactctctgatactgatagacgagcccgaaatcagtctccacccggagtggcaggagcgcttcatggcgctcctgcagtccgcattttcgcattacagcggttgccagtttgtgattgccacgcactcgcctcagatcatctctaggcttagtggccccggatccttcatctgtcacctacgcaaaaggaagctctatcctgcgtcgcagtttcaacgccgctccgcagacttccaactggctgagctctttgacgcacccggcatgatgaacgagtacatctccagggtatgcttcaatctcatcgcccaagtgcgcgtcggccgcccatttacgccccaaatgaagagtgagatcgactggctgttcgatgtgcgctcgaagcttgaccctagcgacaagctaatagcgttgatcgactcactctcggcgcttctcaaggaggggcggtcttga

SEQ ID NO: 85891 - DNA, 582 bp, Xanthomonas axonopodis pv. citri str. 306
ttgattgacgaacctgttgtctttagcgcggatgcgctcaatagaattgccaccgcgcgtgctcatcccgcatacgatcacacgatgtggtccgacgcaactcttgagccagtccgcgtcgaagtcagagaccattaccgacgcgtacagcgcttagcgtgcgcgtactgcctcaaccttctgtcgattagatcggccatgggctctcccgtcgaacacatcgcccctaaggcgatgtacctcggatacatgtttgagcctctcaacctgtgcgtctgctgtcctgactgtaatgagtacaagagcaacagagaggttcatgttgatcctcccattaagggttacttgcctgtcgcttatccgaatgatccagaaaagtttagaatcgtgcatccgcactttgatgagtactcacagcacattagacgagcgggaatcctctatataccgttgagcgagaaaggcagttacaccttctatgtctgccatctcggccgctatctgagcgagctaggtatgaccgaagagctatttaacgacttgaatgccgttatgcagcgccaccggttccatgagggatag

SEQ ID NO: 85892 - DNA, 1338 bp, Porphyromonas gingivalis W83
atgattagtagaattcacatcgaagagtttagagatattggtgacttggagctattttttctgccaggagtcaaccttttaataggcgacaatggcagtgggaaaacgtctgttcttaaggcttgtcagtatgtcctaggcacattcttttgtggtttcaagatggatcacacacctacatggacacagttgacccccgaagctaaggattttcgcagacgagtttcatccgatggagatgaacttatgaagcaccccatcaagtttaattttgatcttagatatgaggaaaacggtcaaaatccaatcgagttaaccgatcaaatcctgaccaaaaggaatacactggggagagcactgacgacgacattccaagaccatcaggactataccaaagggctactagaggggtatgcaacagatgaggggaggtacaggccattgcccgtatttgtattctattcggtagaagacattcacaccaaacgcaaggtgagccattcactattccagaaataccgacacatggccagtttcggttattatcatgcgcttaccgagaatgctttcttggacttttggatcaaaaggatgcttatccttcgggaagaagagcaagcagggaatcacgaattagcggtggtcaggggagccctgctcagtgcactaggtacagatggagcaggtgtattgcaggacttgagcattaggatcaacaagaaggctgtgtactggaaactcctagatggtagggagataagttcggagcatctacccgatgggttacgccgagtgatcagcatagtcgtagatttggctttcagatgcgccttgctcaatcagactttatatcaatctgattcagctctcaagtccgaggggacagtactcatcgatgaaatagaccttcatctacaccctcgcctgcaagcatcaattctcaagggacttcgtaaggcattccccaggctccagtttatcattacgtctcacgctcctatggtgatgtcaagtgttgatgcagatgacaaatacaacattgtgtacaaaatgagctataatcaagagatgtctcaatatgaagcattgaagcaatctacctatggtctcgacgtgtctaccatcatgcgtatgatactaggtttggctccaagagataagcaagttgacgagcgactaacgcatctcttcgatctgatagatctagagaagtactcggaggcaaccattgcacttcaatcacttcaagatcaatttgacgactctctaccagagctgtcaaaagcctctgtgatgttgcatttcctaagctcggagcagaatgaggaaaatcattaa

SEQ ID NO: 85893 - DNA, 600 bp, Porphyromonas gingivalis W83
atgaggaaaatcattaagggaagagaacccgatgcctggctgaagtatagatgtacgccaggagctgtatatcaaagaaaacctgcactagcggatagccttttgttagagcaggggtatgtttgtgcctattgcgagaagcgtatagatgtccaagacctcagagttgagcatataaaacctcgtagccaataccctgcccagcaactatcctatagcaatatggttgcatgttgcagtggccagagtcagggctccgctcattgcgattgctccaagaaggatgaggagattacacttaatctctttaccgacgcactgtttcttagcatcagctacaagcatgacggaacaatatctagtgcaaataagtcttggaatgatgatataaatatcacgcttaatttgaattgcctttctctcaaggagaatcggaaacttgctctagaaggtttgctagaaatcatcaaaaaagaagactatagccaaggggtattgaaaaggctgaaagcaagatacgaggcaaaagacaagggtcataaattcgcagaatacagaggaattatcttatactacatagacaaaaagctatccccctag

SEQ ID NO: 85894 - DNA, 1269 bp, Pseudomonas syringae pv. tomato str. DC3000
atgcgcctcgaccacctccgcctgcagaattttcgttgttacgaagatgctcattttgacttccagccgggtttcaatctggtggtgggggttaatgggagtgggaagacgtcgctgctgttgggggtggcggaatgcctgattccttatggcaatgcaatggggcaaggccaggaaattctgagcaaggaagacgttcgtttcgttatagacaggcatgaaggacgcagtcgatttgagagaaagtttcccgtattcataagagcggatggcgatatttttgatctgccaaattggcgggcagtccgtctgctcgagccctgggaaggaggagtagatccctcatcactctctcacttgagtgctgtgctcgccaggaacaacgcaggtgagcagattgactttccggttcttgccttctatcgcgccaatcgtcgttggagcagtgcgcgcatatctgccgagttcgcagcacagcagcggacttcccgttttgacggatatgcaaactggtttgacgccgtagccgatctgcgtgattttgaaagctggttaatcgcaaggacgcttgagcgccttcaggaccgtcttgattcaactccgactgtcgagcgtgaagatgaacttgaatgggtgaatcgagcgatcagacttgccataccggatgcccatgatctccgatatgacttgaggctacaaagcctgctcgtagatatgggggaaggcaacgccgttccgtttcacgaactcagtgatggtcaacgtagtttgattgcgttgattgcagatattgcacgacgcatgtgcgttctaaacccacacataggaaaagacgttctggcgaataccggtggcatcgtgattattgatgagctcgatattcatctgcacccggcctggcaacgcaacattgcgccgacgcttaaaaaagcattccccaaagtgcaattcatcgccacaagccactcgcctcaagtgattggcagcctgcaaccgggcgaggtcatcctgctgaagaatggcgacagctctcacccgcgagcaacctatggcctggactccagcaccattttggaagaagtcatgggcgtaccgcagcgcgaacccgaaattgaagtgttgcttgatgagctgttcagcacgctggaaaacaatgaacttgaaaaagccaggctgcagcttgacgcgctaaagaaaaaagcccccgatctacccgagttcgcaggtgccgaagcactgctcaagcgcaaggagcttattggacgatga

SEQ ID NO: 85895 - DNA, 645 bp, Pseudomonas syringae pv. tomato str. DC3000
atgagacgcatcatcaagggaactgagcctgcgtcatttaccgaatggaaagccagcgcaaatgaagactggatgcccacttatccaaccttacagaacccacaaaaacgcgaattgcataacagcctgctacaagagcagcattcttcttgctgccattgcggcagggaaatagaacttgagagcagccacatcgaacatttcaaaccccaggagcactacctgccactggcgctggagtacagcaatctccatgcgtcctgcctgcgcgagaccaaaccaggaaacccactgcattgcggacatcacaagagcaactggttcgatgaaacgctgcacatttctccactggcagacgattgcgaacagcgatttcgctatctcctgacaggaaaaattcaaaacactgaatccgcagaccttcccgccgccacgatgatcgagaaactcgcactcgatatcgcctacctgacgagaagacgtcaggaagcgatcacaggcatttttgatgaccagttcatattgagcgccagtgaggcggagttgacgcatctggtgcagagtttgcgctcaggagatgccggcaagcaggtcgcctttggccacgtcgttgcacgctatgcggagcagttgctggcgtcctga

SEQ ID NO: 85896 - DNA, 1173 bp, Nostoc sp. PCC 7120
gtgttagattatttacaaccaaatgccgttatgcggttgttactagatatcgcttggtgggtgatgactacaaattgggtagaacaaccagcatacccacagcaagttagaggtgaaaatccgcaaattacaggaatagttagcaataaaaaagatataagagaatatcagagttactttgatttttctgaacaaaaatggcgtagtttacaaatgcctcctttattaaaagaggtcgttatttatgtacgggttgatggtagtttttctgtttttgacccagctcgccaacgcgatattgcttataattttaatccaaatacactctggaatggattaaaatcaaaaaacaaagttctttgtaatggtttaattcaagattgggtaacatggcaaaatcaaccaaataaatatccatttcaactattttctaatgttattaaaaaacttgcacctcacccttcagaatggatagaagtgggagagccaacgcgagtttccattgaagatgtgcgcgatattcctacagttaacctaccttatgggaatgttcctgtcactcaaacatcagccggaatgaagcgtattctgggactagcttatttactagtgtggacttggtacgaacataaaaaagctgctgaattacggcaacaaaagccagtaaatcagatagttttactaattgatgaaattgaatctcatttacatcctcgttggcagagagtgattctaccagctattttagctgtagtgaaagaattacaacccaggatgaagatacaggctttagtaactactcattctccacttgttcttgcttccttagagccaaattttaatgagcaagaagatcaactatttttatttaaattacaagatagagaagttagccttgatgaagtaccttggtcaaaacaaggggatacagttggatggttaacctcagaaatttttggtctcaaacaagcccgttccaaagaagcagaaatcgcaattgaagcagcagaggcttggatgcgtaatgatgatatgaatgcgtttccagaacacttgagaagaccaacacaaatccatcaggaacttcaaagagttttaccaggacatgacccattttggccccgttggatagttacaacggagaaaagaaattttgggttatcagaggtataa

SEQ ID NO: 85897 - DNA, 339 bp, Nostoc sp. PCC 7120
atgatgccatttaatcctcctccagaaccgcgtaattttgatgaaaaagtgcgacaaccgggaaatgcttggttggaaaaaaatcctgatcccaaaaaaggaaccagagattattggtcgcctttcaaaagttctttagccgatggatttaataatctttgtggctatagcgttatgtatgaaccagttggtacagtagatcattatcgcagccgtgaaaattatcgcaatttagcttacgaatggagcaatttacgctttgcttctgcttggattaatagtagtaaaggtacacttgacgaccaggtgcttgatccttttgatttgggagaagattaa

SEQ ID NO: 85898 - DNA, 2130 bp, Bacteroides fragilis YCH46
atgataaaaatagaaaaagggaaagcaccggagtttttatcctcagagaaagttgaaattgcccgtgaaagaatgagaacattctatgcctcaaatcgggaacaaaaaagatatctatttccttttaataaggaaatagatataaaattaaaagaagatttacacaaaatattttacggaaaatgcggttactgtgaaacaataattgaatctccagaaaaaggtgtaattgatagatatagaccacataatggagtaagagataaagatggatacaatcaagatctgtattggtggcttacttttgaatgggacaatttaatttatagttgcaaggagtgtaatcaatataaagcaaattatttccctattcagggtgtccgagcattaaaagtaaaagataatttggatcaagaaaagagacttctcttaaacccgtgtgtggatgatcctcaagagcatttctattataatcatgatggccatatccaaataaaaacacgtgaaggggaacaaaccgtaaatctattaagacttaatgatagaaccgacttaatagaaggaagaaagaaagcgagaaaagagataataactattttagaaaaaataaataaaaatggagtacggtctattgataaaaatgagataagttatctacaacggatacttgagtatgacaatgattctactgcttttttcggatataaaaaatgggtactattgaatgaattaggagataatcttcttttagatttagagtttaatatcaaaaatcatgatagggaatggcttaacgatagagatcaaaataataaaaaagtaataaagaatgaagacaagagatatttggcgaatgactatttccccatcgaatacattcatatcaaaaatttcaagtctattgaaaatttgaaaattgagtttaaggaagatgaattaaataataaatcatggttaattctgcttggtgaaaatggagtaggaaaaagttctatattacaagcaatagctgttggcttaaatgcaaatgcaaaaatcataacttccacgcttattaaaagtcttataaagaaacgaaaacaaaaagcagagattgagataaaagagagaaatagcagtaatataattcgcactatacttacaagaaaagataatacaattaagcaagaaggttcttttaattcttatttaatgggatatggttcactaaggctttctgttgaagaggtcgattctgaatctataaaaatacaagatacaaataatgttagttatgaaaatctatttcagcctataaaaccgcttaatgatattactaaatggttaaaatcaatctatcggaaagatccagtgttttttgaaagagtagcatattcaataaagcaactactaccacatgatttttcatgcaatgaattgactataaaagataatgacataatgtttaaaaaatcagaagaactgttttctgaactaagtgatggttttaaaagcacgattatccttgcagttgatataatgatgaaattatctgatgcacagtctgatatggataaaatgacaggtattattttaatagatgaactcggaaaccaactacatcctagatggcaaatgtccatagtcaagcaattacgtacagtatttcccaatattaattttattatatcaactcatcatcctctttgcttgagaggtgctaaaagggatgaaatccttcttcttaagaatattgaaggtgaagttataggaataagacaattacctgatccatcgactttacgcgtggatcaaattttagcttctgagttttttggcttaagcagcttggttgatcctgagacagaagcttattttaatagatactacgaattattggctaaagatgaaaaagcctctgtggaagatcaagaagaaattactcgcttaagagataaacttagagataaacagcaattagggatatctttgcgggaagagttgatgtattccgttattgataaattgctagctaaagaaattgcatataataaaaatcctttagatagagaaaatttgaagagagaagttataaatcgagtgaaagatatctggacgaatttaaaccttgattattatgataacgattaa

SEQ ID NO: 85899 - DNA, 948 bp, Bacteroides fragilis YCH46
atgataacgattaatagaatagattgtccagatatccttaaacaaggtaaaaatcctaaaagtaaaggtgaacttgaaacgatagacgctttaaaattctttagtgatcaaaataatcatacatctacttacagaaaaactgggactacaacggtcggatataaaatatattcggacgatagtgtgaggaaggttctacttaatatgtttaatgggaaatgtgcatattgtgaaagtaaaataaccagtatatataatggtgatatagaacatttcagacctaaaggagaaataaaagaggcaactccgacaaaacctggatattattggctggcagcagaatgggaaaacttattgtttgcttgccctttttgcaatcaaacaaatacccatacgatagttgctaatggaatattgaaagaaactgtcttaggtaaattgcatcaattcccacttgtttctgaacaatatcgattaaaatacactcatggacaaatttatttttctgacaggaatgcttatcaacaagcttttgaattggaagaaacagagagattgttacttaatccttgtaaagatctaaatatagaaaattattttaaatataaggatagcggtgttattattgtcaatagtgatttaacagagcagagaaatatacttagagcagaaaaatccattcaagtatatgcattaaataggttagctcttgttcaagctcgcagagaaaaaattattcaaataaaagctcaaataaaacgaaccgaagagtctattattaattataataggtatgcaaagcaatctgatgaagagaaaatttggtttgaaggtattatgagaaaagagataaaaattctcaagagatataagaacacaaatcaagaatactcagggctagcaaaatatataattagaaaatactttgaagaaatatattttatatga

SEQ ID NO: 85900 - DNA, 1374 bp, Microcystis aeruginosa NIES-843
atggaaattcaacgggtcatcttaaataacatcgggctatttgaaaagctggaaatttccttggcgcctacagagcaaaacccaagcaacattaccgtttttgttggtaataacggggctggtaaaactgctatactaaaagcattagcaacttctcttagttggtttactgctcgtttacttacagaaaaagggagtggtaaccctatttctgaagatgccatatttaatactgctaatgctggcagcattgaaatcgaagtctgggattcctccaaatcattaaacaatcctgatcaaagcgatattgaccattatttcagatggattcttgcaaaaaatagaaaaggacgtaaagcccaatataatagcaaccttaatgactgtacgcgcttggccaatcgttatcgtgatgccctcacccatgatgacaaaactagcctacccctaattgcgttttatcctgtcgagcgtgtcgtactcgatattccactaaaaattaggactaagcatacctttttgcaattggacggttatgataactccttaagtcagggcgttgactttcgccgcttttttgaatggttccgagaacgggaagataccgaaaatgaatcaggagttccagaagacgttctcaaccaactaagaccaataatggctgaaaccaatcaagacgtatggcaatggttaaacgaacgcaatgcctccgctaaagatcggcaattaacagcagttcgcaccgccattggccgatttatgccccatctggataaccttagagtccgtcgtaaacctcgtctctacatggcagtggacaaaaatggtgaaaccctcaacgtcgcccaactttcacaaggcgaaaaatccctaatggctcttgttggtgatattgcccgccgtctagccatgctgaaccctgccttagaaaatcctttagcaggtgatggtatcgttttgattgatgaagtcgatttgcatttacatccctcttggcaacgtcgcctctgcgagcgcctgaccgaaactttcccaaattgtcagtttgtgctgacaacccattcacctctagtgatcagtgattgtaaaaatgttttgatctacactttagctaatggcgaattgcgacagttaccatctcaatatgggcaagatgctaatactgtcttattagatgtcatgaataccagcattcgtaatgagaaaattgatactgaattgaacgatctgctagatgccatacaagattcaaagctaaccgaggctcaacaattgctggcagaattaagtgaggaactacctgccaatcatctcgaattggtcaaagcaaaactactgctccgtaaacaagaattgcgtcatgggaaccattag

SEQ ID NO: 85901 - DNA, 645 bp, Microcystis aeruginosa NIES-843
atgcgaaccattagtaaaggggctgaaccttgttgtttaaaagcttggaaaaggaagaaccctcatggggcatacgatgatttagataaaacagaagaagggaaagtcgttcgggcaaagattcgagactatgctcttaatgagcagttttatctttgtgcctattgctgccagcgaatcgaaaaaattaatgcttgccataatgagcatatagaagctcaaaagctaaatcctaaacgtacgctcgacttttcaaatattgttgctagttgtaatacccctaatcaatgcggtgatgcacataaatctcaacacctacccctaactcccctgatgacagaatgtgaaacagaactgcgattcaaaattagtggacgggtagaaggattgagcgatcgggcagctgtcacgattcgagttttaaatttgggtgaccatgaaaaaaataaccgtgctttgatcgaaacacggaagcagttgtctaatgttttattatgggaaaatggcataaatccagatgacggcttagaggatgatgaaatattaaatatattaatcgatgacctatcacaacctcagcaagatcaaatggaacctttcactccagtagtaattaatatcttgagaagttggctccaagcttaa

SEQ ID NO: 85902 - DNA, 1281 bp, Microcystis aeruginosa NIES-843
atgagaattaagtctataaagcttgataattatcgaggtgtagttagtttaaacatcgactttcatcgtcaattaaacgtatttataggagttaatggtgctggaaaatccaccattttagatagtttggcgattatgctttcatggttagttaatcgcctaaaaaatactaatgccagtggacgaaagattagcgaaaccgagattaataatggtcagggtacggctataattgaaatcactgggttgacggaagatagtcaagagattacttggaaaatagtaaaaactaggactggatatatccacgctggagaacggagtaattttagccaattaaatgaatacactcaacaaatacaacgacaaattactgaacatcaaggacaaattaacttacctttatttgtttattattctgttaatcgagcagtggtagatatacccttaaaaattaaaacaaaacatcaatttgattctctaagtgcctacgaaaatgctttaaccagtggatcagattttcgcactttttttgaatggtttcgcgagcgcgaagatttagaaaatgaaaatagaaaatatcaggattatctaattaaaccagaaggtttttgttttcccgatccccaattggaagcagttcgggaaacgatcgaacgttttctacccgattttactaatcttagcgtccgtcgtaatcccttgagaatggaagtaacaaaaaagaatgaaatagttactgttaatcaactttctgatggagaaaaatgtctgattgctatgctgggagatttagctcgaagaatggcgattgctaatcctcaaaatcctgatcccttaacgggtaatggtgttattatcattgacgaaattgacttacatttacatcctcaatggcaaagatttgtagtacctaaattactagaagtttttcctaactgtcatttttttatttccacccattctcctaatattatcactcatgttcaaccagaaagtttacacttcatggaacaaacagaaatgggaataaaagttcataccgtgcaagagtcctacggcaaaaatgttgatcgaattttagaagatttgatgggattagagacaactcgtcccaaggaaatcgctgaagctttgaaagatatctatgaacaaatatctcaaaatcaattagaggcagctaaaaataaaatcaatgatctcagagctaaaattcaagatgatccagaattaattaaagctgaagttattattcgacgcaaggaaattatcggaaaatga

SEQ ID NO: 85903 - DNA, 504 bp, Microcystis aeruginosa NIES-843
atgacagaacagggggaaatatgttgttattgtgaaagtcgattggtttatggtgaatgccatatagaacattttaaacctcagagtgatcccactgttgatcccttagattatgccaatttgctatgttcctgtcaggcaaatcttacgcctagtgaacctcggcactgtggtaatctaaaaaataactggtttgatgaaaatctcttaatctctccacttaatcccgattgtgagtctcactttgcctttaactatgatggtacaattaaacccgcacaagaagatgatcaaaaagcaattaatactatcgaaaagttgggattaaacctcaataaactcaaggcacttcgtaaggcagccatcgatccttttttggatgaggagatagataatgctcaattaaaagtttttgtcaatggatatttatgcttagatgatcaacaaagatacactcctttctggacaacaatcaaatatctgttcagcgatttaattgaataa

SEQ ID NO: 85904 - DNA, 1425 bp, Microcystis aeruginosa NIES-843
atgtggccgaataagctagaattttatcgatcgctgttattctctgggggaatgtccatgtgggttgaaagtataacactcgaaaacattaaatgcttccagaatcaagagattaaatttattcgtaatcccaataatcaacgtcattggcgtgctaaaccttatcattggatcactttattgggagaaaatggagtaggaaaaagcacgattttacaggctttagctttgctgctcgcaggaccggaagcagccaaagaattattaccacgtccgaccggttggatatgtaatcccaagacaccgggtaaattaaccgcagtgcttcatcaagaagatggggatgcgggaaaatttggtacggataaaactcgaaaaacttttgcttattcctattttgttacaggcaaggaaaggttagagttaggaggcagtaaggacaaacaaacctatacagaaccagcattaatcgaagaaaatagcaaaattttgggttggttgcgagccaatgcttttgcctccgatagtcatggttggtttgccgtcggttatggagctttccgtcgtttgacacgagtgagtcaagtgattattcctagtcttgaacccccgcaacgctctagcaactttttcagccaatttaatgaggatacatctttaagttcttttgagagatggatggtgtatttagattatcgaatagccaaaaatccccaagatattcaagccaaacaaatgaaaaaaatcggcgaagaagcaattactaaactgttacccggtaatgtagaaattgctgaagtaactgccgatggcttgattcagtttctagttaacggtcaaaaagttccaaccattagtttatccgatggttttcggagtatgattgctttagccggagatttaatttggcgattattacaatccttccccaatctagataaccccacagaggcttctggagtcgtcttaatcgatgagttagatattcatttacatccttcttggcaaagggaaattgctggatggttacaggaagtttttcccaatcttcaattctttgtcgctactcatagtcctttaatcgctgctggtgcggggccaaattctttaaccctacgaatcgatctggtagcgggtgaattagagattgtagaaattccttatttagaattagcggctaatgttgatcgtactttaacaagttctgcttttggtctgaaatcaacctatcccactgatacagaaaataaaattaagcgttaccaccaactaaatcgtaaaaataaaaatctggcagcagaagaaaagcaagaatatgaacaactgtcattatttgttcgagaagttaaaccctttggcgaaattagtcaacctaatagtttagaatcccgaattgatgccttactagaggagcgtttatcttga

SEQ ID NO: 85905 - DNA, 522 bp, Microcystis aeruginosa NIES-843
atgtttaatgggaaatgcgcttactgtgaaagtaagattatagtggtaacttacggagcgatcgaacatttttatccaaaaagccagtatcctgatctgacttttacttgggagaatttactgctttcttgtgataaatgtaatgatgccaatcacaaaggcacaaattttcctctcgatgatatcacaggaaatcctctgttaatagaccccacggatggagtaaccgatccgaatacacatattgaatttgtttgggatgaaatggcaaaattggccagtgtttatggtcgggatcgacgtggtcaaattgttgaagatttgttcgatctcaatggtatgcgtggacgaaaagaattaattaactatcgtagtcaatatattaaaagattgttagcattattacgtttagcaaaacaaggagactcggaggctttatctttactgcaagaagcttgtcaatcaggagcggaatattatgcttttgctagtatttatatcctgcctcatttgcctccctaa

SEQ ID NO: 85906 - DNA, 1341 bp, Azospirillum sp. B510
atgcttcgctccttgaagacgaccaacatcggtcccgcccccctattcgaaatggagttgggagaacggatgaccgttctcactggcgacaacggactaggtaagacactgctgttggacgtggcctggtgggtctgcgcccgcgactggcccgatggccccgcgatccccaaccgcttcatcctgccgatcgcggatcgtgacgcgaagaggaagagggtcggggaaagcacgatcaccgccgtcacctgcggccggtccgggaaagacataccgcaggagttttctttcgatccgacaatcgccgactggagacgaaaggcacgaacgcgcccgccgattcccgggctggtgatctacgcccgcctcgatggcggattctccgtctgggatcccgcccgccattactaccgggtggcaccatcgcagggcatcgacgacccggaccgtgcgccggccttccacttcaccaaggatgaggtgtggaacggcaagcgtgtgcccgacgcgttcaagggcgaagtgacggtttgtgaaggactggagcgcgactggctggaatgggaaaagcgcgagccggccctgttcgacaccttcatcgcggttctggctcatctctcgccccccggcgagacgatgcggcccgcctcgtccccggtccggatgcccggcccggacgtatcgagcatccccgcgcttcaaacgccctatggcatcgttccgctgcgtcatgcgtcggcggcgatccgccgcatcctggcgctggcctatttcctggtctggacatggcaccagcacgacctccagtccgaggtcatcggctcccatcgggaaaggcggatcatcctgatcctcgacgagatcgaagcccatcttcaccccaaatggcaacgccgcatcctgccatcactgctgacggtggccgagcttctggacaagaaggttacggtacagatcctcgtctccacccattctacactggtcctggcatcgctcgaaccggaattcgatgaaaagcgggatcgattgtcccacctgcaactcgtgaagggcgaggcgcaactcaacccggagatctggcaacggcgtggcgaggtcggccgctggctgacctccgatatcttcgccctcgatgaggcccgctcgctggatgcggaacaggcgatcaacgaggcaaccgccttgatgcgcagccgaacccgaacgaaaggcgtgcgcccgcccgacgccgatatcaaacggatcgatgggctcctggcccgattgcttcccagcatggatccggtctgggccgaatgggtgcttttcaaacgctcgctatccggcgaaaaggcggactga

SEQ ID NO: 85907 - DNA, 612 bp, Azospirillum sp. B510
atgaggcgctttaccccaaaggaagagccggatgggttcaggaaagaggtaagggatcgcggaaacgcctggcttgcgaggaatccggacaagaaggcctcccaatatcccgattactggaacgaataccgtttggctgttcaagacgctttcgatggatgctgtgcctatatgggcttcagtatagcattaggccaagtggatcacttcatcgccaaggatgttaattcagcctatacgtatgagtggctcaattaccgatatgccgaacctcgggtcaatcttctaaagaagaagaaagcctttctcgacccgttcaaggctgagccaggatggctggacatcgatccaatcacattggaatacatcatcggtcccacccttccgccccccatgcgggccgtcgccgaggatatgctgtcggttctcaacgacaaggaactggtggttggccgccggtacatgctccgttggtacaggtcggaagacggaagctgggatctcaacaaattgcagggcctgtttccactgcttgccgatgctgtgaaaaggcttcaggttgcaaacccggcgcccaccgcagcctcccgatcgcaagcccctgcggactga

SEQ ID NO: 85908 - DNA, 1242 bp, Pectobacterium atrosepticum SCRI1043
atgaattttgaaaaagaaattaatgcaaagtattttctgggaagggttaaacaagctcattataacacttccgttgtaattcttggtcaaaatggagaaggaaaaagtaggttactcgttgacataatagggtatgcaaaagataacaattataccaatgttatagctgtatctacgagcccttttgataaatttcctataaggaaaaagtttaatggtatagattacagttacgtcggtgtgaaaggaggcacgacaggtaactctatattatctttaatcggttcagcatcattgggattattgaataaaaataaatttaatgatatttatgtagaacgaatcctgtcttttttaggcgcttcatctgaggttgaatatgtatttaaagttaatcagaaaatatttcaaaagcaaaattactcagatgataaaaatggtccagatatccatcattatcatcataatggatttttcggaaaggatttacacttttccgacgatgaactttataatattaacaaagctatagacttattaatttatttggttgatagcaacaaaaacttcaaagttcgattgaagattggtagtgaaggctacataaaaactaaagatttatacattgataatcttaatagtaagcttttaacattactggataatgatatcataaggttaattgactttagaatagaaaaaaaagagtttggttggatgtcgttgaggcttgcgagttcgggggagcaatgtattctattgtcgatgctaggtattgccacaaacatcactgacaactctttaatacttatagatgagcctgagatcagtctccatcctgagtggcaagagaggtatatatcgctcctgattaggatatttgagagatataactcatgtctttttatcattgctactcattctccacaaatagtttcgaagcttgatgcctatagatcatatatttacactattaaaaatgatgaactagtaagtgcttctgagtatgttaaaagatcgtcagacttccaattagccaatctatttctagccccaggttataagaacgaatatttaacaagggagctaataacatttctcacgtccccacaagaatactatgccgataaaggtgacgcagaaataatgaaaatcatctctttgagagataatcttgataaagatgaccccgtatttaagttgattgaattggctcgtaaagtaattacggagatacaataa

SEQ ID NO: 85909 - DNA, 699 bp, Pectobacterium atrosepticum SCRI1043
atgcctctgaattgcattgtgtatgaaggagacgatcttgaaacatatcaagattataatgcactacctgacgataataaagatggacgtatatgggattcggaagaacgtagcatctgtagaattaaaaaatcaattaaagactattatattattgctcaggactatacatgtccttattgtaagcaaaggattgaggttgatcataatggagcttgggatgccgaacatataatccctaaaagcagccatccaggttttgtttttgaacctttaaatttatgtgtctcatgcaaggattgtaataatgaaaaaagaaataaacctgtgttagagaataacaacaggagaagactgcctattagaagtggagactacattattgtccacccacattttgacgattatgaagagcatattaaagtaattgaggttgcgggttattatataccacgaacagataagggtagaaaaacaatagaaaaatgcggtttattaagatttgcatataaatacgcaaactatgggggcacttctcaggaaaacaaagagacaattcttactttagctaatggtttgttagatgctaatactcctgctgatgaacatgcctttttaggtgtgatttcagatgcagttgaaactggaaagaaaatatcaaagacagcattcctagagcaattttgcgcaagggagtaa

SEQ ID NO: 85910 - DNA, 1413 bp, Vibrio fischeri ES114
atgggttttagagttaaaaaagtaagggatcacgttctctggaataaagaagatgatgagcgtaatgcgtttacggttatcatcggaaataatggctgtggtaaaaccgagcttttgattgatacatgcaacaagtaccacagttattacactagtgccttacttgaaaaggatacccatgtagcatctgctgttcactatctcagagaagacttttcaccacacaattggaaaacagtagagcgtgagtatgggcaccgtttacctagaaaactgattgcagcctccactagccagtttgaaaaatttaaagctaattggatcgttcgaaatgatgcagtgccgtcaggtttctacgcatatattggatctaaaccttatatgccatcgttgtctccatcgacgcgtattgcatcaaaagccattcaacagttgttaggggcagagtatttcgaaaaacgtaagcacaaggctctggtcggatttttatcgaagttcgattttggtcaaaaattgctcctgaaattcgaactcacattccctaacgaagatctgaagaatatccaaaatcagtcatcaactgagcctgaaactcaattaattttgaaaaatgcctatatcgaacacgatgaaatggagttggttgagctactgagttattgcgaaagaattgtagaggcacctgcatttgcattaaccgtaggtaatcaaaaccttaatcttatccatctgaaggactctgaacaaaaacctttctctaaactcatcatttcaagaatgctcagagcaggattgattactctttcaagcatacaaacaatgaaagataaatcgctgataaacgaccaatctattgtagatatcgaaagttccgctatctcgtctttatcaaagcgtagttctggcgaacaatgcttgtttctgctgtttatgggcattatatcgtccatagaagacaatgcgctgatctgcattgacgaacctgaaattagtctccatccccaatggcaggaacgcttcgttgatatattaagtgaatcgttttcaagctatcgtggctgtcacttccttatcgcaacacactcaccacttattgtatctgacataagcgcaaagaattgctgtgtgtacgatatggcaacaaatacactggtcgatgcgacgccatatggtgagcgttcctcggactatcaactggcaacgctatttcacaaccctggaaacaacaatgagtatctcttaagccaagttatagaggtgctggatgacatttgtcagtcaaaggaaattgcatcagagacaaaaactaaggctcattggttattaagttatgaacctcgcttgccagatggagataaggtaaaacgcttgctatccattttagatcagacattagaggtattttccaaatga

SEQ ID NO: 85911 - DNA, 636 bp, Vibrio fischeri ES114
atgatgaagccctatgaattgagtgaagaagagtcccaaatcgttaagaatgtccaaggtgatactctctcccctcagcaaaagtgggacgactgccgtgtgacgacaatgaagtcgaacatcaagaagcattacatagctgaacaagatagaacctgtgcctattgtcaggtaagtatgcacacaactcatggtatggtgtgggacacagaacacatcattgataaagacagctcaccgcaatggatgttcgaaccattgaatctctgcgtttcatgtaaggattgcaatggagctaaaggcaccagaacatctacaaaaggaaagacatataagaattttcctcgaaaaagtacaaattatcgcattattcatccacattttgatgattatgatgagcacattaaagttgctgttcctggcgcagtatatctattccaaacagagaaagggcgaaacacgatagaggtttgtgggcttcttcgttaccacaaggctggagggaggaacaaagtcgatctaggtctgaaagcggcacttcttgcagctgcgaatgatcagagtccggagatgttagactatgctgtagagttaattaaaaaaagtaaggcagacgcagctgaggtgagcaagtaa

SEQ ID NO: 85912 - DNA, 2961 bp, Ruegeria pomeroyi DSS-3
atgaggtttcgtgtttttgcggttctgtcgtttgcggtgcttgttgcgctggctggcacaggtgtgccgcaggcgcaatccgtttcggaagctccctacagcatctcgcgctttcggctcgacgatttttccaccccgatactgcaccggaacgaaacggcgtccggttccctcgagatatttttcgtagtcccgcaattccaggttcccgaaggcaaggaacgccagtttctgaccgagatggtcgacaattactggcgcggtcttgccgtggttccgggatccggcaccgcgccggttggtatcgtgtcgtccgccaacagtgtcgtgttgtccgccaacaataccaccatggagtcgatcaagacccactcggaactcgtgtggaacgtggaatcctttggcgacgttcaggtcttgggcgaggaagtcgccgcgcaagacggcgtttcgttgtcgctgttctaccaggccgtccccgtcagggtcgttcaccggagcgataccaacgcggatccctcgtcgatcacgcgcgcatcgaacgcgataagcctgcaataccgagtatttgacaacacgaagctcggcgcattgatcggcggtttcgccggcctgcttgcggcgtgggtttatttctaccttcggacgatccggcggattcgcgaccgcggcagagcttccctacgattgcaggaacttcagacccggctggagaaggccgaactcagggccgagcgtctgaccgaccagccggaacgccaatcgacgagcattccgcccctcgacgtgccgcgcccgcccgtgcctccggccttgctggacgccctggcggacaagacggcgatggtcgccttcggctcgggggcttcggcgcaggccgggctgccaacctcgcatgagctgattctgcgtctcgtggacaggttcgacacgcagatatcggaccggctgcgccagaacatccaatacgccacaagcgccaatgaggagggcgtggtcgaacccgaccgcttttccgcgattgtcgaagccttgagcgatcaggtctcgcgcccggcgctgatcgaggcggtgcaggacatcttcgccgatatgcggcgcaacaccgggttttacgagacgctttcgcgaattggctggtcgggcgcgttgtccctggtctgggacgacatggccgacgagaatttcctggcggccaatccgccgttcctgcggttgaaccccgaagacacggatgaaatgcgtcaggcaatcaaggcgggcgagaagctgcttctgcgcggatggggcgggctgaccgaggccagcggtgagaacatcgtgctgaccttcgaggaattccgaaagctcctggaagaacgcccggaattcggccgtcaactgacgcttctcttgcagacacggaccttcctgttcctgggcctcagcccgatttcgctgagggaatacctgaccgccctgaacccgtatctggaagtcacgcagggccgccatttcgcgcttgtcccggcatcctacgagaatgagttgtttgtccgtccgctcgagcaatacgggatcgagcttctggaatacgacccggccggcgaccacgcgcaggtaaagaacttcatcgacgacctgcttcagcaggcgcggaaccttggccaataccggcagcccgaggaagatcgggcgaaccctctagcgtggcagccgctcacgcgactggaactggaaaacatcggccccttcaatacgcttgagattgaccttcccacgggccgaataccgaatgacacagcggaagtgcatggcgagccatggacgatcatcactggcgaaaacggaatgggaaaaaccgtgatcctgcgggccattgcgctggtgctctcggccagcgatccccttgtcgccgcgcgggcggggtcacttctgaaactgggcaagcaaagcgggcgggttacgctgagtgtcggcacacgaaagatcgaggtgcggctggtgagagaccggaaggtcatcgtcacgtcgcggcagatttcgccactcgccgcaggacagtttctggtgcttggcttcccggcgcttcgcggcgcgccaagcggcgaaccggcaggaccgcgcgaacttgacgagcagccgcccgggccgcaggacgtctatccccttgttctgggcagcgtcgatgaccggatgctcaacctgaaacagtggatcgtgaacgtgcttagcgcagcgcgcggcggcgatgcgaagaaccggcggctggccgagactctggattcgatagtatcccagatcatgcccggcggtgtcgtcggtttcgcgccgctgtccgaagccaacgtccttaagctctcaatccgcacgccgggcgacggcggtgtcgaacgcgaggtgccgttcgagcagctcagccagggcatgtcggcgatcttcaactgggtcggggttctgttgcagaggctgcacgacatctccggcgaggacgaagacccgtcaaaggtcgcggcgacggtgattgtcgacgagatcgacgttcacctacacccggaatggcagcgccgtgtggtgaccttggttaaggatattttcccgaacgtgcaagtcatcgcctcgacccattccgccctgatcgtgtcgtcggtgacggcagacgaggtacggattttccgccgtatcgacgatggggagttccagctagtccggcccactcgcgagacctatggtcgaagcgccaccgatctgatgcagggcgaggcgcttggggtccaaaacgccagaacggtggatttcgacgaaaaggtcgttgagtatctggaccttcggaagcttgcctcccgcaaccccgaccaggaagaccgataccaggatttgcgcagcgaactgcaagacgccaattgggcgggtatttccgaagaacccgcaccggtggtgacagcggaagacattcagcgtttgagtcagaagtatttctag

SEQ ID NO: 85913 - DNA, 894 bp, Ruegeria pomeroyi DSS-3
atgcacaggcttgatccgaactacacaagcgaggcgctgaagaagctgatagaaatcggtcaggaaaaagccaaggaactgatcgatgccttcgaagaagacccggcttcggtggaggtcggcacgttctataccaaattcaaggacgatctgattgcgtgccaaaatggcaactgcgcttattgcgaacagcttgtgtccggccatcccggcgacgtggaacactaccgtccgaagaaccgcgtcacgctggattccgggaaggtccttacgatcaagcaccccaaacatggcgagatgaatcatccggggtatttctggagagcatatagctgggacaatctctttctgtcctgcggtgactgcaacaaggcgcgttaccactccgaccaagacggcaggacgaaattcggcaaacaggatcggttcgacatcttgggaaaacgagccgttgatccatgtgacgacctgaacgacgaattaccgctattggtccatccggtggatggcgacccgcagaaggacctcacgctggacggcgagaacctgtatcaggcgcacaacgaccgcgggcaatacaccatcgaccttcttggcctgaatcgccgcgcggacctgatcgagcgccgcagcgtcgcattggagcgcggccaattggtcgtctgggaattcctggatgccgtaaagaacgaaaaggcgaagaagcagatggagaaggcggaactgcttcagaagatcatcgacgggtccatcgagttcctgtcggcttaccggcttggattgttcggcgaattgaagaagctggatgacttaggggtcgacctgaaaatcggtgagttggtccagaaagtcctaaagaccggaggcgatccatcagcagatgcgccgcggtga

SEQ ID NO: 85914 - DNA, 1515 bp, Pseudomonas savastanoi pv. phaseolicola 1448A
atggaagcggggttgccaccaggtacgaaactcatggctacgctctttgtgtcgcctttttatggtttgcatttagtatgctctcccaactgcaacgggaggtgttttccatatgcttggccagatgacgaaaccggagaaaatattgtgaggctcgacacactgcgaatgcagaactatcgctgcttcggtgaattcgagatcgacttcgatccgcatctgaccatacttattgcctccaacggaggcggaaaaaccactattcttgatgccgctcgagttgcgctgtggcctttcgtcaagggttttgatcttggcggtcagacaggaaaatccgccactattcagattgaagatgtgcgactggcccaattcggcagtggcaatatggagtcgcaggtacccagcgttatcgaggcaaagggcgtctggtgggaaagcgccgttgaaagtagctggctgcagcagcgcgtcagcctgaaaaagtccactaacactattggcgatgctggatcgaaagcactgacttcgtacggtaagtcgcttcaggagtgtgtgcgaagcgatgcacatgtcactctgccaatggtgacttaccttggcacttccaggctatggttcgagggacgcttcagttcggcggcggctcagacaacactcgataaaagtgagtactccagaacgtccgcatacctaaattgcctgtcttattcatccagtttcaagaccttcaccgcatggtacatctggatgtaccgcagctatcgtgaagctcagttgatcgctctggagcgcgatgaagaaatgtctgatgccgggcagcgctttgagaaaatcatctcagctgtcaaagaagccatcgacaggttgataaaggctcctacggggtggcacagactggaatacagtgccagtcatcaacagcaactggtcatgcatcatccggaccagggggttttacctgtcgaaatgcttagcgatgggctgcgtaacactatcgccatggttgcggacctcgcttttcgtgcctgcaaactcaacccgcacctcggcgagagggcgcccttgcaaacgccaggtatcgccttgattgatgaagtggatatgtttctgcatcccttctggcaacagacgatagtcggttcattacgtgcggcttttcccgccatgcagtttattgtcaccacgcacagcccgcaggtgttgagtacggtccgacgcgaaaatattcgggtgatcggtaaagatgcccaagggcgtttgattgcatcccggccccttgccatgacctacggtgagccgagcaacagcgtgctgcgaagcgtgatgcaggtcgatccgcagcctccggtggatgaaaagccgggcctgctacaactcacggaatgggtggacaaaggtcgctatgacgaaccacaggcgatcttgctgatgcagcagataacggaggctctcactgaacaacaccctcaactgcagcgcagcataaagcggcagaaggcattgcggggatga

SEQ ID NO: 85915 - DNA, 723 bp, Pseudomonas savastanoi pv. phaseolicola 1448A
atgaggtcagtgcacaagcggggaggaggaccttatcagttggcgcgttcacatcgcagcccacctgctaccagcgacacttccacaagccggtggagtagttttggctacaaggctcaggtactgggctgtcttttggaggagcagtacggattatgttgctatagcgaaattcgacctgaccgggttggcctgagtttccatatagagcacgtcgaaaacaagagccaaaaccctcagcgtacttttgactacaacaacctcgctgcctgcgcgctggacagtcagagcgatctggaggtattgaaaatacaaggcgctgaggtatttggtgggcacgcgtcaggtaagtcgaaaggggtcgacatggctcgcttcgtttcgtgtcacatgcccgactgttcgcgcttcttcgcctatttgtctgacggccgtgtggtgcctgctgacgggttgtcaccggaggaagttgaccgagctgaatacaccatcggcctgctgaaccttaacagcccttatctccaaggcttgcgacaatcctggtgggatgagctggaagctctttttgaagagcatgttaatcaaaatatgagtctgcattgtctggcggggattgatctcatccctgtgggtgcgaacttaagtcagtttttcagcattacccggaattttttcggaggtatcgctgaagaggtccttgagcaagaggctggtcgctggtaa

SEQ ID NO: 85916 - DNA, 1266 bp, Pseudomonas savastanoi pv. phaseolicola 1448A
atgcgcctcgaccacctccatctgcagaattttcgttgttacgaagatgctcattttgatttccagccggggttcaatctggtggtgggggttaatggcagtgggaagacgtcgctgttgctgggtgtcgcgggatgcgtcgggaatttacttggaagcattggcgtccatcagccatcgatagctgagtccgatgttcggttcgcgttagtaaagttcgaagacaggattcgtttcgaacgcagctatcctcttgtattgactgcccaaggtggcgcgtttgagcgtcaggaatggcacgtatcgctagaacgcagcagtcttcagacaaatttcagcgcgctgaacagtctcgtattttcggaaaatctgattagcatcgatgtaagtacccacggggatttgcctgtattcgccgtctatcaagctaatcgacgctggctgacgatgagtgtaaccgctgagcttgctgcacagagcaaaccatcaagactggatgcgtacacctcttggttcgatgccgcctccaatttgaaaaacttcgagacctggttcatcggcaaaacactggagcgctttcaaaggctatcccgagtaggttcttccagcgttttcaacgacgaactgacctggataaactcagccatccaatgcgcactacccgacgccaagggaatagagtacgacatggagctacgtgcgttggtagtcgatatggatgaccgaaaaatcccgttcaacgacctgagcgacggacaacgcggaatggtcgcactcttcgccgatatcgctcgccgtatctgcctgctcaacccgcacatggggaaggatgttctaagcaagacaaacggcatcatcgtcatcgatgaactcgatatccatcttcaccccggctggcaacgcaccattgctccagcactgaaaaaagcatttcccaacatccagttcatcgccgccagccactcgccacaggtcatcggcagcctgcaaccgggcgaggtcatcctgctgaataaccatgacggctctcacccaagagcaacctacggcctggactccagcagtattctggaagaagtcatgggtgtaccgcagcgcgagcctgaaattgaagcactgctcgacgagctattcagcacactggaaaacaacgaacttgaaaaagccagactgcagcttgatgcgttaaagcagaaagcgcccgatctgcccgagttcgcaggtgccgaagcgttgctcaaacgcaaggagctcattggccgatga

SEQ ID NO: 85917 - DNA, 645 bp, Pseudomonas savastanoi pv. phaseolicola 1448A
atgaaacgcgtaatcacaggagctgagcctgcgtcattcatcggatggaaagcccgcgcaaacgaagactggacgcccacctatccaaccctgcagaacccgcaaaaacgcgacttgcataattgcttgctgcaagagcagaacttctcatgctgctattgcggcagggaaatagagcttgatagcagccacatcgaacatttcagaccgcaggatcattatctgccattggcactggaatacagcaatcttcatgcgtcttgcctgcgcgagaccacaccaggaaacccgttgcactgcggtcactataaaagcaactggttcgatgaggacctgcacatttccccgacagaggacgattgcgaacagcgcttccgttatttgctcacagggaaaatccaaagcacgtcccacacagatcttcccgccacgacgatgatcgaaaagctcgcactcgatatcgcgtatctgacaaaaagacgccaagaggcaatcatgcgtgtgtttgatgagcaaatcttagccggcatcagtgatacagagctgaacattttggtgcaaggcctgcgctctggggatgccaacaaacagctcgcctttggccacgttgttgcccgctatgcggagcaattgctggcatcttga

SEQ ID NO: 85918 - DNA, 1359 bp, Pseudomonas savastanoi pv. phaseolicola 1448A
atggaaatcaaaagcttcaggctcgttaatgtggggcgtttcagcgatcttgaagtcgctctggcgcctaccgaaagacatgcgtcgaaggtgaccgtactggtcggcaataatggggcggggaagactacgctgctcaagtctgtcgctacatcgttgagctggctggtagcgagagtcaggacgccgaaaggtgctggcagtcgtatcgatgagggtatggttcagaacggcaccgctacatcctcgattaccattcggatagaggatgtgttgatttcggatgacgagatcaatccacttgaaactgaatggggaataaccgctactcggaaaggccgaaacgccacctcatccacagtattaagcgagctcaacagacttgctgatggctatcgctcaaagttgactgaaaaaagtgatacgtctcttcctcttctggctttctaccccgtcgagcgctctgtcatcgagataccgctcaaagtccacgccagacatacctttgatcaactcgacggctacgacaacgccttggggcgtggcgtggattttcgccgctttttcgagtggtttcgggagcgcgaagacagcgagaatgaaacgggtatctcgatagagttgctgaatgagctgtctcaaaagatcttgattgatacagaactctggaaagtgctgaccagggagcatgcctcttcacgtgaccgtcagctgactgcggtcagaactgcggttgaggcgttcatgccaggcttcacaaaactgcgtgtcaagcgtaagccgcgcttgcacatggctattgataaagacggcaagacgctaaacgtatcccagctgtcccaaggcgaaaaatcgatgatggcgctcgtcggcgacatcgccagacgcctcgccatgatgaacccggcgctggaaaacccattacatggcaatggcatcgtcctgatcgacgaagttgatctgcacctgcaccccaaatggcaacgcagtctcatcgcccaactcactataacgttccccaattgccagttcctcctgaccacgcattcgccgttggtcatcagcgacagcaaggatgtgctggtgtacgtcatggacgatggcgagttacatgagcaggacagtctttatggccttgatgccaatcaggtgctgtcgagtgtcatggacactgatattcgaaatgaggagattcaaacagttctggataaactgcagcactttttgatgagaggagagctcgatgaagctcggacgctctacgcagggttgactgacgaactacctgcaaatcacatcgaactggcgaaagcttcgctgctgattcgcaagctggaagtgcgccgtgagaaagattga

SEQ ID NO: 85919 - DNA, 621 bp, Pseudomonas savastanoi pv. phaseolicola 1448A
gtgctggaaaaatggaagcgcgcgaacaagggaaagaaatacgccgacctggtggggcgtgaagatatcaaggatgccattcgctacgcctgtgtcactgaacagcatggtttgtgcgcctattgctgctgcaggatcactgccgagaaaggcagtgcctgcaatgaacatattgaagcgcagcatctagcaccgcatcgcactttggatttcggcaatattgtcgcgagctgcactaacgccaagcggtgtgacaaggctcatggccgtcagcttttgccgcttacgccgctgatgatcgaatgtgaaaaagagttgcagtttgagctttcgggcctggtggcaggcaccacgcttcgggcgtgcgcaagtatcaacgtgctcaatttaggcgatacccatgagtcgaaccggggtcttgtgggagagcgcaagcagatgattgatgcgctgctgttttcttgcagcattgaccctgctgagctgtttattgaggaagatgatgttctcgatctgttaaaaaatgacctgcttgaggtagatgctcagcagtttcttcagcccttttctccggttttggtgaatgtaattatcggcatccaacgcgctcgtcagcgttga

SEQ ID NO: 85920 - DNA, 1266 bp, Pseudomonas syringae pv. syringae B728a
atgcgcctcgaccgcctccacctgcagaattttcgttgctacgaagatgctcatttcgacttccagcctgggttcaatctggtggtgggggttaatggcagtgggaagacgtcgttattgctgggggtggcgggatgcttcgggaatctacttggaagcattggcgtccatcgaccatcgatagccgagtccgatgttcggttcgagttagtaaagttcgaagacaggattcgttttgagcgcagctatcctcttgtgttgactgcccaaggtggcgcgtttgagcatcaggaatggcacgtatcgctagaacgcagcagtcttcagacaaattttagcgcgctgaacagtctcgtattttcggaaaatctgatcagcatcgacggcgctactcacggggatttgcctgtattcgccgtctatcaagccaatcgacgctggctgacgatgagtgtaaccgctgagcatgctgcacagagcaaaccatcaagactggatgcctacacctcttggttcgatgccgcttccaacttgaaaaacttcgagacctggttcatcggcaagacactggagcgctttcaaagactggccagaacgggtttccctggcattctcaccgacgaactcacctggatcaattcagctatccagtgcgcactgccggagtccaagggcatagagtacgacatggaaatgcgggggctgatggtggacattgatgaccgaaaaaccccgttcaacgacctgagcgacgggcaacgcggaatggtcgccctcttcgccgatattgcccgccgtatctgcctgctaaatccgcacatggggaaggatgttctaagcaagacaaacggcatcatcgtgatcgatgaactggacatccaccttcaccccggctggcaacgcaccattgcacccgcgctgaaaaaagcatttcccagcattcagttcatcgctgccagccactcgccacaggtcatcggcagcctgcaaccgggcgaggtcatcctgctgaataaccatgacggctctcacccaagagcaacctacggcctggactccagcagcattctggaagaagtcatgggcgtgcctcagcgtgagcctgaaattgaagagttgctcgatcagctattcagcactctggaaaacaacgagcttgaaaaagccaggtcgcagcttgatgcactgaagaagaaggcgcccgatctaccagagttcgcgggtgccgaggcgctactcaaacgcaaggagatcattggacgatga

SEQ ID NO: 85921 - DNA, 648 bp, Pseudomonas syringae pv. syringae B728a
atgagacgcatcatcaaaggaactgagcctgcgtcattcaccgaatggaaagccagtgcaaacgaagactggacgcccacttatccaaccttgcagaacccgcaaaaacgcgacctgcatgatcgcctgctgcaagagcagaacttctcatgctgctattgcggcagggaaatagaacttgatagcagtcacatcgaacatttcagaccgcaggatcattatctgccattggcactggagttcagcaatcttcatgcgtcctgcctgcgcgagaccacaccaggaagcccgttgcactgcggccactacaagggcaactggttcgatgaagacctgcacatctctccgacagaggacgattgcgaacagcgcttccgttacttgctgacagggaaaatccagagcacatcccacaccgaccttcccgccacgacgatgatcgaaaagctcgcactcgatatcgcgtatctgaccaaaagacgtcaggaggccatcacgggtgtgttcgatgaacagttcatatccagcgccagcgatgcggaactcgctaaccttgtagacagcctgcgctcgggcaccgctaatacctctattgctttcggccatgtcgttgcgcgctatgcggagcaattgctgacgcagcggtag

SEQ ID NO: 85922 - DNA, 1350 bp, Pseudomonas syringae pv. syringae B728a
atggaaatcaaaagcttcaagctcgttaacgtggggcgtttcagcgatctggaagtcgctctggcgcctaccgaaaatcatgcgtcgaaggtgacggtgctggtcggaaacaatggtgcggggaagacgacgttgctggaatccctgagcactctgctcacttggttgatcgcaagaattcgatctgaaaggggagcaggaaaaaaggttgctttagaaagaataaaaaataacgccgacttctcagaagtcagcatactgctttccgagtctttcccgtttgcagaccgcgcgcagtttgggtggcaactttcctcagtccgtcctgggcgtaaagtggaatcgagaacgaacttgattcatctggcacttctagctgacggttaccgaacactgctcacagacagtggtgcgacttctttgccattgatcgcctactatcctgccgaacgttcagtcgttgatattccgcttgaggcgccttttcgtcctccttacagacaactcgacggatatgaagacgcgcttagtcgaggtgtggattttcgacagttcttcgagtggtttcgagatagagaggatcgagagaacgagaatggcgtatcatctgacacactgatgcgtgctcagcaaaaacatggaccagacagcatagagtacgaagttctactcaggttgaacgagtcttctcgtgatcgagaactgacagctgttcgatcagccatctatgctttcatgcctgcttttgcgaatttgcgagttcgccgtcagcctcaggctcacatgacgatagataaacatggtgagacattgaatgtcttacagctgtcccaaggcgaaaaatccatgatggcgctcgtcggcgacatcgccagacgcctcgccatgatgaatccggcccttgaaaacccattgcaaggcaatggcattgtcctgattgatgaagtcgatctgcacttgcacccaaaatggcagcgcagtctcatcgcccaactcactacaacgttccccaattgccagtttctcctgaccactcattcgccgttggttatcagcgatagcaaggatgtgctggtgtacgtcatggacgatggcgagttacgcgagcaggacagtctttatggccttgatgccaatcaggttctgtcgagtgtcatggacaccggcattcgcaacgaggcagttcagacctgtctggacgagatgcagcactttttgatcaggggcgagcttgatgaggctcgtactctttacggagtgctggccgaccagttacctgcagatcacattgaactggccagggcttcgttactgattcgcaagctggaaatacgtcgtgagaaagattga

SEQ ID NO: 85923 - DNA, 621 bp, Pseudomonas syringae pv. syringae B728a
gtgctggagaaatggaagcgcgcgaacaagggaaagaaatacgcggacctcgtggggcatgacgatctcaaggatgccattcgtcatacctgtgttatcgagcagcatggtttgtgcgcctattgctgctgcagaatcaccgtcgagaagggcagtgcctgcaatgaacatatcgaagcacagcatcttgccccgcaccgcacgctggacttcaacaatattgttgcgagttgcaccaaggccggacggtgtgacgatgcccatggtcgtcagcctctaccgcttacaccgttgatgagcgaatgtgaaagcgagctgcagtttgagctttcgggtctggtggcaggcttaacggctcgggcacgcgtcagtatcaaggcacttaatctgggtgatactcatgactcgaaccgaggcctcgtaggtgagcgcaagaggatgattgatgcactgctgttctcctgcagcatgaatcctggcgaactattggttgaagaagatgatgtccttgacctgttaaaggatgagcttcttgaatcagacgctcagcgtttgcttcaggccttctccccggtgctggtcaatgtgattcgtagtatccaggccgctcgctattcctga

SEQ ID NO: 85924 - DNA, 1599 bp, Colwellia psychrerythraea 34H
ttgagttttgaattaaacggaacaaatcataaattcatatcaaatgaatgtaatgatttagataataagtatacttttctggtaggcgaaaatgggtcggggaaaacggagtgtttagttcaaataattaattctcttaatcgttatcagcttcagcatgaacagcatgaacagcatagggatatgttggataaacacctagaaaatagatataaatcttcattagtcgattttaaaattaaatctaatttggttttcgaaaaaaaagatgaaaaaataagtatttcgtttgaaaaaacagatgcaccaagagaaataattggattcgatggtaaaaaaataaacttaaatcaaaattcatttcgatatatctataatttcaaaacatcggctacggtatgtaataaagctgattatgacaaagagagcagtataattgcaatttcggaaagtccttataataagttccctatattgcaatcagattcctatttcaattattacaatataggggtaaatacagaagaaaaaaatgaatatttaaatcatcaaagtgatgattatgttcatccaaaagttaaacaattaacaatgtctatttgtggatctttatctgagcatcataagactaattttagtcatttatttagaatgttaggtttctcggagaaaataaaatttacacttaaaataaaagatagttttaaatatttaaataataacagtaaagaattagcagaaagagtggtttcaaacagatatagagatactagattttctagtgtaggtaaaaatacagaaaaagaaattgaaagtaaaaaaaatcaagataaaaccgaaattataaaagctatagatggtttacataaattagagcctaatttattcactatagaatcaaatcaatatcatgactctatgaatagagagttggattttgacattgattttaatagctatacattgatgactggttatgtaaaaacgttaattgaatatgacgtattatttgtttcaaatatttatttttataatctaaaatttgaaaagcaaagtattgattctagtagattaagttcaggtcaattatgtgtattaaatcttattttcggaatatcatcaaaaatactcaataactccttaatattaatagatgagcctgagataagtctacatccacactggcaatctaatatcatttcagttattcataattcatttaaaaattacacagcgtgtcattttattattgcgacacattcacctcatattatatcgaatgtaattaaaaataactcatctcttgtacttatggaaaacagtgaaaataataatttagctaatgatattataaatacagaatatggctgccaaggttggactgttgaagaaatacttcatgatattatgggtatgtctgatacaagaacagatgaataccaccagagaattaaagaatttgaggttgctattgaacaagataactatttactcgcaaaagcttcttttactgaactagataacttactccatccaaataaccatttaagaaaactccttaaacttgacttagtgtcagtaaaaagtgaagtcgaatga

SEQ ID NO: 85925 - DNA, 744 bp, Colwellia psychrerythraea 34H
atgataaaattggaaagagaaactaaacctgattatttatcagatgagaaagtttttgaactcacggaaagctttaaagctactaaaaaatcggtttggaaccatgaccatataaaaataccactgctgagatctagtcatagtaaatgtgcttattgtgaatgcccgttgacttctgcaagcaactatatggaagttgagcattttgaggataaaaatcattatccagaaaaggtggttctatgggaaaatctgttaccatcttgtaagaagtgcaatggagctaaaggtcaacatgatgtaatcggtgatccaataattaatccatatgttgaagacccaaaaaatcacctatcaatgcgtttatatcggtttagggcaaaatctgataaaggtcagagcacaattgaagtgacacaattaaacagctcagatagatcggtattttgccgttatgaaataggtgaaaaaatcagtgaaatgattgatctaggttttgaacgttggaatgaatatttagtaagaaataatactcgtagtaaaaataagttagttaatttagtccagggactacttaatgagtgccaacctacatcttcttactcggcttctacagctacgaacttactcacagatcctaagtttattgaattgatgtctctgatgagagaagcagacatagtatctgaagaattagatgatttgattctgaaagcttctactttagtacttgattatgtttaa

SEQ ID NO: 85926 - DNA, 1368 bp, Pseudomonas fluorescens Pf0-1
atggaaatccacgatttcgtaatcactaatattggtcggttttcccagctgcaagttgtgttagcccccacgccccaacacccctcgaacgtgaccgtcttggtgggcaacaacggtgcaggaaaaaccacgctcttaaaatctattgctacatcattgagttggctgatcgctcgaattcgtgctgaaaaaggtaacggtagttatcttgcagatgaggatgtctgcaatggcacatcaaccgccgcgattacactctgtgtagttgatcagtctcaactaccttcagatgggcatcgtctcgttcttgacgatgttattttcagatggagcgttgcgcgcaccaagcaagggcgtaaagccacgcttcacagctcattttttgatgctactcgtctcgctgatcattaccgaaaccaactgagcgcggatgaaaaagcgtcccttccattgattgcttactatccagtcgaacgctctgttttagaaatcccactaaaaatcaaaaccaaacacaccttcgatcaactcgacggctacgacaactcgctcaaccgaggcgtcgatttccgtcgtttcttcgaatggttccgcgaacgcgaagacagcgaaaacgaaaccggtatttccgacactgcactggctgaaatctccgagaaattcggcccggacagcgacgtctggaaaacgctgtccaaactgaaagcctcgtcccgcgaccgccagcttacagccgtccgctccgccatcgccgcgtttatgcccggcttcaccaacttgcgtgtgcaacgtaaacctcgcctacacatggccatcgacaaggacggtgtcaccctcaacgtcgcccaactctcccaaggcgagaagtcgatgatggcactggtcggtgacatagcccgccgcttggcaatgatgaaccagtccttggacaacccgctacacggcgacggcatcgtgctgatcgacgaagtggatctgcacctgcacccgaaatggcaacgcagtctgatccgccaactgagcgaaaccttccccaactgccagttcgtactgaccacccactcaccactggtgatcagcgacgccaaggatgtgctggtttacgtgctcaatgacggtgaactccacgaacacaaaggcctgtacggtctcgatgccaatcaggtgttgctggaagtcatggacaccgatatccgcaacagcgacgttcaaaaacgcttgaacgccctgctcgaacgcttgcaggacggtgatctggaaaccgcacagaagctattcgccgaactgacagaagaacttccagacggtcatatcgaactggcgaaagcagcgctgttgctgcgcaagctggagctgcgccgtgcgtaa

SEQ ID NO: 85927 - DNA, 627 bp, Pseudomonas fluorescens Pf0-1
gtgcgtaagatcaccaagggagtcgagccggaacaactgacgaagtggaaacgagctaacagcaagctgcgttatgggagcttgccgccagaagaacggcaatcgatcagagcagcctgcattaaggaacaacgtggactttgcgcctattgctgtcagagcatcacggttgaagccgcgcataacgaacacattgaagctcaggataagacccccgctcgcacgttggactttagcaatatcgtcgccagttgcgagaatcgctcccactgcggccatggtcgaaaaacgaaacgtctaaccctcacaccgttgatggacgaatgcgaaaacgaactcaagttttatcttaatggtctggtgaaaggtacgagcgaccgagcaagagcatccattcaagcattgaatttgggccacactgaagaaagcaatcgcggcttagtgggcaggcgaagatctatggttgaaaccttgatttatggctcgagacttacgccggaagagctgctggatattgaggacaaggagctattgaacatgcttgcagacgagtttgcgtctccagtcgaaggaaatcttcagcccttttcacccgttttggtcaacgtaatccgccaacttctttaa

SEQ ID NO: 85928 - DNA, 1284 bp, Chlorobium chlorochromatii CaD3
atgagaattgagcatttgatagtaaaaaatttcaaaggctttgtgtctaaagaatttacgtttcatcccaacttcaatttgattgttggcatgaatggcacaggtaaaacaagtatgcttgatgcccttgcggttgctattggaagctggtttttaggattttatgttgattcgctgaaaatgcgtcaaattcgacacgatgatgttttattaaaatatatacagcatagttgggaacatatttacccttgtgaagttgaagcttatggggttgttatggatcgtcatatcaaatggagtcgtgaattaaatactataaatggtcgtactacttatggaaatgcattagccataaaagagttggcattacaggcaactcgctctatgctgaatggggatgacattattttaccactgatttcttattatggtacgggacgtttatggcaggaaccacgagaggcattcaaggtatctgatcctcggaaagttgctaataaggaaactcaatcgcgcagaacaggttattttaatagtattgaacctcgtttgtcggttaaccaactcactcaatggattgctcagcaatcgtggattgcttatcaagagcaaggtcaagtttttcctgtatttaatacagtacaagatgcaataattggctgtattgaagatgctaaaaaactttattttgatgctaagcttggtgaagtaattgttgaattttcatcaggaacacaaccattttcaaatttaagtgatgggcagcgctgtatgttggcaatggttggtgatattgcacataaagcagctaaacttaatccacatcttggtagtgatgtgctgaaggaaacaaatggtgtggtgctgattgacgagcttgatttacaccttcatcctcgttggcaacgacgagttattgaggatttacgaaacgtatttccaaaaattcagtttatttgtaccacacactctccgttcttaattcaatcgttacggagtggcgaggaattagtgatgcttgatggtcagccatttgcaactcttggtaatttatccttagaagagattgctcatggtattcaacaagtgaaaaaccctgaagtaagtttacgctatgaaagtatgaaagcaacggctaaaagttttcttacaatgcttgatgaagcttcattagcaccaaaagaaaaactgaaacaattagccgataaacttcgcccttatgctgataatccagcatttcaggcctttcttgaaatggaacgtatagccaaattaggagagtaa

SEQ ID NO: 85929 - DNA, 735 bp, Chlorobium chlorochromatii CaD3
atgcgtccaatacgacgaggaacttcacctattgctggagattaccaagattatgataaggcaaaacccgagcttatctcacgtttaggttcatattgcagttattgcgaacgacgcatagcgactcaactctctgtagagcatattcaaccgaaagcattaccaaagtatgctcattttgaaggtcggtggactaactttttgttgtcttgtgtgaattgcaattcaacgaagtacacaaaagattttctatttacagatgtgttgctccctgatagggacaatacatttgcagcgttcacttacttatctgatggcactgtacaaccatcaatattagcctctgaaaaagggttacaagctgttgctcaaaagacgcttgagttaacaggcttacacaaagaggcgataaatacaccagatataaatggtaagcaagttgctcttgacagagtatcacaaagacaggaagtgtgggcaattgctgaaagacaaaaaagtcttatcagaactaatcctaataatttaggatttcgtgaatgtgttattgataacgcattagcaaatggatttttcagcgtgtggatgactgtatttgaagatgatactgatatattatctcgtttgattgctgcctttccatcaacaaaaaatagtggctgtttcactgaaaatggtctcccgctttctcctgcactgaatcctgataatcttgaacatgggggaaaactttaa

SEQ ID NO: 85930 - DNA, 1437 bp, Thiobacillus denitrificans ATCC 25259
atgcaaattaaccgccttacgctgaccaattttcgcgggttgacgaattccgtcttggactttgcgcccgggttcaatctggtcgtcggtgtaaacggcgtcggcaagacggctgtccttgaggccctgcgaattctcttagcgaaagccctgccgtcatttgcggaggtcagaggatttccgggaattggccttacaaaagatgacatcaccattgatcggaagcaggctgcgatcgaagtcagcttcacccatcaagcgcatacattctcactgctattgagcgaccagcttgaagtagtacgtgatgccgtggatgagcaaaagggactgaaggacatacgagatatcgacgagctagcaagcctccgccatggtcagcgcccagagcgaggtgatcccaggttggagggaacgctacggggccaaacgagcgaacgcccccgagcatctggccaactcagcccaacacctgacagggcgcttaagaaatcgaagcctcaaccaatcgtgctgtacttttccgtgcggcgcgctgttcctagtcctggtactccaaagacaaaggccgggacaccctaccaaggcatatttgagatcgaacgtggccttgaactggggaaaatcatcgagtggtggaatagcaaggcaacggtggctcgcgaagcgcctgactcccgctcagccaagcaattaacgacgacatgcaacgctctggagcggctgctcccgcatttgagcgattggaaagtcgaagatgggaatttcacggtttgtaaagtggcagacgtaggagtgttgaacgacgaaagcggagagtttgaagtcaaacaggagacccgacgcttacccgttcagttcttgtctgatggcgaacgtagcctaatcgctatcggaattgacatcgcctaccggcttgcatcattgaatgaagattcagagacccctctggacgatggtgaaggcatagtgttgattgatgaactcgacctgcatttacatccgcaatggcaaagaacggttgtcgagttactacgcaccgcatttcccaagcttcaatttatctgcaccactcattcgttattcctgatccaatctcagcgcatgggcaatttgattcagctggatcgcatcggagacgaagaagaatccgccgagcaataccacaatcaaagtatcgaagacatcgcggaagaagttcaaggaatagatttgccacaacgaagcaaacgacacgttgagttgatgcttgcggcatctgaatactacagagctttgaaaaaagctgaagacgacccgaacattcctattgaggagctaaaggaaaagtatgaagctttaagtcttcgatattccgccgatccgttggtcgctgcagcattggattttcgatgggaaaccttcgtgtttaaaagaaaccatgcgacccgtcgataa

SEQ ID NO: 85931 - DNA, 705 bp, Thiobacillus denitrificans ATCC 25259
atgcgacccgtcgataagggtaaggatctggggagtttcaagccttacaacaaggcctgcgctcctttgcaggacaggttaggagagtattgttcatattgtgagcgctggattgcggccgcaattgaagtcgagcacatactccctaagaaagccaatccgtctcagaagtatagatggagcaattttttgctcgcctgcaagaattgcaatacaggcaagggatctgatcaaatcatagtgaccgactacctttggccggatttagacaacaccttcttggccttctgttatgacgatgaaggtcgcgcatacccaaaccctagattgccgccggcgatcctagaaaaagcaaaagcaacctggacgctgacgaacctaaactggcacccagacactacattcaccggaatggtagcgccgtcagagaaggatcatcggcattcgcaccgaaagcaggcatggatatacgcaagcgacaagcgcaatcagttgcttcagtacgacacgccggacagaagagtatcggtagcgaaagatgctcttcagcgaggcatgttttccgtatggatgacggtctttaacaccacatctgagttggatcgtgaaatacgaagactgctaatagagaattttgtaggaacagccactaattgttttgaccggcttggcaatgcacatagaagctcaacgggtcaaatatga

SEQ ID NO: 85932 - DNA, 1227 bp, Burkholderia xenovorans LB400
gtgttggtgggagcaaacgggagcggaaagacgtcgttgctgaaggggatagccgagctgttcaatggatttgtaggtggtgttagctcgaaaagcattgctccaacgctgacggctgactccgtccgggtcgaacgcatcgacattcaaggcagactgagatttgaggagcagtatccagtatcggttcttgccgaaggaagcatcggcgataaaagactgtcgtggggtgtcacccgcgaagcgcctaccggaaactttacgtaccttggcggacaaccaggtgatgtatggaagacagcaagtgacaaaggcgtaaacactgctctcgcaaaaaaactccctatcctcgcgttctaccaggcaaatcgccaatggaatttgaaccgggcaagtgagcttgaggctgcaacgagcaaagacggtcgtatgaacgcttataacaattttttcaatgcgtctagcgatgctgcctctttgcaaacctgggtcatatctaaatgcctggagcgctttcaagtttcctcggaaacaaacagactgttcgacgaggtaactgacgacgagcttgctttagttaacggtgcgctcgccaacgcgatcggggaaattcaaggtatcaaatttgatatgcgggagaaaagcctgcttgtcgaatggaagcagtccgctggttcaagccgctcagctaccgtttttggaaatctaagcgatgggcaaaaagcggtcgtggggttgatcgtagacattgcacgacgcatctgcctcctaaatcctcagttggggcaatcagccattaaggagacgccgggaattgtcctcatcgatgaactcgacatgcatctccatcccaagtggcaacgagcacttaccttgggcttgcagtccgcattcccctccgttcaattcatcgttgcgagccattcgccgcaaattttaggagagatgaagccagagcagattatcgtgctaaccggaggaacgacctccaatcctcaggtcagctacggactcgactcgagcgcggtacttgaagaaattatggacgtccccgctcgtccgttagaagtcgccaatgaactgtcggcactattcgaagctttagagcgaaatgaactgaatgttgcgcgccaacacctcgccaaattgcgtgctggcgcgccgggcattgtcgaactgaaccgcgccgaggcccttctcaagagaaaggaggtgcttggccgatga

SEQ ID NO: 85933 - DNA, 648 bp, Burkholderia xenovorans LB400
atgagatatgttgtaaaaaaccaagaacctgaatcgttcgcggcctggaaaaaattagcaaatagggactggaagcctagctatcaggaccttatgaatccagagaagaaggaactgcacggctcacttgtggccgagcagggtggaacatgctgctattgcggacgggagatcgatctggctgatagtcacgtcgagcacttcgttccccaagctagcgctccagatcaggcgctcgactacgaaaacttgcacgcgtcctgtattcgggagcgctctcccaatttgcctctgcactgcggccacgcgaaggaggaagagcttgatcaagccttatgcatatcgcctttagatccaacttgcgagcagcgctttaaatatgccttggacggcgcagtgttggcagccgatcctgccgacgaaagcgcggcctacatgatcaaactcctacaacttggcattccgtctttgcgcaatcgacggcaggcggtccttgaaggcgtgttcgacaatgcgttccttgagtctgcaaccagtgcagaactggaaactattcgcactgtctatcggacacgtgacaacgccggacattttgcagattttgcccatgttgtcgcccgattcgcggaacaattagctcagccctga

SEQ ID NO: 85934 - DNA, 1386 bp, Pseudoalteromonas atlantica T6c
atgtttcgaatcctcgcatacaaaagtgactcgttctcggaaattaatttcacaaagagtgaatcatcaaagaacttcaaaacgttattgattggagagaatggaacagggaaaactcgcttattaaatgagctgatatcagccgttagatctcatcacccatccgagagttctagcaggaccaaaaaatttaattacgagctagcttatttgaatgagagcaataaaaaaattttactaaactcaaataaagcacaagaaaaaacagccataataagtaataaagttattgctatctccgcttctaataatgataagttacctttctctgatagtgacaaattttttgataagaactatcaatattgtggcataagagaaacaagcaatgcatcttggactagctccttaatgagaaagacaatcgaaaacctacttgattgtgtttctaataacaagataaagcctctttcaaaaatttttagttttctttcgtttgaaaatattatacgtattaggttcagtcttaaaaaaacaacaaagcttgatttgtttaactgcaaagcagaagatttgctagaatttattgaacactattcactgaattccagaagaatgcaggtggacttgattcgtgaatttgatttaaaagcagccagaaatattctaagttattttaaagatatcattctacgggtatctgataaagaagcatattttgaggtaaacctattggatgataactacgggtttctcaaagcatatcaaaatattgatctcttaaggcgagtcggtttgattagtgatgtatctttaagattagcaaaagagggtgataaacaagacttcacttttatggatgcaagttcaggagaaagtcaactgttacacagtctttcatcttttgtaaggtatgttgtcgatgactctttagttgtaattgacgagcctgaaataagcctacatcccaactggcaactaaaatatatttcattaatagatttgcttttaaccgatttgaaagggtgtcatgtagtcatagctacacattctcattttttagttactgatttaaagcctgaagatagttcattgatagttttagaaaaagatgaaaagggcattagagctactcctatcgaaagttcaactttagggtggagtcctgaaagtgttttatacagagttttcaatgtgaggataattaacagtgtctatttagatagtgatttacaaaaagcacatcaattaatgtcaagtgatgatatagactttgtagaattaaaaaagctaatgagtaaatttgagtcactggttttagatgaaaaagatccattgaaaaagttcattggtgctatggaggattttattgatgagcgtggatga

SEQ ID NO: 85935 - DNA, 624 bp, Pseudoalteromonas atlantica T6c
atgagcgtggatgactggtatcttaatataacagtcttacctaatctttctaaagaatctgttcattatataggaagtttgatacctcacgatcctagccaatggaatttacagaccaatgcaatgaagaaatataagaaagagttgttagaaaagcttgtagatattcaagaaaatagatgtgtttattgcgggttaggttttgatcgaaaatcagttgaccgagagcattttgtacacaaagaagcaacccgtggatttaaagagttcatgttcacacctgagaacttgtttgcttcctgtgaattttgtaatagaagattaaagaaacgaaccacagtgatagatagttatgataaaaactacagcgactgtacattcaaaatcattcacccatatttagatacaccatccgaatttatttcatttttcccaagtaatgatgttccttacgtcgtcaagcccacagagaaagattgtggtaaaggtgaaagaacaatcgagatgtttgaattagataccatttcaatgtggaaattaaggcaagctcatttaagttgtatggcgatggatgagagtgagtacgcagagattttaaaatataaaggatcattttcagaatag

SEQ ID NO: 85936 - DNA, 1671 bp, Aeromonas hydrophila subsp. hydrophila ATCC 7966
atggtaaataaacctggatggttgagagctatagaaaactctgctcatagaggtgatgttagctctatgtttcagttgtacttgaattatttttatggcacaagtgaaatagataaagatcttagcgtcgctgatgattattttaatcaatgctttttatttttagagtcaaccaaggacaccgaatattatgttcctgaaaataggtttgttctatctgagataaatctggttaactttagacgatttgatagtattaaggttcggttagagagcaatgttactgtttttatcggtgggaatgggattggtaaaacgacaataatagatgcaatatctaaagtattgagctggattgtttcagggattgagaaagaggggaaaaatggatcaccaataaaatatcaagagattaacaataacgaacaatgttatttctctgatgtgaatgcgctatttgaatttggtattaagaccaaagtgaatggtacaatatcaaggtccaaactagggactgctgaaaagcgcgatagtaatgttgtcgaattaaaatccattgcaaatgtctggagagttattaactctattaatcctataaatctgccaatttttctatgttactctattgctcgatctcaccctgcaaagagaagtaatcgaccgatagtgaaagagcctagtctattaagaaagtctcgtttcgatgcatattcaggtgctttggacggtgctggaaaaatcgatgatttcatagagtggtttattgagcttcataaaaaaacgtcaaataatgggtttttcgatatcgatttattagaggctcaggttaggaagttaaaaattctctcgagcatggatgctgattttattgaaatgtacgatcaaaaaataatagatttgtcacttgctaaaaataatatgcaggatggtgagttcgaaaacaatctaaagcagatgagaacggttgttgatgctgtagtcaaggttgttcccagcatagaaaatatttgggtggaaactagttctgggtctgatgaagtaaaggtaaggaatgacggagggatagttaatttttcccagttatcagatggtcagagggtgcttctttcattagtcgccgatttagctcgcagattagttatgttgaacccaaatatctctaatcctcttgaagggcaggggatagttttaattgatgagattgagttgcaccttcatcccgcttggcagcagggtattgtccttgcgcttaaggatgcattccctaacattcagtttattttgaccacgcacagtcctcagatattgtctactatagataagaaatgtattcgtcaattttatattgatgaacatggcgctcttcaaacaaagtctccggacttccagaccaaaggggttactagtgcggatatcctggccagaattatgaatacaaattctgttccagatatcccggaggcccgtttagttgaagacttttcgaggtttttatcgaataaaaataagaatgatgcgctgctggtatttcaaaaaatatctgctcattttggtgatgaacaccccgtgacctatgactgcattaatcaaattaaaatttttgagatgaaagagaaaatacagtctcgaattggagttaaggggggggggaaagatgaagaaactcgatag

SEQ ID NO: 85937 - DNA, 669 bp, Aeromonas hydrophila subsp. hydrophila ATCC 7966
atgaagaaactcgatagagctctcgcaacaattccagcctgtttatcaaagtttcactatccgaagcatggttgggataatgtgaagtctagggataaaaagttaatttggaatcaaattgatttaattcaagatcggttctgtgtttattgtgaactgcctgcagttcaaggtgatgacacaacagggcatatagaacatttttataataaaggtaatatgaactataaatgccttacttttgactggaacaatttattcggttgttgtccttctacacatcactgtgggcatttcaaagatcaacttattaatggagtcccacgagcctatgatgctaacctattagttaaaccagatgttgatgacccaaatgagtatcttcagtttttatctacaggcaatgttgagcctaaagatggtttggatgcaaacaaacttaatagatctcgtgtaaccattgatatcttaaatttagattgtgccttgctaattgcgtccagaagcagtgtgataaaaaacttccaagatagagtcctagctctcgacgaacttaagagtaatagctctttagatgaagatgagtacattgagctttatcttgaaattcagagtgatgtgtcttccagtattcatcggacagctgttgctcaggttatcttcaattga

SEQ ID NO: 85938 - DNA, 1365 bp, Magnetococcus marinus MC-1
atgaagctgaacacgcttacactgtcgaattttcgctgctttgaatccttggagatcacatttgatgattatctaacggttctggtcgcccaaaatggcggtggtaaaacggctattctagatgccattggtgttgcccttggaccctatttaggggcatttgatgaggctgtaggtagccatttttccccggaagatgtgcgcacaaaacccagccacacacagccgtctatggagagtctctatccactaacgctggttgcccatggtgtggccgaaggtcaagagatccactgggaacgtgccttaaaaggcaaaaaatccaagaccacggttgcaggtgccaaaaatctcgtgctcgttgcaaaaaatcagcaagtgcggatacgccaaggaatctccgttgatctgccattgctggcctactacggaacggggcggttatggcgcaacattcgtgtaaccacctcaacaaaacaggggtggggtagccgaacccttggctacaccaacgccctaagcccggcctctagctttaacagctttgagcgttggttccaggacacggatcgcgcccattatgattatcaattagaacactctgatggccccacaaactatggtggagccaacgcatttttggcctcaccagaacgggataacccatttggacaggcgttagacgctgtacgaggggctgtggatctcgctttggaatcggttcaatggggtacgctacggtatagtggtacacataggcgcattgtggtatcacacccggcgcacggcattttacccgtgcatctgcttagtgatggcatccgcaatatgattggtctggtcgcggatatggcctatcgcgctgtgcgactcaacccgcatctgggtgtagaggctgcccaacgcgtggaaggcgttgtgttgattgatgaagtagacatgcatctgcaccccgcttggcagcaggttgtgcttaccgacctacgcaaggcatttcctaaggtgcagtttgtggtcaccacccatagtccccaggtgctaaccacggtaaaacgggaaaacatccgggttttggagattgaaaacggtcgtggcacggcccgccccccgctcacgcagaccttgggtcgggataaccgggagaccattgaggatgtaatgcaggtcgatgcccgaccacctattgaacccaccacacagctaaaacactatttggatatggttgggcaaggcaatggtgacacgattgaagcactgaatctgcgggcaattttggagcagatctatggtaaggattacaccaagctgcgtgtggcagattgtgcgatccataaatatcgcgccatgcgagcccagagcaaatga

SEQ ID NO: 85939 - DNA, 690 bp, Magnetococcus marinus MC-1
atgaggcacgtcaaacacacagcgtctctcaccaagctagaccgtgcaaagactaaagatccttgcccgacagatccagcaaaagcttggagaggctttaaacataaagacgatgtggccaaacaacttaaactcctgcaagacggcctttgtgcctactgtcaagtgagtttggacacggagcttggctaccatatcgatcatattcagccaaagggtcccaaccctaagcaaacttttgtctggcacaatctggtactctcttgcatagcaagtggatcccaaggtgcggtgagcggaaagctcagttgtggtcacgctaaaggcaatcaagcgttacctaaggatatggaccccacgcaccctgactgtgaatcactctttacgtacaccctttcgggtaaggttgagcccaatccagatcgcccccccgagcaggtggaggacattaaaaaagcgatcgaattgttgaacctcaacaacaaacggctggttcgcgagcgggccgagatgttgcatgaaggttatctatgtttaaaagatcttaacgggagtgccgttgcccatttcctggatttggaactgggaaaaaccaacggaaaacacagggcatttatcacggcccgcaaactgcactttcaagattggccacacgttgagcccatcgacaacacgcttgaagagagatga

SEQ ID NO: 85940 - DNA, 1233 bp, Magnetococcus marinus MC-1
gtgcgcatccaccacttgcacctgacccattttcggcgttttattgattttaagctgaccttagatcctcagcttacccttttggtctcacgcaatggcggtggcaaaagcgcattgttggatgccttagctttggcactaagcccctatcttaaacacctgcccacagtgcggggcaatcgcttacgccatggggatttacgcctaacgcccaagggacgcacagccccctttgtgcgcatcttttgccaaaccagcacaggccttcagtgggatcgcaccctctacaaagaccacggcaaagccagtcgcaaggccgaacgtaacgcggtagggcgcaaggcgctacgcgcctatgtggcgcgcaactttcaacccaacacgccacaattgcccatctttatctattttggccatggtgctcaggaaaaagccaaacggatggaacccttacagcgtgcccacgcttggctagacaccctgcaaccccacggtcaagaggcctcgttgctggaggcgctattacagcagcccgagtggcatgcgctgttgccttgggtcgagcaggccatgaccgcagtgatccccgaactgagtcatttgcgctggcagaagagtgaggggatacgggtggattggcagagcgaagcgggtggctcccgttaccccatccgccttagccagctcagtcagggctaccggcgcatgtttattttggttacggaaatcgccacccgcatggccctggccaatcccaatttaagcaacctgttagagagcaccacgggccttgtgcttattgatgagatcgagatgcagcttcaccccagttggcaacaacgggttctgcccgacctcatgcgcacctttcccaatctacaatttgtcgtcaccacccacagcccccaagtggtgaccacggtccccccccaccatctgcgtattttgcactgggaacatgatcaggtgcagcttcactgtgccaccttttcattgggcgctaaagcccatcaagtgctcaaagaggttttgggcaccgacccccgcccggaacagctggagattgtgcgccagctgcgtcgttatcaagctttggtggccgacggctattgggaccatgccgaagggcaggcgctacgtaaaattctggatgcttggggtgccgaacatgagcctgaactgcgccgcctggatatggatatacgccttaaagagctggaccggcttacatga

SEQ ID NO: 85941 - DNA, 777 bp, Magnetococcus marinus MC-1
atgaagcgcattgataaacagcgggagcccaaacccctcaagcgctatcgcaagcagcaccccaaggcctcctgggatgccctgcgcacggcgcatccggcggtctaccccgccatcaaaaagcagctactaaccgaccaaggtggcctttgcgcctattgcgagatcgaccttaaaatcagaaaaaaacctcgtgaaatcgacgatttccgcgtggaacattttcacccaaagtccgataccagcggcaattggagtcttgattggtccaatatgttgggggtttgtcatggtggctcgcagcgccacgttaccgcatcgggtgagcgttttagtgaaaacaagcgggaccatagttgtgacgttcctaagggttctcaacactgggagcaggtgattcttaacccattgcagcttccccatgcccccagcttattccgttttgaccgcgccatgggcagtgtgcgggttgacgagcacgcttgtgccgtagcggggattgaggtagctcgcgtacaggccaccattgatctgctgaacttagactgttcacgtttacagcgtatgcgtcaacgggtactggaccatctgaacgaacagctcattgtcttggtcgaacaagggcacaccttacaacaggcccgcgaccggttggcccgggcttatttaaccaaaaatcacaaggatttttggccagtggcttttttttctgccatccgtcactatctgggccaaagtgccgaaagggcactgcgcaaccagccaccccccctttaa

SEQ ID NO: 85942 - DNA, 1302 bp, Shewanella piezotolerans WP3
gtgataattgacacgttaaaactcacaaactttcgctcttttgaagactttgagctgcaatttgatccgaggctcaccgtgttaattgcccgtaatggtgctggtaagtctagcgtactggatgccgtagctacaaacttaggtcagtttctcactcggttaccaggtgtttcaggacataaccctaaagatactgattttttggtattcccggatggtcaaaagcctgcctatatgcgaatttactgtcgtgccactaatggtgtcgaatgggatcgtaccgagcgtcgagatcaaacaaaaaaaactctgagtagcattcctgaaggtgtaggcataaagcgcctacacgaatacgttgatcaattcgttgatgctcataatgaaggtggtaaatacgatcttccaatttttatctactatggtaccggacggggagtgttcgatattcctcaaagaaagcgagggtttagtaaaaaatttccccgctttgagtctttgtcgggcgcattagagagtcgcactaattttaagcggtttgtcgaatacttttattatttagaagataaggaaagcaggctgcaaaaagaacagcggtctttcgatatagaagtgccagaattgaagtctatccggaatgcagtaagcaaaatgatgccggagttccgtaaccctagaactatcgctcctgcaggccttatggttgattggttacacgatgatgaaaccagagagcttaaaattgagcagttaagtgatggatatcgtactactttagcaatggtaatggatattgctgctcgaatggctgaagctaaccctttcatggaagatccacttcagaccagaggtatgattctaattgatgaggttgaccttcatttacacccggaatggcaacgagaattcttacctaaactcattaatacttttccaaaagctcagtttgtggttacaacacattcacccttcattattcagtctgttaaaactggaaagttagtggacctagatcaagaagatccagaggatagtccatctttagaaaaagagcttagcgtcgaagatattgttgaagacttcatgggtcttgaggggatacagcgtagcgcaaagttcaatgaacgaatggagttagcggatgagtattataggctacttgacgcgggagttgatcgggagtctataaaagtgcaaaaaatagaaaagaggttggatgagatagaggacttatttggtgatagccctgtagagagcgcacttctgaagtcagagcgccgaacaaaagagagtaaagtatga

SEQ ID NO: 85943 - DNA, 618 bp, Shewanella piezotolerans WP3
atgaggcctgtttctcgtcctgtgtataccggtcaactatatgtaaattacaagagttacctcaaaccactcattgaaaattttggaggctactgctcttattgtgaacggcaggataaactggatgttgagcatgtcgcgccaaagtcaaaaaatctacaccttgaagtcgaatggggaaacttattgttaggttgtccaagatgtaatagagacttcaaaaagtcaaagaatgataatcgtgaagggtacatgtggccagatacgcataatacgtttgggcttttgaaatatttggaagatggaagagttactcctgccgatggtttagctgacgatattgagctgatcgtacaaaatacgattgaattagtttgtttagatgataaaaaccagcctcaaaagacactgaatctagctcgaagaagaaagtttaaaagtgctgatatagcaaaaagaaagtttgttgatggctgtcaaactcttgatgaaattttgcttttggcagaggaagggttttggtcagtttggcttactgtatttaaagatatagatgaagtgaaagaagccctgttaaatcacgtatcttacccaaatacatccggtgatttagcttaa

SEQ ID NO: 85944 - DNA, 1335 bp, Paenarthrobacter aurescens TC1
atggctaccgctatgggaagctccttccctccctcaaacgctgagacaacgtcgttccgcaccttgaaagtcgagccctggcgtcaattcaccgccatggacttagatctaagccggccacttaccattatcacaggggccaacgggaccggaaaaacgacgctacttaacgttattggcgtgcacttcaactggaatgtgcaattgatcggaacacccttcatggatgaggcaggcagtatacggtttaaagttggttccgacgtgccagcaacaccacttcccgagcagccagcaggattcggaccgtacggaccagccggataccccacgccaccaatgtcgaaggtcggatctctcatctatgagaatgatgtagagactgaactttttgttccagatttaaataatgcccaatttaccgttagctaccagcgccaacagtatgtggatggagtgtttcttaactctcaccgaagcattagcgggtatcaactcgtatcaagttatgcggcaaaatttccctcacctcgcgaactatatgagacctttttacaggaacttcgctcgcaatactttggctttcaaaccaacaggtccgccatgctggtcatgaaagaagctctgctcgctgctgctatcttcagcgaaggtaattcttcagtaatagccgattcaaacgcccgagccgtgtgggaaggatttcagaaggctctaggactgcttctacctccggagctcggatttgaacgattaattgccatgccaccggaaattctggtagtgacaagaaccggaagttttgccgtcgatgccctctctggcgggcttcgtgcactcttcgagcttacatggcagatttcgctcagagctcacacttcgagtgattttactgtgtgcattgacgaacccgagaaccatttacatccagagatgcaacgatcactaatgccaaatttgatgaaggcgtatccgaatgtcaagtttataattgctactcatagccccttcattgtccgatcttccgatgatgcacgagtttatgctctagggtacgacgctgagaaccgtgttgaggctagactattcgaccccacaacctcagggctttcgccagaggacacattgcgagatgtattgggacttgatagcacaattccaatttgggccgagcggcgattcaatgacatcgtttccaagttcacctcaggtcctccaactgccgaaacactcggtcaattgaaaaagtcactgatcgatgcaggtctttcatccgaactaccttctgctgttgacgtagttgtaagccgcaccaatgaaggtggacagcattga

SEQ ID NO: 85945 - DNA, 639 bp, Paenarthrobacter aurescens TC1
ttgagggctttgaaaaaactgcccgagcccgaagtagtaactaagaataaagtgcgatggactcaggactatgtgaaatctctaggctccgactcgactaggaagctaacaccgtggacccgacctgcaattcgcgagtcgctaactcaagagacgcagggacgctgcgcctattgcgacagtcacattgcccaagtttcggccgccaatatcgagcattaccgacctcgtgcccgctaccccgatctcgtggtcgagtgggagaacctcacaattgcttgcccgcggtgtaattctagtaagagtgacaagttcagtgaggacttgccgttcattaacccttttcttgataatcctgctgatcatttttacttttttggggatcttttatttgagaaaggatcagagcgtgggaaatacacgcttcttgaacttggacttaaccatgagggcttggttcgtgcccggaagcgccgcatcaaccacgtccattcacttattgtctcttggcgagcatctagcccgatcttgaaagaaagtgcacttggtcttattcatgaagaacttgcatcaggtgagtatgaatcaatggttaaagccctattagttaatgccggggtcccgctccctatcacatag

SEQ ID NO: 85946 - DNA, 1314 bp, Acidovorax citrulli AAC00-1
atgaagctggaatccctatccctcgcgcactgcggcggcttcgagcagctcgacatcgctttcgagccggatgtgacgctgatcgcgggtgtcaacggcgtaggaaagtccaccgtgctgcatgcgctgacggtgctgctgtcacgggcaatgccggagttcacgccctcgcgttcggcgccgctgtacttcaccgatgacgacatccacggtgacaagggctcgctggaggtgtccgcacgcatccagatcgacgggcagatcatcaatgccggcgtgcagcgcttgcgcgcgacggacgataagggcgaccgcttcatgctgctgcggcaggccaaagctgccaccgacgacaccgatttcgcccacgcgctgagcacccgcacgctgaccggtgagctggaggttggcatcaaggaaacccgcgccgcgctagcgatcctgaagaatgcttcccatccgccattggcggtgtatttctcgcccaagcgccagttgcccggccagccgcgcagcctgccggaggccacgcccttctacccgtccatcgcctatggccgcgccctgcacgaccgcgaagtagagctgcgcgagttcatgcactggtttcgcacccaggagaagctgggcgcggccaatgaaccgcgccggttcaaggtgctggacgcattgcgcgccgtggtggttgaactcctgcccgagttcggcaacctgcgcatccaggaacaaccgcgacttggcttcgtggtggacaaacgcggccagcccttctatctgcaccagctttccgatggcgaacgcggcctgctggccctggtgttcgatctcacccgacgcttggccatcgccaacccagagagtgacaaccccatcgccgagggcgtggggctggtgttgatcgacgagatcgagctgcacctgcatcccaagtggcagcgcgatgtcctgcagcgcctgcgagacatcttcaaggcctgccagctcgtggtgacgacccattcgcccctggtgctgggcgaggtgccggcgcgctgtgtgcgcttcctcgaattcgtgaacggcaaagtgggtgtaaccgtgcccgccgaggcctatggcatggacgccaaccgcatcctgcaggagttcatgggcgccccggtgcgaaaccggcaggtggacggtgagctgaaggcgcttttcgaactgatcgaccaggagcgtttcgacgcggcgcgtgccgccattgcggccctcgaacgcaagctgggcgaggacgagcccgagctgacccgggccagttcgctgatccgctttctggagggcgccgagtag

SEQ ID NO: 85947 - DNA, 630 bp, Acidovorax citrulli AAC00-1
atgcggaccatccagaaggggccggagcccgcgaccttgacacagcatcgccagcagccgcatgccgactacgacaattacgccgacaaggcgactttgcagcaggcgctggtggccgagcagcgcggcctgtgctgctactgccagtcgcgcatccgggccacgcccgagggcatgaagatcgagcactggcaatgtcaggccagccaccccgggcggcagctcgattttggcaatctgcacggcgcctgtctgggcgggcacggccgtcccgagcgcgagcagcattgcgatacgcgcaagggcaatgacggcctttgcttcagcgtatgcgacccggcgcaccccatcgagtacaagattcgctttttaggcgatggcaccatcaaggcagacgatgccgccatcgaagaagccctcaccgcggtgctcaacccgaacctgccgcgcctggtgagcaatcgcaaggcggtgctcgctgcgtttcagcagcgcctgcaagacggccgtcgcgttgatccggcgcgtgagctacccaagtgggatggcagcgaatccggcgacctgcccgagttcgcacaggtggtcgtctattggctacgaaagaaacaagcgaggaccgccgtatga

SEQ ID NO: 85948 - DNA, 1671 bp, Desulfovibrio vulgaris DP4
atgcgtctggattggttctgggtcgaagatttcaaaaatctcaaggatgtcaccattgactttgatgaaagtcattgggtgactgtggttatcggctggaacggcacaggcaaatccaatgtgcttgaagcactcgcgaccctgttccgtgacctcatcatgatccaagaattcaacggctcacgaaagcccaccttcaaatacaagctcgtatacaaatgccagaacaatctgatcgccattgatgctgaccctgatagggcacagaacgcctaccgcatttctgtgcgtgatctgtcggagcagttgcagccgacattgcttacgagcaattcagaagactacttcgaaccaatttttaagcaagggaagatcctgccgttagctcaattcatcaaacgacaggaagaatacctcccgcgcaatgtttttgggtattactccggctacgcaggaagaatggaagaaatattccaaccctacttggagaagtatgacaaggaattaagagggggtaaggaccctggattcaaaagacttttctttgccctccccattcacagccagttcgtgctgctagcattcgtcctcaagcatgaacaaatggtgaaagactttcttgaaaagctgctctttctcgaccctgtagatgggattgaatcagttctatttgtcctcagaaagccaggctgggcaaatagtaaaaagaaaggcggagacgagcgtttttggagggcagaaggagtcgtaaaagaatttctggttcgactgtatgatattgcccttgctccgattcgtatcactcgtgaaaagcaaatcactctctggaataaaagccgaattgaattcatttacctcttcgtaaaagatatggatgcactccgtactctcgttggggaacgtgagccaagatcattgttcagagacattgagagcacctttgtttctgagatgatcgaggaaattcgaatcaaaattcgtttacgagatggcaaaggaaaagtcactttccgggagcttagcgaaggagaacaacaactccttactgttctcggtctcctctgttttacagctgaagatcaaagcctgttccttctcgatgaaccagacacccacctaaacccaagatggagcgccgactacttggaatatcttaagcgctttgtaggttcagatgaagaaggagacgaacacagtcatatcctctttaccacacataatccgttagcaatagcagaactggtcaaagagcaagtccaggttctcagacgttcagaagatgagcttaagacttctgtccatactcctgctgatgacccacgaggtatgggatactcggggattgtgaccagtgacatgtttgggcttgcggctgctttggatagccataccctcaagcttcttgaaaggcgccgaaagctaacccttaccgatgatcctctgactgatgaagcaagagaagaattagcccaaatcaacagagagctggaaccctatggatttaggcacgaagcaagagaccctatctttagggaatatctacgagcacggtttgagtacgacaagaatgcaaacaagtctgaactcacgccagttgatgcattgacgaaggatgaaagacaagccctagcaaaagaactcgttcagaaggctcttgggcagcagggatag

SEQ ID NO: 85949 - DNA, 813 bp, Desulfovibrio vulgaris DP4
atgcgttttatcgacaatcgacatattcgagttcctgacggatggaacgaaaagtctcaacaagcgttggatgacgtttgcaactacagatgctctgtcaacgataggtctgcggtttggagagatttgaaagacgctttagccgagttgtctcacgacaagtgctggtactgcgaagccaagcaagagcgatcggatgacgctgttgaccactatcgtcctaaaggaagagtgcaggaagccaatgggcatcctggctattggtggttggctttcgacaagggtaactacagatattcttgtacattttgcaatagcaggagaaaaaatccagccacaggggagactcaaggaaagggtgaccatttccctattgctgacgagaatacgcgcgcactaaaatctggacaagaagaatacgaagagtgcttgttaattgatccttgcaaagctttcgaaccaaacctaatcgattttcgcgttgacggaaccccctgtcccaaatttcctgacaaccctctgtggaaaagcaaagctgagaactccatttattattacgcccttgatcaccaagaagttagggaagccagaaggcttctggctgttgacttagaaagctggattgaagaggcggacaaggcgtttaaaaagatctcagccggaaacaacgatttttctgatactttccaggggcgagtgagggatatcaagtcagctatgaaggccgaggctcggtattcatcatttgcaagacgtgtggttgcagaccacaaagaccttgtttggatagaaactcttctacaatctaactaa

SEQ ID NO: 85950 - DNA, 687 bp, Rhodobacter sphaeroides ATCC 17025
gtgctcggtttttcacagggtcgcgaatttgcgagcgtgctacgtttggaatccgccttgcgaaaaagcaggcaactgagcgacatccaggtttatctcgagcggatcaacggaccgatcatcgagttgctgggcgcgagttctggcgaacttacactcatctcatccctgctctttctcatcgccaatcgcgatgaaaatcccattattctggtcgatgagccagagaacagccttcatcccaattggcagcgagaatacgtcgacaagcttctgaatgcactcgaataccgaggcgccaccgtcgttattgccactcatgcgcccctgatcgtaactggcgcactcgccaactcgcgcaaactcgtctcagtgttccagatccacgaaggcgatgccaagcggatagatttggcgggctccgcgcgttcatccgagagcatcgaggctatcttgtggcaggctttcaatgtgattaccccagcaagccactttgtcagcgaggaacttgtcggagtagtcagccaactagaacggggcgagatcggcgccgatgcggcgcttgtgcgagtcaacgagatggacgcccatagcttcgatccgcagcaacgcgagttctttgacgcggtgcgaaagctgatcgctaaagtcgtcggtgagcgcgaaaggcggagtgacgatggctga

SEQ ID NO: 85951 - DNA, 555 bp, Rhodobacter sphaeroides ATCC 17025
ttgcccggtagcgatgccgaaattgcggcgcttaaaagcgctaaggaaaagatcctgaacctgcatcttgagcgccatggctggacctgctgctattgccggaccagcctcaaaggcgctggtccattcatgactgaccgtgaacatatcctgcccaagggaaaggcggcgtataaaacgctgagctacacgttgtggaatctcgctgcggcctgcaagcgatgtaacttacagttcaagcggagcggcgacggtttcgtgatcgacggcgaggacgcctcggcacttcaggcaagcgagaactatcactttatacatcccaatttggacaggtgggaggatcacttgacccggctcgctgttcaaataaacactaagaatcttgtcaagatcctttgtaaaggcagcgccaaagcaacttatacgcatgagtttttcaatctgaaagctctcgagatcgacaccttcgatgctgcccaaggtctcgacaacgcggcagaggaaagcgcagcggtggcagaattgcgtaaactcgccaacacgtttggtcaatga

SEQ ID NO: 85952 - DNA, 1233 bp, Flavobacterium johnsoniae UW101
atgcgaattcgagagttaagtataaaaaatttcagggctttagaagatgaccgtcattttgaattccattctaatattactttaatagcaggtgttaacggaaaagggaaaacagccattttagacgctttggttttggctttatctcgtttagtacctcaaatatcaccttcaaaatcaagaagaattaagataaaagagagtgatatagcgataggaaaagaggctatgcaactaactttaaaaacaaattgtgctggtcatcctgtaaattttactattgattatggatccaaggaaatctcaaccaaattacctaaaagagtaagagagataattactaatgcttatggagacacacaacgcggagacgatcaagctcctttagctgttttttatacaacagatagagcaggttacaaatttcctaaaagattacctgagattgttccttcaggtcaggcaatggcttataatggcgcattagaaaatcgcttagtagattataaagatttgatgtatagatataacgtatctgctactaatactgaagctccttttaatcaaaataccattgaagcaatcaattcggctatttctcaatttatggaagattttggggatttacacgttgaaaccaatcctttacgtttggtaatcctaaaaggcgaaaaagttatcgatgtaaaacagttgtcggatggtgaaagagcttttattgctttgatttctgatttaggtcgacgattagccttagccaatccagagttagaaaatcctttacttggatatggtgttgtattaattgatgaaattgagttgcatctccatccaaaatggcagttagaacttttagaaaacttaagaaacatttttccaaacattcaattcatacttactacgcattctccatttatcattcaaacagcgcgtgaaggggaattaatatcacttgacaatgaaatagtagtagaaccttatggtaaaagtttagaagaagtttcaaaatatgtgatggatattcaaaatacagaatatagcccaagaattaaagaaatgaaagcggtagctgaaaaatatttgactttatcaagtgaatttaaaaaagcaggcgatgaaagaaaatctgaaattcaagtagaattagctcaattgttagctccattttcagataatccagcctatatagcattattagaaagtaaaggtattattacagatgagaccaattaa

SEQ ID NO: 85953 - DNA, 708 bp, Flavobacterium johnsoniae UW101
atgagaccaattaataaaggaatttcaccccaagtttttgcagaatatgaagatgcaaaacgacctttggttgatagaattggcacctattgttcttattgtgaaagacaaatagcaaccaatttagcaattgaacatatttttccaaaagacgatacattgggttacagtcatcttagagaaaattgggataattttttattagcttgtgtcaattgtaattcagcaaaaagagttaaaattataaatgaggcaacctatttgctaccagatagagacaataccttcattggttttgagtatttagaaactggagaggttattgctacaagtgttgcaccaatagatactatggctcaaaatacgatcgatttggtaaatctaaacattgatgaggaagatttaatagatgaaactaaactttttacagccttactaagatcaggtcaaagagtacaagcttggatacaggcgaaagaagcgctgaatgattataataatggggaagttaatattcgaagaatagttagagaagcacagtcaataggtttcttttctatttggatgaaagcatttgaaggcgttcctgctgttcgacaagaattaatcaatacttttataggcacagaaactagctgttttgatgtaaatacaaattcaattacaccaagactagccaatcacttaaatcattcaggaaaagtatga

SEQ ID NO: 85954 - DNA, 1317 bp, Alkaliphilus metalliredigens QYMF
atgaagatggagtacatttatgtccatggctataaaaacttgaatgatattgaaatctattttgagccacaatcatcagtgaattcttttataggcaataacggtagcggaaaatctaatattttggaagttattgcaattatcttttccagtgtattggatgatgtaaatcctgatggatttgaattctgtcttaaatatactatagacgattacataattgaaatacgcaataccgaaaaactgttggaaatcttaaagaacggggagaaagtgtcaaaaaaagatgttaatcaaatttttcctaaagctatatttttatattatgcgggagaaacaaaaaggcttaagcaactttcagatgagattattgataaaagattcgagaagaccctaaagaaagatgaagaaattgctttcaaatttctaacctatttatcggtggatgattttggtcctagtcttttgtccaatcacattttcagaaatgatacctactataatatttgcaaattggtagatattaaagatatttgcccaccgataacaataaatctaaaaaaaccaagttggagtaaaaacggaaaagcagataacttttggaatgccgtaggagctgtagcaaaagaattaaatacttttgcacaaaagggaacatactcgataatcgataataacagatcaaaaattgtgattgaagatattgagaaacttaaagatgatagtattggagcccttggattatttacaatatttaaaatgcttgctcaagcggatgtgttagatggcttagaatttgaggtagtcaaaggtaatgacaaatttagttatacaggtttaagtgaaggtgaaaagcaactaagccagcttctgtcaatccttgaaataacaaaagaatataaagcattgtttctacttgatgaatttgactcatatttgcacccaaattggcaaagaaagtttgttgatattgtgaatgaaattaatataaggggacaaattctatttacaacccattcacctctaacgttagggaaaatgagaaaagacaatattattctgttaaaagacggggtggcatataatccgtctagtgaaacatttaatcgagatattactgaagtattagaagaattaatggatgttaagaaaagacctcctgagattgaaaagatgatttttgactttcgggagagcgctatgcagaaaaataaagagatggcacataacttatatgcccaattaaaagaagtactatcagaagatgacccgttttttataaatgcaaaaatatcacttgcaagattagagaggtaa

SEQ ID NO: 85955 - DNA, 666 bp, Alkaliphilus metalliredigens QYMF
atgaagtatatacacaaacaatcacaaccagaagcatttttgagatataagcgtcaacggggagcatcttttaaagagttatcaaacaataagaatagagaaataaagaactgcctacgcgaatctcttttagttgagcaaggatatatatgttgctactgtggtcaagaaatcagttcagacaattcggttattgagcatttaaagaataaggattaccatcctaatcttcaactagaatacaataatttagtgtgttcgtgtaaaggtggacaagatagaagggcaagaaatccacgatatcctttgtattgtgatgcaaataaagggaatctggatatatccatatatccaattgattgtatatgtgaaagtaaatttgaatttgatgaagatggcaatatttatggccttgacgaagctgcgcgagagacaattaaagtactcaatttaaacaatgacaaactgaaaaaccaaagaaaacatgcaatagatccatatcgttataatgatgatggaaatactgactggatcgatgaacttaacatgattgcagaaagaggctttgataaaaagttcctacccttctgttttgttattcatagctatataaagaattataggttgaaatctgaattagaatctgatttaattttcataatttag

SEQ ID NO: 85956 - DNA, 531 bp, Marinomonas sp. MWYL1
ttgtcttctgctagttctgggcagataaacatacttaatatattttttgggatatcatcttgtatttctgatgattcacttattctcattgatgaacctgaaattagccttcatgctgaatggcaaatgaaatttttacccttgcttcgtgatgtgtttaagagttttaaaggttgccattatataatatctactcattctccaatgataatatccaatgttggaactgatgattcaacaataataaacatggaggatggtgttacatacttatcaagtgattttatgttcaaatctgctgattatataaactctcacctatttgaaacgccaggtcctaagaatgaaactatgaatcgagaggtggttggtcttctttctgctatcagtaagggaaataaactttccaaagataaaataataaaagctgaattgttaattaaattgtctaaatatttgtctgatgctgatccaataaaagaattggttgatatcttgggtgaggctttagaggttaattcgaatgattga

SEQ ID NO: 85957 - DNA, 645 bp, Marinomonas sp. MWYL1
atgattgaaaatcctatagtctttactgaagaacaattagaattaatagaagaaataaaaaacaatgctgatttttcttcaaatacttggagttgtgaccaagttaccaatattcttaagcccgttattagagagcactatacagcagtgcaaaacgcaacttgtccgtattgtcaaatgcgtttaaatagtacaaatggtagggtatgggatgtagagcatattatacctaaagcaactgttgaaagttttatgtttgagcctttgaatctatgtgtctcatgcgtcgattgtaataatgcaaaatcaaataaaaaaattactgattcaactgcgcgtaaaagatatcctcgtactggttatttttttgttcatcctcatttcgataattatcatgataatatccacgtagtaagagaaggccttttttactttcctaaaacagataagggagaaaaaacaatatatatatgtaagttatgtcgcttttattctttcgcaggttatgatgataatttagatgatttggatgaccgcattgtacttttagcgaatagccttacgaaaacaaaaaatgaaagaactaaagattatattcgtcgtgaattaagagaattagtaatcagacagggattagtaagttga

SEQ ID NO: 85958 - DNA, 1359 bp, Ochrobactrum anthropi ATCC 49188
atgagacctgaggcggggaagatgccaaaaattcagagtttgaaatattacgaccgcacgggcgatcagcggataatagggttcaatgctggtcagctaagttcgagctttgaattgacactgcttactggtcaaaacggctcacaaaagagctcggtgcttcgggatctcgtatcggcgcttatactgccggaccatcggacgagagtacagttttgcggccagtatcaggcagccacgccgactccagtaatttgcttttcgggatcggttgctgacagatttccagtgaagatgcagggtgggcgccgtacagagtacgacgtggcaaactatcattatatcggccaacgcgccgggaccaatctactcagtaaaaagcttcctctggaaactgcagttatcttcgcgttgaacccggcgatgaaagagcggtttcgatttcctttcttcgaaagggcgttttcattttcagggcttcttcccaggctgagtctagatatccgctacgatcccaaattccgtaagcggtttccatcgaaaacgccgcacgaaatcctcgccatagctctggacgaaaacgcagaaacgaaaaatcgaggcggcatatctaaggctaccgctcaaagtgtggtagcccaattttctggggacgatttcaatttcttgaacgccctaataacggagcgcaaaggaaaatttctccaaacaacgttggatcaatttagtgtcactgacactccagagaaccgcgccgtgaggcttgggttattgcttgatatactcattatcgatcgagcctttgtacagcgtccgggcgaagaaccgttttcggcttacgagcttagttcgggtgaataccacatgctaaccagtcttctggcgttagggttttcagttacaacggaatctattgtgctgattgatgagccggaaaacagccttcatcctcagtggcaacaagacttcatgagcacggtccttgagttgtgtgaattaatgcaagatggtcatctcgttatttctacacactcgccactcattgtagcttctgcaaaacccgatagcatgatcgtcgatttgagtatccctatggatgtcatgcctgcggctccgatccagtttggcgcatcaagtgatagtattcttttcgatcagttcggcatcgcttcgagccggaacctcaatgtagttgacttggttcaaaaagccgtaaatttggtcgagcacgatctaataaacagcactgatttcattgtgcttctgccgaagctaaggctactacgcgaagcattgtcggatacggacccgttaattcctgtaattgatgttttattagagggggctctgcgagattga

SEQ ID NO: 85959 - DNA, 732 bp, Ochrobactrum anthropi ATCC 49188
ttgaatataggcttcgaaagcattgttcccacgccaacctatgcaaaaggagtatcgctcgcatcatttgctgggctcaactgggatagtcgagcaggcatagtcactgcatttaagctaagtctaaaatctgagctaaggcgtagtcagcacgctttgtgttgctattgtcgccgaccgcttggcgatccccgtgacaccgatcttgaacatataattgaaaaagctgctcaccccgcttttaccttcgaaattcggaacctggctctctcatgctctacatgtaacagccagaaagcgaggacttataagctgctttgcgaaaaaattaaaaaacgatctaagaaaatttcaggagatggcgttaaagtaaatagaagtcccgtgctctcgagtaacttgccaccagtcgcaatttcatcggcagcagactttcggtgggtccacccacatctcgacatttttagtaatcatatcgtgctcaagaaaggttacatctttcaaagacgaacgttaaaaggctataggactattcagggtctacaactcaatgctctcacccgagtagagcatcgcgctgccgtagaaaagctactcacgcgaaaaggaccgctatcaatggcttttggagcttttgcgcaaatgcattaccataatcccaatcaagtattttcaattcttgctgacgtccttagaaccaaaatcagtactgcgtacgaagccattccgtag

SEQ ID NO: 85960 - DNA, 1371 bp, Cronobacter sakazakii ATCC BAA-894
atgattgaaagtattgttttgcatgataaaacgcttaactttattgttcctagtgaactagtaccagatacaaatatattcacagtcattaccggtaaaaatggtgtaggaaaaagtagacttcttagcatgatagcctctcatttttcattttatcacaatgaagataagttcgttagagaccgtagagaaaatctcgaaaaagaccattatgaactcaagtatatatcttcgcctaaaaaaactattgcagtcgcaaccagcgcctttgacaagtttcccgtcccaaaacgccgggaggttataaatgagtattcatatttaggtttgcgcgggctaccaagctttgatttaagctctgaatatatatcaaaaataacctttaaacttatatctgcagtgttgaatttagagctagacatgagcagaattggcaatgttcttaattacctcggctactacgatgaaatagagattcaatgcaactctcgatactcagaagctagactcaaagaaatattcagttctgagaatatttacgaagcgttcgaaaggtattttctaagaggtgtcatgccatatggctcaataaataaaaacttatttatcaatgaagatggaaacatttcgaaggaaatggttgattgtgcatttaatgcaatgttaaaacatgaaaggaaaagaatcggctcatcaggaaccataataattaataaaaacggagtaaaacttatcaatgaagaaaatattcttgattcagaatttatgttcctacttgaatcgggaataatatctacacgcaatgtcaacttaaggaaaaacaattctagaaaaacttttagcatgcgaaatgctagttccggggaacaatgcattttaatgagcctccttggcatagctagccaaatcactgacaactgccttatttgcattgatgaacctgaggtttgccttcatcctgaatggcaagaaaaatatatctcaatattaatggatacttttaaagactacaaaaactgtcatttcataatagctacacactccccacagataacatcaaaactgaaccccaaaaattgcttcatcttatcacttcacgatgaaaacactcatatcgcaacctctataattaatcgttcaattgattttcaattggcaactctttttagagctcccggatataaaaacgaatatttaaccagggagttagttaatttcttggcagatctcactaccacctcacacattgacagcagcaagctaattgaaattgaaaaaataataacccttaaaaatcttataagtgacacagaccctgtaaaaaaactaattactttggcagaaaaagcgattaaggaagcaagggcatga

SEQ ID NO: 85961 - DNA, 696 bp, Cronobacter sakazakii ATCC BAA-894
atgataaataacgctgtaagttacaatgctccttatgatgcttttatcagcacatttaaaagtctaactgctgaagaaaaagaaaattattgggacatgaagggaaacaaagatctagatgctatcaaaaaacacataaaagactactatctaatagtacaagattacaaatgcccgtattgccaacaaaaaataattgtaactcacaatggcgcatgggataccgagcatataatacctaaagacacacatcctgacttcatgtttgagccacaaaacctttgcgtctcatgtaaggattgcaatggtgaaaaatcaaataaaaatatattaaaaagcagaaaagcaatacgactacctaaacaatcaaaaaactatataataatacatcctcacttcgacaattataatgaccacattaaaatcattgattcatccctttattttttaccaaaaacagataagggaagaaaaactgtagaagtttgcgggttgttacgtttcgtttataagtattctaattatgaaaatgttgatttagcgataaagcaaggaatatcaaagtttacgcaagcccttttagacacatcagatccagctgaagagcaactttatctttcgttcatagaagatttaactaagcgaggcaaggagctttcaaaatcagcattcctaagaaaatttggagagaaataa

SEQ ID NO: 85962 - DNA, 1773 bp, Lysinibacillus sphaericus C3-41
atgactattgttgttggggaggtacagatggaattatttagacagtttattgaactcagagaagaacaggaaaggttaacaaatttaattaacgatatccaggaaaatggttttgaaataaatttcattaagaaaaagatttatctatataaaaatgggattgcctatataggtttagattgtcaaaatatagagagagaaaaattgatttcagtttttttgattaaagaaagtaaatctagacgtatacaagaaattgattcctattttatagattattttaatgcaaatctaaaagatattgttatcaatttagaaattgaaaacctgtttttagaatcaaaagcttatttattagaagagttatttatgttagaacaattgatctcagaagatttaacagttgattttagaattaattcaattaaatttgaagaatataaatgttttaaagatgaagaaattacgtttgaagaaagaataactgtattagttggaaagaatgcaagtggaaagacaagtattctagatgcgatctctgttgctattggtgcatatttaagtgggattgatgaaagtaccgatacaaaatcaattttaaaaagtgatgttcgttttacttctaaagatgttcatggtactaaggtagtaaaacatcatgcacctacaagaatcaattttaattcagattttattaataaaagatttgattggtctagaactagatcgaaattgaaatcaacaaaattaactacaaaggactctaaacaagttgtaaatttatctagatttttatatagggaaataaataataatgatcttagaaatataacattacctgttttttcttaccatggaaccggtagggtcgcgaattttacaaaaaatatgaatcaactagagaaaacggaaaatatttctaggttttttgggtataaagattgtttaaaaccagcatcaaattataaaacgtttatttcttggtattcgaagatgcagtatagggcatttatgttgaataaaaggatagaagtattagaccaagtgactaagtgtttaaaagaaacctttgtctttttaacagaagaagataaaaataaagtttctgatgtaatatatttagagggcagtttacatttgaaatattcaaatggggatatgattccaatagagtttctaagtgatggctataaagatataataggtattatttcagatattgcttatcgaatggctattttaaatcctcacttagaaaaagatgtaataaaagcaacaccaggtattgttttaatagatgaaattgatttacatttacatccaagatggcaacaaaaaataattaaactgttaaaaaatcttttcccaaaagtacaatttgttgttacaactcactcagctttggtagtctcatcaactgaatatagagaagcaaaagaattaaaagtagttgaagaaaacctgaatgaaaattttacaatagttgctgaaataatcggagattccaaagaatggtatattcatgatattttaagaaacgtttttcatgtagatccattattgcatacacgtcttacatctgaatatatagatcaggatgaagttgatgatttaattaatgacttgaacgaatatgttaagaaatatttagttagtagagaagagcatattttaaaaaaaataaatactttaaatggaaagttgaatacttgcttaacgcctaatacacctaaaaaaagagtagttgatgctttaatggagatggtgagatga

SEQ ID NO: 85963 - DNA, 732 bp, Lysinibacillus sphaericus C3-41
atgaaagcatattatcgtaatccaaaagaaatacccaaaaagcttatcgatgatattaataaaaagaaatggtatgaaaatttaagagatggtaaaaataatattagagaccgttggaatactacacaggaagataagcgtccaattatcagagagaagctttatcaaattacaaatggatgttgcgcatattgcggtaaaaaaataaaaataagtgaaatggatgtagatcattttttaccatcacataaatttaattacttgtcttattgttggctaaattatatacctagttgtaagacttgtaatcagagttttaagcatcaatattaccctaagtctatagcggagaaacaaattattgagcattgttgccaaggaattgttgttccttttgatgcaacatataatcaaaatattttatttactgttacacaagatagaatcatagatcctttttatgatgacatttctatacatcttacttttcaaccattaacatattcttataaagctcatacagatataggaaaagagatgaataagatatttttccgtagacaagaatttatagaatatatagaaggaattagttttgcagtgaagagacttgtaaaaaataataatccaagaaatattttggatccatttattaatttatatggtagcgaattttattataatgcatattgggatttttggagtgaaagaaaatccgatggattactttaa

SEQ ID NO: 85964 - DNA, 1248 bp, Shewanella pealeana ATCC 700345
atgacgggttatattcaaggtatcaatacaaagctacctttcactgataaggtcatcaatatagatctacaaggaaagagcttaattcttactggtgggaatggttgtggtaagacaaactttctaaatcacttatttgagtatttaactaagagagttgtagagcgagagaactatgatccacttgatatacatcgtgatatttcttattactcagaggtagtcgcacaatacggagaaagtgatggtaactttgagaataataagtacaacctagagcttgctcaacaaagacttatagaccttgaagccccagtgttgtctttgaatggtttaaaaaactatattataaattatcactctaagaaggctttactaacgatatttaaggctgttcgagaagctaatattactgaatcaacttcagcggtaagcgtctcatcactcgtagagcaagtgaatagcagttatgaagaggtttcagttggttcattgtttgagcaatatctggtgagctataaaacggtgcaagcttatgctgaatccccgagtatcgataatgatcctgcattagcttctaaagtaaaaagttggtttgagtttttacaggataacttgaggtatctgtttgaagatgaaactctcgagcttaaatttgattctaagcttcaggcttttcatataaagcaagatcataaagaagcctttcgttttcaacagctttcatctggttattcttcaattcttgctgtgtatgctcatttagttacaactattcagttaagcgagataacgcctgatgaaattgaaggtgttgtatttatcgatgaaattgatgctcatttgcacgtttcattgcaacgtaagatatttgcatttctgactaagtcatttcctaagattcaatttattgttactactcactcaccatttgttgtctcatcagtaagtgatgctgtcatttatgacttatcaaagctcgaacaaattgatgacctatcaatgtattcgtatgaatctatcttagatgggctatttggagtttcatctagttcagatttattaaacgcaaaagtaaaagagctaaatgaagaggcaacaaaacttcaactagatatcggcaaggttgagtctttgatttcagagctgcgacagaatgaatctaagttggattcagagtcattatatttcttagagtctgctcaactatcagtgcttaaagctaaggcgaaaagtacagatgtttaa

SEQ ID NO: 85965 - DNA, 660 bp, Shewanella pealeana ATCC 700345
atgtttaatgtagagagaggagatgaaatccccgcttcacttgcagcacgaagaagctacaaagatgaagatgtggtaaaagcgcttgaacgtgcttttcataagaagtgttatctttgtgagacgaaagagccacaagatattaatgttgaacattttgtcgctcatcaaaataatgacgatttaaagtacgattggaataatttgtatttttcctgtgggcgttgcaataacataaagcttcattatttcaacaacctattagactgctgcgcccctgatcaggatgtgtttcgagagataaaacttttgccacctagaactcctggtgcaaggaaattagttgtaaaacgacagagtgaagatgctaggtctatacaaacagaacagcttttagagaaaatttataacagtgagcatacggttaataaagctgtcacaggaagctatttgaggaaaaaaataaatacgcagtttgcattatttcacaaatggctcaatgtatattatgccgaggatgcgctagaagctgagcgtgaagatgcattagagagaattcaagtgcttatgtctgataagtctcaatactcagcatttatcaagtggtgtattcttgatgatgaagacttgaatgaattacttggacctttgatcaactag

SEQ ID NO: 85966 - DNA, 1362 bp, Shewanella baltica OS195
atgaatattcaaaacttgaagattcacaatttcagaagtatctcaaagctcgacttgaacttgggtactgaaaacagagttgtgtgttttgttggtgagaatggtagtgcaaagacatcgattttgagtcttattgcagaggcgatagtatctaagacaaagctaaagtttcccgacttttctccaactcaacacaatggcaaaagatatcgaatgatgtgtaaatctgaaataaatagggacagcaatttttattcggtagagctaaactattcaaacattgaaaatcagtcttaccaatttaaaaagcttgtagggcggcagaaaaaccttcctgtaactgaatatcaggacgtaattcaggggatcagcttaacacatgaatattattcagaatactcgagtttatctaacttagagtatagtaaggattatcttgcatcaaatatatttcttattaggccgagcacaagatacgagaaggatcgctttgaagtttctgaagctgataccaaaacaccctcgtattctgtgggtgagcaatacaagagcgaaatgccatacccctttacagtatcgcatgcaggagaaaatattcagtcaattgttcttgatatgattttcgatgcaacaattggttataacgatgcgggtcttgccttctcaaaaattactcatatattaaagcagattacaggtaaggaattcggtaacttacaagtctcacagtcaccttatagacaggtagtatcttcgagtattggaccaataagctctttctctcaaggtgagctagatctacttgttacagtggcttcgattctttctaggcaactatttcatttcagatactacaccgaggaccaaaagaaagactcaggattgaataccttattcgatatacccggtattgttttggttgatgagatagatctgcatcttcacccaagagcccaagaaagttacataaaaacacttacagatatattccctaatattcaattcattattaccactcatagccctttcgtagtccgagggcttccaaaccattcaaaagttgtcaacttaccatcaggtagagtgtttgacgagaacttcaaagcaatggatatagatagtattactaatatcatttttggctacgatggtggtttttctgaggcagtaaaagataagctgagtcagtttaagaacgcgctagtgttagaagacccggatgttcagttgttgcaggagttgtatagtgagttatcttcatcaggctcagcaaaagaggagttgttgttgtatctcgcttcatatgctgatgagaagttaattaatacagtgaagggaaaggcagatgcggaaagtagatag

SEQ ID NO: 85967 - DNA, 831 bp, Shewanella baltica OS195
atgcggaaagtagatagagcctcagttccttttccaaatagactactacagcaaaatatgacagcagaaaatttatcccatttagcaaactataagcagattaataatagcatctacggtcatcaagacgtcaaaaataacttgcaaatgctgtattttgataagtgctatatctgtgaaggcgatatcagctctggtgattatgacgtagagcactatcttcctaaaaagcattttccgcagctaggttacacttgggaaaatcttcataaagcgtgttctggctgcaatttggcaaaagagcataagagctttttcgttactgatgacaaaggtaatgtaactgatatcaaactgctagatccatcaagtgtggtatataatatcgctgaatatatctgtttcaatatcgattcaaaggcagaaagggtaattattggtgaaaatccaatcgcgattacgaaggctataaatacgattcattacttaaatggtaactaccaatctgattatggaaaagagctttgctacttacgaagtaataagagctctgggtttcttcgtttttgtaacgagagtctcgttgaacatcgaaatcggctaagagaaattaaagttactatcgatacttatcaacctccagaagaccccgttctgctggagatagatcaaaatatctgtcaaagacttataaatgcagataatgagtacttatcagataaagcgccttttagtacttctactagagtacaactatttccaacgttaaagattacatatgatcaattggttaggataaaaaatcatatgaagcaaattctcggtatgtaa

SEQ ID NO: 85968 - DNA, 2130 bp, Bacillus weihenstephanensis KBAB4
atgattcgaatacataaagataaatattttgattcaatatatgatgaattgttagaacaagcaactcaagaaaagtatatggatgagtatttactagaaaagtttatgaaaagatactttaatggtaaatgttcatactgtgaaattcgaatgaaagagttacgactaacaattgacttttatagacctataaatggatcgttaaacacgatggatggtgaatttcatcctgatcattataaatggttaaaaaatgaagatgataatatactttcaatttgtgtagaatgtaagcgagcgaaaagtaatcgttttccagtagatggcgatgtcgcttctattaatgctgataagaataaattagtgaaagaaagacgtttattgatacatccttgtagagattatcctgaaaggcattttgattacgatgaaagtggaatggtttattataaaagtaaaaaaggcgaggttactgtagatgttttaaatttgaatcgcggtatgttggtagaaatgcgtgcccaagtatatagtgaatttaataatctttgttatttattctcaatggagcaaagtccctactatttaaagcaaattctacaagaagttcagttggattcaatatttattggtttaaaaaagtttatactttctgaatgggtaatcttaaatgagaaaattccatttcttcaagaatttgagccattattaggtaagagattgcaggaagaagaagtgagagttttatcagttagaaataataagattagtcaaattgatattgataataatatcctttatgttgataatgataagcggagaaagcgtgttcctgcaaggaaaattaatgattattacgatgtatccgacgagaacgctttagaaaaatattatggaaaacagcgttttattgaaaaaattgaaatttataactttaaaagtattagaaatatgaaaattgattttactctcagtaaaagcagtaatgctccttggctaatgttattaggagaaaatggtgtgggcaaaagctcaattttacaagcaattgcattaacactaatgggaaacgaacaacggcaaaaaattataaaaaagaaaccttatgaatatttaacaaaaggctttgatgaaggttctataaagataaaattatcaggcatgcaagagcctattagtatttatttaaattcgaattcatttgaatttacaggtgaaaatcatcaaaggcctagggttctaattttaggttatggctcaacgcgattacttcctagagaagaaatgttatcaaattataaggtgacttgggcaagaatagaaaatctatttaatccttttattccattagttaatgtaagagagtatctcttatctttaaataatgaagattttaataatgttaaaaaagctattgagtccttatttttagatgaagtaataattgatcgggatcagatatatgaagaagtatattttggatttgcgaattcttacagtaaactagaagatttaagtgatggctatcagacaattattgctctggctactgatattatgatggttatgaagaatagatggcgaaattttgatgctgaaggaattgttttaatagatgaaattgatgcacatcttcatccaaggtggaatatagaaattgtttctcgattaaaaaatgcttttccgaaaattcaatttattgcaactacccataacccgctatcacttcgtggtttaatagatggagaagttgcagtattactagaaaatgaggaaagagaagcgtatattactcaaaagttaccttctcaaaaaggatttaatgtagaaggattattaacttctaaattttttggattgtatgacaccatgccagatttaaatgaattatttgatcgatattatttacttttatctaatcctagtcctaatgaaaggcaaaaggaagaaataaaaaatttacaagataaattgtcaaaatatgaaaaagtaggtaccacattaagagaacaaaaattctatgaagcagtggattactattttgcacagtacagaaaaaataatgtggaattaagtgatgaagagtttaacaatattatagaagatgctattaaatattttgaaaggtaa

SEQ ID NO: 85969 - DNA, 888 bp, Bacillus weihenstephanensis KBAB4
atgataaaagttcaaagagaagcagaaccagctgtattaaatctaactgactcagattctattggttttaaagaattggaagcggcaaaaaaaactacttttacaaaagatacgaaatttccgttcgaggcatataaggatgaaagtgtaaaaaatcttttaaaaaaaatgtttaatggtaaatgtggatattgtgaaagtattattaatgtgacttcgtatgaagaaattgaacattttagacctaaaaaagctattaatatagaaggtatacaaggattgacttatcctggttactattggttggctatgagttggaataatttgttgatttcttgtcaaaggtgcaataggtcgcataaaaaaaattattttccaatagaaaacgaaagtaatcgtgcaaaagctcccggtgaagaaagtggagaggaggtattactattaaacccttgtgaagatgacccgagtgaacatttggaatttaaggatacaggtattattgaatttaaagagggatctaaaaagggagaaaaatctataaaagtttatgctcttcataggagagaacttactgaagaaagagcgaaagttgctaaggatattgagctgaagaaagtacaaatacttgacggattaagtactctaaaggtgcttttacgctatcaagaagatagtgatcttcaaaaagagattgaaaaaactgtatcaaatataatatcattatatgattttatatttgaatatgaaaatgatcctaacaggccttatcaggcaatggtaactcagattacttcggattttctgagtgaacgtaaagaattaatcaataaattgaagacaacatccaatcggaaaaattcctgtgaacaaagtcatatttcaagttaa

SEQ ID NO: 85970 - DNA, 1374 bp, Caulobacter sp. K31
atggtgacgttttcaaatcttatcgactccgcaggctcggatagcttctattcggtgatcatcgggaacaacgggacgggcaagagccggctcctcggcgccatcgccagcgagtttgccggaatccaccaaagcgacgcgagtggtcgtggccggcgcccctctcggctgggggttctcgattccattattgatggagacctaagctcgggcctcagcccaagcggtagactgccgtctcgcgtgatcgccgtcgccctcacccccgtggacaagtttcctctggagccatccggagacggcggcgactttcctctcggcgaaatcgccgattcccgcgacgatgtttcgttctatcactacgttggtatgcgcgaccgaaccaaccgcgcgtccatttccgcattgatctaccgcgccgtggaaggccttggtcggcgacaaagcttggagaacgcagcgcgtcttcgcagcgtatttgaaatgctcggctaccagcctcggatcactaccaggctcaagctgtctctgggccaagacgtccaagactttctgcaggggcgtcgaggtatcgaaggcgacgacgctgacgcgcgcctgatgcagcgcattcgcgccttggcggcgagcggtggctacagggaacgagagcttcgcgcgaagcttggccagttcatcgagacttggggcactaaaaccaagctggagctggagttggatttcagcggcgaggcccccccgccgtccttcgatgtcgaaacgctccgattgcttcgccgcctgggtgcgctgagcctttcgtccgtggacgtctggcgggcagacggcgtgcgtcacgatcttcgcgacgccagttccggccagatcggaattctcacggtatttctgtcgatcgcggcgcatcttcgagatgggagtctagtgctgatcgatgagcctgaaaccagcctccacccggagtggcaaagtaagtatatccacctcatgcgggaggcgttcgctgattactcagggtgccacttcatcttcagtacgcacagtcctcacatcgtcgccgacatcccccaaggctcgtggatctattccatggacagagccacaagtgtatcaagcgaagccctgctaggccgttcaccagactttgtcatggcgaacgcgttcgatgttgtgggcccgaccaactattacctgcgcgacgttctcgccgacgcgttgcgtctagtgggcgagcgtcagatcaacagcgacgagttcaaggcacaactcgccgagctggtccggttggccgcgaatatggaaggcggagaacaggtcaagcagatcgtgcaggatcttcaggttgcccaggcggagctggctcccgatggcggttga

SEQ ID NO: 85971 - DNA, 624 bp, Caulobacter sp. K31
atggcggttgagccgatcgcgttcaccgatgaagagctagagcttatccgagttctgaccgagcgaggcgaggggtgggattgcgccgagtacaatcccctgcgatctcggattaagcaattctacctcaagggtcaggccttccgttgctgttactgccaaaaacccaaccccgtgcagcacggccgggcttgggacatcgagcatgtgatctcgcgtgcgctcaacgccaccttcatgttcgaaccggagaacttggccgtctcgtgcatcgactgtaacctcgctaaacgcgatgccgacatcctggccaagcccagacggacattcccccggaattccgacgcctatacgatcgtccatccccactttgacgattggggtgatcacttcgtgcttggccagatcgtctatgcgccaaaaacggcaaagggcgccgagaccctcagagtgtgcaagctctggcgattttacgaaatgatcggacaggaatcgcttctcgcgaccgatcagcgatacgtcgaattggcggagcgagtgcttttcgccaagacgccagtagaggcggagccttcggtcctcgcgatgcgcgcgctgatccaggacgcgaaagacggtgcttag

SEQ ID NO: 85972 - DNA, 1248 bp, Shewanella halifaxensis HAW-EB4
atgactggttacattcaaaatattaataccaagattcctttcacagataaagtcgtcaatatagaactacaaggtaagagccttattcttactggtggaaatggttgtggtaaaacaaactttttaaaccatttgttggagtatttgacggagcgggtaattaatcgaaagaatgcagatcctttagatttacataggcgtataaattccctatctcaatctatggctcaatacggggcaagtcatgaaagctatgagggctggaaaagagctctagagatagctaatgacaaattatttgagctcgaaaatccaattctgtccttaagtaacctagataattatgtagtgaattatcaatctgataaagcattattaacaatgtttaaagcagttcgtgaagccaaaatcgctgaatcaacttcggctttaagcacctctaaccttgcagatcaagtaacaaataaacgtagagggtcttccgccgggtcgctgtttgagcaatacctggtgagctataaaacggtgcaagcttatgctgagtccccgagtatcgataatgatcctgcattagcttctaaagtaaaaagttggtttgagtttttgcaggataacttgaggtatctgtttgaagatgaaactcttaagttgaggtttgactctaaacttcaaactttctttattcagcaagaacataaggaagagtttcgttttcaaaagctttcatcgggcttctcttctatcctagcagtgtatgctgatttagttactactattcaattaacagagataacgcctgatgaaattgaaggtgttgtatttatcgatgaaattgatgctcatttgcacgtttcattgcaacgtaagatatttgcatttctgactaagtcatttcctaagattcaatttattgttactactcactcaccatttgttgtctcatcagtaagtgatgctgtcatttatgacttatcaaagctcgaacaaattgatgacctatcaatgtattcgtatgaatctatcttagatgggctatttggagtttcatctagttcagatttattaaacgcaaaagtaaaagagctaaatgaagaggcaacaaaacttcaactagatatcggcaaggttgagtctttgatttcagagctgcgacagagtgaatctaagttggattcagagtcattatatttcttagagtctgctcaactatcagtgcttaaagctaaggcgaaaagtacagatgtttaa

SEQ ID NO: 85973 - DNA, 660 bp, Shewanella halifaxensis HAW-EB4
atgtttaatgtaaagagaggagatgaagtccccgcttcacttgcagcacgaagaagctacaaagatgaagatgtggtaaaagcgcttgaacgtgcttttcataagaagtgttatctttgtgagacgaaagaaccacaagatatcaatgttgaacattttgtagctcatcaaaataatgatgatttaaagtacgattggagtaatttgtatttttcttgtgggcgatgtaacaacataaagttgcagtatttcaataatctattggattgctgtgccccgaatcaagatgtgtttcgagagataaaactgttgccacctagaactcctggcgcaaggaagttagttgtagaacgacagagtgaagatgctaggtctgtagaaactgaacagcttttagagaaaatttataacagtgatcatacggttaataaagctgtcacaggaagctacttgaggaaaaaaataaatacgcagtttgcattatttcacaaatggctcaatgtatattatgccgaggatgcgctagaagctgagcgtgaagatgcattagagagaattcaagtgcttatgtctgatcagtctcaatactcagcatttatcaagtggtgtattcttgatgatgaagacttgaatgaattacttggacctttgatcaactag

SEQ ID NO: 85974 - DNA, 1248 bp, Shewanella halifaxensis HAW-EB4
gtgcactttaaaaaattggaaataaatcattggcagcaatttgaaactgtcgacctagcaatacatgatcgattaacgattattacaggatctaatggttgtggtaaaacgactattttgaatttattttcaaagcattcaggttggcaaaatatttcgttatctacgccaaaaaaagattcaagtacaggtgttgttaaatatttttctagattgtttaaggggaatactagtgaatcaaacaataccgtcggtaaaatacactattcaaataatgtagaagcccttctactagtaaaagattctgatgttgctcagtatcatgtacaaattcagaatcaacagccattaaaaagtttctttataccttctcatcgtacaatatttaggtaccaagctcttaaccatatacctactgctaaaaaaaataaacagaatgcatttgatgaggtttcaaatgcaaacaagcaaaggtataacggtagttcaagtaatcagtctgctagttttttaatgaaaactacgcttattggttgggctataaatggttatggagtaacgaataataataaaacaataatgcctcaggacaatgaacaaattaaattttatgagggatttcaggaagtgcttagaaaaatacttccaaaaaccttaggtttcaaagagtttgaaattagaaatatggaaattgtttttatttgtaatgatggttctgatgaattcctattagaaacggcttctggcggcattagtgctcttatcgatattgcttggcaaatatatatgtatgcaacaaaagataatcctgattataccgttataattgatgaggttgaaaatcatcttcacccaataatgcagagaaggatattaccagatcttttacaagcattccccactgcgaagtttattgtatcaacacatagcccattagttgtaggctcagtaaaaaactcaaatatatatgctttaacttataatgaagaaaataaagttgagtctaaaaaattggattttttgaatgaagctaaaagtgctagtgaaattctagatgaggttttaggggtctcatttacaatgcctatatgggttgaagaaaggttaaatcaaataattgatgaatacagtaataaaaaattaactgaaagagatttctctttgttaaggagccagttggcagagttaggcttagagaaaatggttcctatggcaatacaaggaatcatggagggacaagatgattaa

SEQ ID NO: 85975 - DNA, 582 bp, Shewanella halifaxensis HAW-EB4
atgattaagctaaatagacctgtgtgcccgcaccctgatgcattagctagaggaaactataaacacccggcgaataaagaggcacttaaggctgctaactctgataaatgtatgtattgtgaaagcaaaatatctcaaattagttttgctgaaattgagcacttcaagccaaaagataatgacaaattccctcatttagaattcgtctgggaaaatttaggctactcttgccagaaatgtaataaccaaaagtctaacaaatttcataatgataccccatacatagatccttatcatgatgaacctgccaattacttttatgctgcaggcacgtggctatttgttaaaaatggttgtgaaagagcagatctttcaatacgtgatattggtttaaacagaccagagctactagagaagcgtcttgaaaaaataacagaaatacaaaaagcaatcacagcatgttatcgtacaggtaatgttagtttaagagactttgcactagcagaattaaggagagaagcagaaacaaaaaaagaatattctttttttgttaaagcattaatcagtgcacatgcggtatag

SEQ ID NO: 85976 - DNA, 1338 bp, Methylobacterium sp. 4-46
atgtacgtcaccgagttgaggatcgagcgggcccgctcgatcaacagtttctcgatcagattgccaccagatcagtatgccgggtggcacgtcatcctgggcgataacggcgctggtaagtcaaccttcgtgagggcgctggccctcgcgctggcaggcccgaacgaagcaaaggctctgaggtatcccttcaattcctggctcagggagggacaggaaggcccccgcatcgatctagccgtctttgccgaacctgagacggatggtctcgacgggggagggcgcagaccgcagggaaatcgcctacgcggcggggtcgaactcgtgatagagcaggcaggcttcaccagctccgttcaggtcaactcgatcgccggctctggccccggggggcctctctcaagaggtccgtggggtaaaggagcgggttggttctccgcgtcgttcggaccctacaggcggtttacgggcgggaacagagactatgaccgtctcttcctcacagctccgaggctagcccctcatctgtctgcgtttggagaagatgttgcactgacagagtgcctagagtggctgaaggaactgcatgttctcgatttggagccgatcccggatcgctccggcgatttgacccgggggctgctacctcacctgaccgcgttcatcaacggcagcggtttcttacctcataacaccaggttgaacaaggtaacatctcaggacatctcattcatagatggtaataattccattataactgtcgaacaactgagcgatgggtatcgatccgtcctcagtatgacattcgagctgatcagacaattggtcaggttttacggagcagaccgcgtaacacgtcggattcgcgaaggaagcatggagatcgacctccccggggtcgtggccattgacgagatcgatgctcacctgcaccctgcgtggcaacgaaagattggcccctggctgcttcgcgtcttcccaaacatgcagttcttcgtcacaacgcacagcccgattatttgccaagcatctacaaagggcagtgtttggagattacctaccccaggtacaaatgaacaaggccttaaagttgaaggtgatgcattgcgcaggttaatatttggaaatatattagaggcatacgatacaacgtttttcggagagggtatcggtcggtcggaagcgtcgagagagcttctggagcggttagcccgcctgaaccgaaaggccctcaagggcaccctcacagccgaggaaagaaccgaacgggatgatcttcgtgccgctcttccaactacctccaccgtggcgcagcgcacaggcttgccggtcgaatga

SEQ ID NO: 85977 - DNA, 807 bp, Methylobacterium sp. 4-46
atgatccgcctgcccgaccgccacttgacccagcgcgtactagaggggttggcacgtcttcagtccgaggtggacaagctaactgcttacgaagacagggttcagcacgcaagagcgttgtttaaggcgagcaacacgcggactaacccgacatttcgtgaaattagaggtgctctcgacgagatttgctctggcaacagacgttgttgttactgtgaagactcctacgctgatgaagtagagcatatattacccaaagatctgtatccggagctgactttctcttggttgaactatttgtacgcatgtggcccctgcaacagcccgaagggtagtcgcttcgcgatcatcgaccagaacggagctcttatagaaataacacgcaagcctaatgacccaattgttccgccgccacatgggtaccctgcgctcataaatcctaggactgaagatcctttcttctatattgagctggatctcattgacacatttatgtttctgccaaacgaggatttggacgaagttaattatctaagggctgggttcacaattcagctgctctcactaaacattagggaggtgctcgtacagtccaggcggacagcgtacggttcatacagggctcgtttatacgaatatagagataagaaagcacttggatcttcacagcaagaattgaatgcgttggcgcaggggatcaaatcgatgggtcaaccaacggtttggttcgagatgaagcgccaagcggtactgatcgatgaattagaggatttatttggggagatccccgaggcgctgagctggtag

SEQ ID NO: 85978 - DNA, 2211 bp, Burkholderia cenocepacia MC0-3
atgcgtcgaatttcgcgtccgatcgagccaccacctttgctaatgtcggagcaggtgttggaggaaaagaaaaaaatatgggattatctgcgtcgggacagaaaagatcgtcttcagcgtcgagatggccttaatgatgatattttctttaaccacgagtttcgacgtgatctctggcatattttttctggaaaatgcgccttctgtgaatctaaggctgacgacgatggtcaggtgcttcatttgcggccactcagatttgcaagcggcgatacgaattcagatagggattactatctttggttggcttttgagtggcgtaatatattttacgcctgctcgttttgcttaaaagcgaagggaaatagatttccggtctccggaaatagggccatttatctcgcatcatttgatgatgcggttcggcaggagcaatctctgctccttgatccgacgactgaagacccagcaaagcaccttcgatttttgtatgatggaagtgttctgcccgcaacggagcgtggtgaagacactgccgaagtgtttcagctgaatcgagagaatttagtgcgtgacaggcaggggcttgtcaggaaagtatttgatttccttaaatcggatgatccgaattacgcatcaatttccctggagagtttgctattcaatgatgctgctcatgcaggtttccttcagggaattcttaagcgcatcgattccgcttggcgcgtggcagagccacccatcaagggcaatggcgaagcttttgttcgtcggtttcttgacgtatggagcgaagcggatcaaggacgacgatctcaaatacacgctgttgaggtgcagatacaagatgcagatcatcgatctcaatttgccgcgcaagagcaattcgctggatctatattggagagaacgcccagtctgctaatctcagggtttcaggtggtcgatcgcgaaatatctcgaattgaggtatcaaattttaaagcgattgacagcctggagttgaatttgcgttcaattcgctcggagcgatcgggtactcccgcattgatgattctcggggaaaactcgacaggcaaatcgagcttgttgtccgcaatcggtcttgcgttgatcgggcgccgagaagcttcaaagttgcgcagatttctgccaagtcttgtgcggagcagcgctactgatcgttttgaccaacttgacgcaccgcgcgtagcagtggatgtcaattttcatttttcgtcacacacagcctcttttaaatacgaccctattcgtcgtctagttgatggaaccgaggaccaatcaacgatagttctagggtatggtcctcgccgctatttttccccaaagaagcgtcatcacgcgaccggagcggcggcccgcattcgcacgctattcgatccccttgctacgatcccgtacccggccgactggcttcgcgcgcagacgggcgcccgctttgacaccatcgctagcgcgcttcgtattgttcttgcactcgacgatgatgatgagttgattgtagagccggattatctcgccgtacgcgcaaacggtcggacaacgccgatagattcattgagcgaaggatatcgctccgttttcgtgatgacggttgacattatccgcgagctccttaaccactggcaaaacctcgagcaggcgcaggccgtcgtgttgattgacgaaatcgagacccatctccatccgcgatggaaaatgcaggtcatgacatcactacgccgtgttttgccgcgtgtacagtttattacaacgacgcatgacccgctttgtctgcgtgggatggatgacggcgaagtagtggttcttcaacgtgacagcgaaagtgccattcggcaactgcaggaccttccgagcgtaagtgggatgtccgcggagcagctcctgacttcagactatttcggcttggcgagtacagctgatccgtcgaccgaaattcagttcgcgagactcgcaggcgatgttgcaaggcgtaaccgtgacggagttctcgaactggcgcctgcaatggaaacgatggaactcgtcaatcgtttgacagttggcgacagtccaacggagcaaattattcaagaagccctcgttagatacctagctgagcgcgaaagccggaagggagacgccaggccggcattgcgtgctgaagcagttgaagcagtcataaaggctcttcgatcgagcgagggataa

SEQ ID NO: 85979 - DNA, 900 bp, Burkholderia cenocepacia MC0-3
atgcgattcgtagaccgcgcgagcgtagacgaaccgaggtcgcttgcagatccaagcgcagctgtggccgccgaaataaacgaagcgcagctgcactatcggacatatgatccacttgataatgacgctaaggcattcgattttaaggaatataaaagctacgacgttcaaaatcagcttcggacactctttcacaacaagtgtgcatattgtgaatccgatctgggtgacactcttgaagtcgagcattttcgcccgaagggaggtgtgactgaagatcgggcgcatttcggctactggtggcttgcacatacttggaccaatctcttgccgtcttgcattccgtgcaatcagaagcgataccaacatcttgtaacggaggagatgactgtcgacgagctaacaaaactgttggcatcaaaagcgaaggtagcgtacgggaaggcaaatcactttccaatcgccggaattcgtgctcggtgtagcacagatatactgcacgacgaacgtgcggagttgatcaatccaacgttcgatgatcccaccatatatttgaaatggtctacgtcggggcactatagcgttgtgattcctagatcaagtgacgcagatggaatcgctcgtgcgttgagtacaataagtatcttcgcgctgaatcgggcacgccttgtggaaagtcggacgcgcattttgaatatgctccgctttcaagcgcagaagatgttcgaaagtctcgagcgcgacatggtggcgggcggggcagaaaattacctcgaccttgcgttagaacgtgttgaaataatgagacaatttcatgattccaatcaaccatactcggcgatggtgaaagagtttgttgatggcgtggtcgaacaactgcagagacgagttgcgcgttaa

SEQ ID NO: 85980 - DNA, 1512 bp, Clostridium botulinum A3 str. Loch Maree
atggaaatttcaattaaaaaaaatgataaatttagaattactaaatttatcattgatgaaataaaaattatatcaacgggtaaatttgaagacactagtaaaatatatacaagtgttgttattggagaaaatggagttgggaaaagtattttacttagtaaagtagaaaatatttttaatcatatatataaaataattaatatggagagactgccttatatgagaaatactatatcatatgagttagaatacaaattagatggaaatatttataaggcactttattcaaataatgagatagaattctatatagatgatataaaaattaaagataaatcattatttaaaatacctaataaggtgttatgctgctcattccaaatgaatgacaaattcacatttagaaaagaaaataataaagaaatcattaaatatttaggaattaaaactactcctactatgacaaatacatcatctatatctaaaaaaatatgcaataatattcttgattgcattaataactttgaaaaaactgaatcactaattaaatgttttgatttcttaaatttagaaaaagaaatattaattacgtataaactaaaacaaatacagagattttttgaacatgaaataacaattgatactatagtagataaaatagaaaatggaatgtggaaaaatagaaaaagtgcagcgtttggaaaaggaatattagaagaaataagaaatgataaagaaatgctttcaagactagttaggcaaatatatatatttatgaaggaaagaagaaaaggaaatgagatgcgtttaagatttaagttaggtgaaagatatagttattttaaggaatatattgatttagaagcccttgaaatattgattaaattagatattataagcaatcctaatattaaggtacaaaaacaaggatactatgatttagaaagaggtagctctggagaattacatattttatttttactaactaatattttatcaaatttagaagaaaactcattaatcttaattgatgaaccagaaatatcactacacccgagttggcagataaagattattgggttgattagaaatatcttagaggaagtaaataaatcttgtcatattatgattgctactcattcacactttacagttagtgatttgcaaccaagtaattcatcactacatatacttaaaacagataaatacacaggcaatctaatatgtgaagaggtaactagcaacacttatgggtggtcagccgagaatatacttcttaatgtatttggagttccttctaatagaaattactatctaatacaaaaaatagacaaattgttatctgatgtttccaatggaaatattaaatcagttattaatgaaaagaatgaattacaaagtatagcatctaacttattagattcagatccattaaaagtaataatttataaaatgataaagagagcagaaaaggattataagcaagacaatgagtatacaaatcccatataa

SEQ ID NO: 85981 - DNA, 1203 bp, Clostridium botulinum A3 str. Loch Maree
atgagtatacaaatcccatataaaaacagtgcagtagatagcgatttaaaaaatggaactgattggacttctaaagatgctaagtatttaaaaataagaaagaaattaaaagattatttatgtgatataaactctcaatgttgttttttttgtaaatcaaaaatcaataccggtaatagtaatggaactattgaacatatattaagcaagagtgaatatagtatgtttacatataagcctgaaaatttaacatattcttgcatacggtgcaatttattaaaaagtgcttctaaagtactaacagatgaagaaataaagaaaaaaatgaactatacatataatacttatccatttgaatctaagtcttttaaaatcatacatccatatttagatgattatgataaatgtattactttagatgatatattctacaaaggaatagatagtgagggtaaaggtagtaacactataaaactttataatttaaatagacttgaattagcagaaaataagataaaaacagagcctagcgcttttattaatcaatttttgcatttaatatctaatggatataatctaagtgaggaagaaatagaatcacatatagactttatatttgataatataaaagataatgcgataaatatttctcataggcctattacatttatagaaaagtttcttaatacaaataaaaaaaataatgcaaaactaattagtgctatcaatatactagatttaaataaggtggatatatttaagcattatagaattatgatcgatgaactggaatcctctaagcaatatgattatataaaaataataaatagtacattttacaatttggaagaggaaacaaaattaatcaatataacagaagaagttttaaagacaatttcagctttaacgcggagctcagaaagatgtgaggaattagaacttataaatattagtcatatgtttatgatgataactaaatttgataagtattctaataatgaagaacttaaaattaaagtttcaatactaaataaacttgcttatctatgtatgtgtattggtttttataataaaaatgaaaatcaaaatgtaattaaatcagaaccaaatacaaaaagattaaaagagaaaataaaaaaagataaggagtatttaaaaatattaaagcaagaattgaaaaatgctagaagagtagcgcaatga

SEQ ID NO: 85982 - DNA, 1359 bp, Escherichia coli SMS-3-5
atgatgaatatccgcacgcttaagctcactaatctggggcggtttgaagaacttgaagttcatctggctccagtggaggagttcaagagcaatgtgaccgtttttattggtaataatggtgcaggtaaaacatcaatattaaaatcgttggcaaccagcctgagttggttcgttgcccgagttcgtactgaaaaaggtaacggtagccctattcctgaagacgctattctgaacggtaggagttcggcgacaattgaacttcaggtactgaatacgcatccagcgacggaggccgctacgccctaccgttggttgcttgccagaacggccagtgggaaaaaatcgaccaccgcctccagcctgcaagaggccagccaattggctgcgttttatcgagatcaatacacccagaatagcggggcatccttcccgcttatcgccttctatcccgtagaacgtgtcgtgctggatgtgccgttgaaaataaaagaacgtcataattttttgcaactggatggctacgataacgccctgaatcagggtattgatttccgccgtttctttgagtggtttcgcaatcgcgaagatgcagaaaatgaatcgggcttaccccaagacgttctggataagctcagtaccaggatagatctcgataacaccgtcttaaatgcattaacggcaatcatggcctcgtcccgggatcgccagttgaccgccgtcagaacggccattagtcgctttatgccagggttcagcaacttacgcgtcaggcgtaaacctcgcctgcatatgtcgattgataaaaatggccagacactgaatgtgctgcaattatcgcagggtgaaaaatcactgatggcgttagtcggcgatattgctcgccgcctggcaatgatgaacccgatgttagaaaacccgctaaacggcgagggaattgtattaattgatgaagtggacatgcacctgcatccaacatggcagcgtacaatcatccagcgtctgacgacaacattcccacattgccagtttgtcttaacaacccactctcctttagtgatcagtgattacaaagatgtgctggtttattctctggataatggcgaattaacgcagctcccgtctctgtatgggcaagatgcgaatactgtgcttttgaatgtgatggatacggatattcgcaatgcgacagtggcagaaaaacttaacgatcttttggatctgattcagaaaaacgactttatcaacgctaacgctcttctgaatacgctaagcctggaacttcctgaaaaccatcttgaactggtgaaagccagaatgcttctgcgcaaacaggaaattaaacatgcgcgaaataactaa

SEQ ID NO: 85983 - DNA, 660 bp, Escherichia coli SMS-3-5
atgcgcgaaataactaaagggcaaccgccggccagtttgcaacagtgggtgagagcaaaaccacgggataaaaatgccaatcagtggtttcaggaactttatgcgcaaaaaaaatgggatatcgttggcgatctcagccagcagtgcgctcaggagcaattttatctctgtgcttattgctgcgatcgcgtgacaggtacaaaccgcgataccgttaatgaacatgtcgaagccagggatttagctcctgctcgcagtctggaattcacgaatatcgttgcaagctgcaaaacaaaaggccagtgtgacgactcgcataagaaccagccattgctgttaacgccgcttatgccggaatgtgaaaccgagtttatcttcaagatcagtggtcgaattgaagggacgacgccgagagctatcgatgcgattaaggtactcaaccttggcgatagtgaacgtaataatcgggcattgattgaaaaacgtaagcagctttccgacagccttctgtgggctaatggcattgacccttcagaggggcttgaggatgacgacctgctgcaagcggttatcgacgaattactcacccccgtcgacggttatctggcacctttcgctcccgtggtggcgaatattctaaaaaactggatgaccgcatga

SEQ ID NO: 85984 - DNA, 1314 bp, Exiguobacterium sibiricum 255-15
atgattatcaaagaaatcacaatgaaaaattttcatggatttaaagaaaggcatattactttttcagatcaatttactgtcttagtagggaataatggtacgggaaaaacagcagtactggatggattagcagtagcactaggatcctatttaagtgggttaaacggtgtccactctagacacattaagcgtgatgaaatataccgtgaaatatatatacatggtggtttgtctgatatacaaatgcaatttccagtcacagtttcctgtagaggatatgttgaaggagaatatttagagtggtctagatctgtgaattcggaaaagggatcgaatactagtaaagaagcaaaaccaataatggagtacgcatcaaaaattcagtcgatggtcagcaaaggacaatctgctattttaccagtgatttcttattatgggactggacgtctatgggtacaaaaaaaagaccaaaatgaaaagcaaaaaaagagtaacagattagaaggttattcgtattgtttagaccctgcttcccatgaaaaacatttcttgaagtggattgagaaaatgacttatatagaattgcaaagaaaggaagcacctaccgtacttagtgcggttaagaaggcaatttctacttgtatgaaagattgggaaacgcttgaatttgatgttgactctgaagaactgagagtaatcggaaaagataataatgcaatcccttttagattacttagtgacggtatacgtaatacgataggtttggttgcagatcttgcacaccgaatggcacaattgaaccctgctttaaaagaatcagttgtggagttaacaccaggtgttgttttaatagatgaattagatttacatctacatccaagttggcagcgtagaattattagtgatttaaagcgtacatttcctaaagttcaatttataactactactcattctccatttatcattcagtcacttgaagagggtgaactaagaagattacatgaggaagatgatgatgaggttgttagtagagaagagtttgtgaacagaagtattgaagatataactgaaaatgttatggaaattccgtatgttcaaagaagtcaaaaacaaattgaaatgtataatgtagctcagcaatactataaacttttaaaagaagggaaaaatatttctagcgatgaagtagagaatataaaaaacaaactggatgatctagaatcattatatagtgaagatatagcgtactacgcatttttacaaatggaaagaaaggcagctggattggagagagaagaagatgagaccaattga

SEQ ID NO: 85985 - DNA, 708 bp, Exiguobacterium sibiricum 255-15
atgagaccaattgaaagaggatctattcctttagatagagaccagaatgagatcgagttcaatttttatcaacaatccagagggcatttactaactagattaggaagctactgttcctactgtgagagatatcttggtggaaatatcgcagtagaacatgtacgccctaaatcaaaggaatccaacttagaattagaatgggacaattttctaattgcatgtaataactgtaattcaattaaaggcgatagatccattgaattggataaatatttatggccagataaagataatacaactttagcgtttatttatattacaggtggattaattaatgtttctccgaatctgaatccagaggttattgaaatagctgaaaatacaattaaattaacaggcttagatcgtgttccgagtgatgatccatttctaaatccagaaatgaaagataggcgttggagcgagagaagaacagcctttgaaaaagctgaacgcgctaagagaaatttatttgtgaataacaccgaatcaatgagagaacaaatcgttgatacagcactttctacgggttttttttcaacttggatgactgtctttctacatgatatagacatgcttaaaaggtttattgatgcttttccagggacaagtaaagcttgctataattcttcatacactccaataacaagagtgggaggaactttgtaa

SEQ ID NO: 85986 - DNA, 1245 bp, Nostoc punctiforme PCC 73102
atgttaaaagaacttcacctccaacaagttggtcctgctgcccattttgatgtcgcatttgctgataggctcaatatatttacgggtgataatggtttaggtaaaagttttttactcgatattgcatggtgggtgatgactacaaattgggcggagcaaccagcgtacccacagcgagtcaaaggtgaaaatccacaaattacagccgtagttagcaataaaaaaaatataagagagtatcagagccagtttgatttttctgaacagcaatggcgtaatttacaaatgccgcctttattaaaagaagtagttatttatgtgcgtgttgatggtagtttttctatttttgaccctgctcgccaacgcgatattgcttataattttaatccaaatacactttggaatggattaaagtcaaaagataaagttatttgtaatggtctaattcaagattgggttacatggcagaatcaacccaataaatatccatttgaactcttttctaatgttattaaaaaacttgcacctcacccttccgaatggatagaagtgggagaaacaacacgagtttctattgaagacgtgcgcgatattcctacagttaatctaccttacggtaacgttcctgttactcaaacctcagccggaatgaagcgtattttgggactagcttatttactagtgtggacttggtacgaacataaaaaagcttccgaactgcggcaacaaaagccagtaaatcagatagttttactaattgatgaaattgaatctcatttgcatcctcgttggcagagggtgattttaccagctattttatctgtggtgacagaattacaacccaggatgaagatacaggctttagtaactactcattctccacttattcttgcttctttagagccaaattttcatgagcaagaagataaactatttttatttaaattacaagatagcgaggttagccttgacgaagtaccttggtcaaaacaaggggacatagttggatggttaacctcagacatttttggactcaaacaagcccgttccaaagaagcagaaatcgcaattgaagcagcagaggcttggatgcgtgatgatgatatgaatacgtttccagaaaatctgagaatatcaacacaaattcatcaggaacttcaaagagttttaccaggacatgacccattttggccccgttggatagttacaacggagaaaagaaattctgggttatcaggggtataa

SEQ ID NO: 85987 - DNA, 582 bp, Nostoc punctiforme PCC 73102
atgatgccatttaatcctcctccagaaccgcctgattttgataaaaaagtgcgacaaccaggaaatgcttggttggcaaaaaaccgagatcccaaaaaaggaaccagagattattggtcgcctttcaaaagttatttagctgatggatttaataatctttgtggttatagcgttatgtatgaaccagttggtacagtagatcattatcgcagccgtgaaaattatcgcgatttagcttacgaatggagcaatttacgctttgcttctgcttggataaatagtagtaaaggtacgcttgatgatcaggtacttgacccttttgatttgggagaagattggtttgaaattttgcttccttccctacaattagtattaacagataaagttcctccgcaacaacgtcaaaaggcggaatttactttggaacggttgcggttacgggatgatgaaagagtcttgcgccagcgtcaacagtggtatcaactttatttggatggggatttgactttacaaggattagaaaaaaaagctcctttgatagcgagcgcggtaaagaaacagcagcaggctatttctcaataa

SEQ ID NO: 85988 - DNA, 1272 bp, Chlorobium limicola DSM 245
atgatgaaaatccggacactcagactaataaacttcagaggtattgaggagttgagccttccatttgaatcggggctgacggttatcgctgcggttaacgggggagggaaaacgacggttattgatgcattggccatgttgctctcgtggctcacggcgcgaacgagacgtgattcaggtaaggggcgttatatcaaggatgttgagattaaaaatggagctaaattttctcttatttccgctcagacatcttctggcgagtggttgattgcaaaatcccgcgtaggaacaggtggtatcagcatgagtaactttaccgctcttcaggatatcgttcgtcactttcggcatcagttggagagtgaaaattccctgcctgtttttacctgttatccggttgatcgggcagtaaaggatacagatttgcctcaacgaataagaacaaggcacgaatttgatcccatctcggtgtacgataacctattgagtagcggagcaaacttccgcctcttttttgaatggtttcgtgaacgggaagatattgaaaatgagaaccttcgagccaacggcatacttaataacgtcgatccactggagtttcttgatccgcagttgcaagccgtgcggagtgcgcttgagcaatttcttcctgagtaccatgatttcaggataaagcgccagcctcttcgcatggttgtaacaaaaggagatcaggagttgagaattgattcgctttcggttggcgaaacttgctttattgcgctgattggcgatattgcccgccgtctggcaattgcaaatccacggaagcagaacccacttgaaggagaaggggttgtcctgattgatgaaatagatcttcatctccatccggcatggcagagaagagcggttacaaacctcaccaaggtctttccgaatgtgcagtttgtcgttacgacccattcaccccagatactcagcgaggttgctcccgaatctattcgtctgctttatcaggaggataacctcatcaagtttaccattcccaggcagtccatcggtttgaactctgcagaaattctccgggagttgatggatgatccgggaatcaacagcaccgtcccgaagcgtattgaagagattgctgcaaaaatcgaccatgatgagtttgaagcagcaaaggagcttatcgaaaaactgaaagtcgatttaaaaggctccattcccgatattgtggaagccgaagcgaccattgccatgctggagcccgagaggggagctggtgaatga

SEQ ID NO: 85989 - DNA, 651 bp, Chlorobium limicola DSM 245
atgattcccattgccaaaagtacggaaccacaatctttgcagcactatcggttgcaaaaaggaacggtttttgacggagaaaactttacccccgtaaaacaggatatacgagttcaacttgttgcagaacaggggcttctatgtgcttactgcatgggccgcattgagcctgacgacaggaatatgaaagtagagcattggcattcccgcaagagatatccagctcaacaacttacctatgccaacctgctcggttgctgttgtggcaatgagggatttcctgatgctctggctcattgtgataccaaaaaacgtgatgatgaccttctttttaaccctgctgaacccggtcatcactcacaattgaagattcgctatgagtttaacgggactatcaagtcagacgatgctctgtttgatcgccagcttaatgaaatactcaatctcaattattctcgattgacggataaccgaaaatcagtatggagttcagtcaccaaaaccctctccggaattaccggcaaagctacccgagcacaaattgaaggtttgctgctaatatggcagcagaaaaacagagaaggcaagcttcccgagtattgtggtgttgcgcaatactatttcgaaaaaaagctaaagcgaaccctttag

SEQ ID NO: 85990 - DNA, 1344 bp, Pelodictyon phaeoclathratiforme BU-1
atgattaaacatcttaaaatgaccaatgtcggaccggctccaaagatggaacttgagttcggcaaaagactgaatgtaattacaggtgataacggcttgggtaaaagctttttgctggatattgcctggtgggctatgacccgaaaatggccagccgaattgaaccccaaacttacctctggcaaagtagctttgcctacagataaaaagcatgaagccgaaatcgatttttcgttttcggcggtatcgaaaacaaagggctttatcagcacatttgagccgcgaggacaaagctggacagtccagaaaggtcgtccggcaaaccccggactggtcttttatgcgatggctgatggtagctttgctgtttgggacccggcacggaactactggaaatcgaaaaaccctgacgaaaacaaggaacgacctgccgcttacgtttttagtccgaaagatgtgtgggatggactgcaaaatcaagatggcacgtggctttgcaatggtttaattcgggattgggctggctggcaaaaggaaaagggaagagcctttgagtctctgatctctgtacttgatgttttgtcaccatcctcgactgaaaaaattgtaacgggatcgttaacacgcattagcctggacgatgtaagggatatgcctacattgaaaatgccgtatgaccaagaagtggcagtcgtccatgcctcatcaggtatgcgtcgaattatttcgcttgcctattttcttgtctggtgctgggaagagcatgtaaaggccaaagagttattgggcgaggaacctgagacgaatacagtttttctgattgatgaagtcgagtcgcacctgcatcccaaatggcagcggacggttattccttccttgatgaaggtgataaagcaattgaccaagtcccctgacatcctattgatagacgataccgatcccgtgcatccccatcatacactgatgatatccgatgttcaactgatagccgtaactcattcccctttgatcatggcttctgtggaacccctgtttgacgaaaatcaagatgcttggtttgaccttgatctggtcggtaacaacgttgaactcacacacagacagtttgtccggcaaggtgatgtccgcagttggctcaccagtgaggcgtttaaccttaaatccggctattcgattgaagctgaaacagttctggaagaagccgctttggcgttaagtaacgaacagttcagtaaagacgacgctctctcactggagcagcgtttgcgggcagttctctctgatactgatccattctggatgcgctggcggtttgtggctgaaaagaaaggatggtcgttatga

SEQ ID NO: 85991 - DNA, 600 bp, Pelodictyon phaeoclathratiforme BU-1
atgattcatgttgatgcacaaaccgagccagattcgttcaattcgaatgtccggcaaaagggacttgctcggctcatagaaaagaacattcctcttgataaaccgctaccgccaaaaactgatgttgagccttattggcgcttctgccttgatgatttgcatacaacttataacggttgctgtgcttatttagctgtttttttcgagcgggtcacaggaggtggttcagtcgatcatttcattgctaaatcaaaacgggctgatttggcttacgagtggagtaattaccgccttacgtgttctcgcatgaatagtcgcaaacgagaatacgacgatgtacttgatcctttcgagatagaaaatggctggttccgtcttgaacctattactggacgaatttatcccaatccaatattaacgcctgatcagcagagaaccgttcaggcttcgatagaacgactgaatttggatgatgctggatgtcgggagatacgagctcggcattatcaagattattgtgaaggtgaatacaccgccgagtttttaaggaaacgttcccctttcgtatggttggaggcccagcgtcaggggttgctataa

SEQ ID NO: 85992 - DNA, 1269 bp, Pelodictyon phaeoclathratiforme BU-1
atgaaaatccggacagtcacactgaagaattttcggggtattgaggagttgtgcctcccgtttgatgcggggctgacggttatcgctgcggttaacgggggagggaaaacgacggttgttgatgcattggccatgttactatcctggttgacagctcgaacgaaacgtgattcaggcaagggacgttatatcaaagacgttgagattaaaaatggagcgaaattttctcttctttccgttcaaacatcttctggcgagtggttgatagcaaaaaaccgcataggaacacacgctctcagcatgagtaactttaccgttcttcaggatatcgttcgtcactttcgacatcagttggagagagatcattccctgcctgtttttacctgttatcctgttgatcgggcagtgaaggatactgatttgcctcaacgaataagaacaaggcacgaatttgatcccatctcagtctacgataaccttttgagcagcggtgcgaattttcgcctcttttttgagtggttccgtgaacgggaagatattgaaaatgagaaccttcgagccaaaggcatactcaataacgtcgacccaatggagtttcttgatccgcagttgcaagccgtgcggagtgcgcttgagaagtttctgcctgaataccatgactttaggataaagcgtcagccccttcgcatggttgtaacgaaaggagatcaggagttgagaattgattcgctttcggttggtgaaacctgctttattgcgctgatcggcgatattgcccgtcgtctggcaattgcaaatccccggaagcagaatccacttgatggcgaaggggttatcctgattgatgaaatagatcttcatctccatccggcttggcagagaagagcggttaccaatctcacaaaggtctttccgaatgtgcagtttgttgtcacaactcattcgccacagatactcagtgaagttgcacccgaatctattcgattgctttaccaggaggataaccacataaagtttaccattcccaggcagtccatcggtttgaactcggcagaaattctccgggagttgatggatgatccgggaatcaacagcgccgtcccgaagcgtattgaagagattgctgcaaaaatcgaccatgatcagtttgatgttgcaagggagcttatccaaaaactgaaagtcgatttgaagggatcgattccagatattgtggaagctgaagcgactattgctatgctggagcccgagagggaagttggcgaatga

SEQ ID NO: 85993 - DNA, 453 bp, Pelodictyon phaeoclathratiforme BU-1
atgattcccattaccaaaactacggaaccacaatccttgcagcattacaggttgcaacaaggagcagtttttgatggacagaattttacaccagtaaaacaggatatacgagttcaacttgttgcagaacagggttatctttgtgcttactgcatgggtcgcattgagcctgacgacaggaatatgaaagtagagcattggcactcccgcaagaaatatccggaacaacagctcaactatgccaacctgctcggttgctgttgtggtaatgagggatttcctgatgctctggctcattgtgataccaaaaaacgtgatgatgaccttctttttaaccctgctgaacccggtcatcactcacgattgaagattcgctatgagtttaacgggactatcaagtcagacgatgctctgtttgattgccagcttaatgaaattctcaatctgcaatga

SEQ ID NO: 85994 - DNA, 1416 bp, Vibrio fischeri MJ11
atgataataaaatcagtattgttagacaaaaaaagatataaattagttgaatcggattattgcaataaaaataatgcttttactgtcgttgtaggtagtaatggtatggggaaaagtagattacttaaacgaattgttaacaatgtgaaaaatataaatattcaaggtgatcgcattcctcaaaattatagtagacaaattgactttgaccttgatgggtataacgcaagtttttattctcctgtaagcgagtctaagtcatttgtaagcattgataagaatgaggttggctctttaaaaggtggggtcaaggttatagcagtaactactactccattcgataaatttcctattgaatataagggtaatgaaatatatagatatcatgatgaccataagtatacatatatagggttaaaagtctcaaaaaactcacttaatcaatctaattacttgaatttattatgtcgttcaatgttatctagcgatcgaatttttaaaaataaaaaattattttctttgcttaacttgagttcaggtataaatattcagcttaaagcaaagttaccaacaaaaaattcagatttcatggtatataataataaggaaagacgctttgaagttcttaaattaaatgaggattactttaaaagcttcttatctagacaccacattacaatatatgaaaaaataagaaatgttgatggtcttttattaaaggcatatgaagcatactctaactgcttcccattttttataaataatattaatcctgaaagtaatgttataccaaaaaaagatttaatatttttattggatattgggttggttaatgtatctgatataattttcacggatataaagcatgaagaaattaaaatatctgaattaagttcagggcaaaagtgcatgatacttacgttattaaatatttcagggtcaattacagataatagtattgtttgcatagatgagcctgagattagtttacaccctcgatggcaaaaagaattcatgaaagttttaattgaattttttagtgactttaaacgatgccattttattgttgcaacgcattcgccattaataatatctgagctgttaaatgataattgcttcatattaaatatggatgttggttatgcaaaaaaagcaaatgaatataaggcaatgtcatctgaccatcaattggttgaggtttttggaatagctggtaataacaatgaatatttaaatagaattgttgtttcattattatcaaagttaagtaaaaatggggatttaaacaagacggaaaaacttcaattagaagtattagtccgattttcagctgagatggataaagatgacacagtaaaagagcttatcgatatcttaaatttagcttggactaaggtatcaaaaaatgctaaatag

SEQ ID NO: 85995 - DNA, 636 bp, Vibrio fischeri MJ11
atgctaaatagtgtggttttttctgatgctgaaagtgagcaaatacaaaataaacttctttgtaatgggttttcttctgaaaactggtcagataaagatcttgataatataaaaaaaacgattaaaaatcattatctaaaagaacagaaaaacacctgtccttattgtaagcaaaaaataaagtcgaataatggtcggcattgggatatagagcatattattcctcgttccatgacgttgagctttatgtttgagcctcttaacttatgtatgtcatgtgtagattgcaatttggctaaatctgacaagaaagttacaaatagtaaagcaaaacgaaattatccgattaagagcaatagtttttctattgttcacccacatcttgataactatcatgagaatattatagtaataaaagaaggcttttattatgtagcattaaagaagaaaggtgaaaaaacaatcgagttttgtaaattaaatcgattctatgagttctctgaattcggttctagtgtgcaagatgatgatcgtatttttttattatctgagcaattaaaagttgaaaagaatgaaaaaataaaaaaacaaattagacgaaatatagcagagttagctataaagggttcagcataa

SEQ ID NO: 85996 - DNA, 1593 bp, Thauera sp. MZ1T
atgcggctggataaggtcagcatcgacggcttcaagaaccttcgcgggctggagctggacttcgatgagcgccagctcaccacggtgctgatcggccagaacggcgccggcaagtccaacctcatcgaggccatcacccaggtcttccgctgggtggacctgcggcgcaacgagccgcgctttcactaccgggtgacctaccgcatccagccgcaggggccggcggtcccgaatccgcccagcgtgtgcctgagcaactttcccgacgaacccgcgattcgggtcaacgggcaggaggttaagcgcaccgagttcgagaagcgcaagacggagtggtttccggacctggtgttcggctactactccggcggcagccgccgactggaggcgttgttcgacagccaccagcggcgctactacgacgacatcaagctcgaggacaacgaagcgaaggtcgccaaggcacaggaagcccgacgcctcttctactgccgacccatccatggcgtgctggcaatgctggcgctgttcgcctttccagaccccaaggtcaccgccgagctggccggtcgcctgggcatcaccggctttcactcgctgctggcactgttccgcgaaccctggttcgccaagggccggaagaccagcgccgacgacctgtggggcgccggcggacccgctggccgcgccgcgcgccgcttcaaggaactggcctttcacccgtttgcgctggaaggcaacgcagtggacgactaccgcgacaagaagcaggtggagccacagttcgctgccttcctgccatcgctggcgcggctgcagcagctggccgagcaattcaagaacgagcgcgagatgttttacgctctggaggcgatggacatctccgacctggtgcgcgagatccaggtttgggttacgcgcagcaacgacaccagcggcgacgtgggctttgccgacctgtccgacggcgaacggcagctgctaatggttctgggcctcatccgcgtctcacgcggcaagcgcgcgcttttcctgctggacgagcccgacacgcacctcaacccacactggcagcacagctatctgaagctgatcgaggactggacgggcatcgcggccgagaaggaccactgccacatcgtgctgacctcccacaacccgctgacgatctcggcgttgtcgcgagacgaggtgcgagtgattgcccaaaccgacgatggccgcgtgaccgcagccgcgccctacgccgacccgcgaggcatgggcttcacggccacgctgaccgagatcttcggtctggcgaccagcctagacgtcgaaactcagcgcctggtggacgagcgcaatgagcttgtgcaagcgcccaagcgggacgatggtcagcagcgaaggctgattgagctgaacgatcaactggcgcgcctgggcttcttgaatgaggatcgtgagccgctttaccaagacttcctgcgggcctggcacgacgtgcgctacgccgaccggccgccgctcaccgcggctgacattgaagcgcggcagcgcgcaatgaagacactaattcagcaactaatggtgtcggaggcgaagtcgtga

SEQ ID NO: 85997 - DNA, 864 bp, Thauera sp. MZ1T
gtgatcttcgtgcgccgagacccgaaactcattccggagaaggtgttgcgcgtcgccgagcgagcacaagcggagctggaggcgttgcctgctgaacaacgtgctgcattcattgagaagaagaagcgcatctggcgtgcgttcgctcgctacctgtccaagatgtcctacggcaagtgctggtactccgagagtgactgcgtccactccttcatggacgttgaccactatcgtccgaaaaagcaggccaagcgctccgacaccgatagcgacgacggctacccttggctcgcattctcttgggacaacttcaggctctcggctcagcgagcgaaccagatcaatcacgatgacgcaaccgacgaaacggtgggcaaaggtgcttggttcccgctaatgcaaggcagtaggcgtgcaacatgggatgaccggtgcattgaagatgaacgccccgtgttgctggatccagccaagctggcagacgtgagactcatcgaggtcaccgccaccggaaggatgggaccgacccggttctgtttgggcgagtacgagagaacccgtgtgcatgacacggtcagactcctggggctggaccttccaggtctcgtctccgcgcggcaaggcgccatgcgcttagttcaagagatcgtcgagctcgttgtgcagaacaagacggcagcagaattgagcgcggcagcgtctgcattcgtgtcgctgcacctgcgcgctgatagtcagctggacatgcttcagcgtctgaccaagccggaccgcccgttcgcgtcggccgcgcgagctcagctcaagttgatggggtacgaagacttgtgcctccggctcgaacaaggccaggaggcagcatga

SEQ ID NO: 85998 - DNA, 1320 bp, Cyanothece sp. PCC 8801
atgaaaattgatcaacttgaagtagaaaattttagaggatttaaaaaagaagttttcaaattatcagagcaatttactgtatttattggagataattgtacaggaaaaactgctgtattggatgctttagctattggtattggtagtttatttttaggttttactaatgttgattctcgtcacattaaagatgatgaagttcatagaattagttacataaaaggtgaaacatataccctagaagcccaatatcctgtgagaatttcatgccgatggtttcttgacaataactatactgatttattgagtaatattctttttatttcttggtcaagagaattgacaaaaaaaggtggaagaaccacaagaacagatgcaactgatctaattaatttctctaaaaaactacaacaaaaagttgatcaaggagaagatatcattcttccagtaattgcttattatggaacagcaagactatgggtgcaaaaaaaacagaaagcagtagaaactttaaaacctggatcgagaatgagaggttatattgattgtttagattctgcatctaatgaaaaattgatgttacgttggtttaaaacaatggaaattgctgaaatacaaagaaaagaaccaatcaaagttttgagagcagtcaaagaagccgttgctaattgtgttgattattggaatactgttagttatgatatattacaagatgatttaattattacctcaaaaaatggtgaatctctcccttttagaatgttaagtgatggagttcgtaatatgttagcaatggtcgctgatattgcttatcgatcagcagtcttaaatcctcacctagaagaaagagcagcaatagaaactcctggtattgttttaatagatgaaatcgatttacatctacatccaaaatggcaacgaaaagttgttaatgatttacgaaatacctttcctaagatacaatttattgcgacaactcattctccttttattatacaatctctcaaagatggagaattaattaacttagataaacctgaagaaatagaagaatatgaaaacaagagtattgaagatattggagaaaatgtaatgggaattgaaaatatacaaagaagtgaaaagtatcaagaaatgatgcgagttgcagaagaatattataaggttcttcaagaagcaaaaagtgctgattctcaacaaattaagcaattaaaacagaaactagatgaattaattgaaccctatagtgatcaagttgcttatcatgcttttttaaagatggaacgtcaagcagcaggtttaggagatagtcaacaatga

SEQ ID NO: 85999 - DNA, 684 bp, Cyanothece sp. PCC 8801
atgagaccagttattcgaggagaagtaaaagacaaaaatacagattttacaaagtacgaagacgctaaaccttatttgatcaaaaatataggggaatactgttcttattgtgagagaagagtcactaatctgttggctgtagaacatattcaaccgaaagaacattatcctgaactagaattagtttggggcaattttctactagcttgtacaaattgtaattccattaaagggcaaaagaacattaatttatctgattatttttggtgtaatcgtgacaatacatttcgtgtttttacttactttgatggtgtcgtaaatattaataatcaattaactttaatagagcaaaatataggaaaaaaaacaattgatttaatcggacttgatagagtaccaggacatcgtaagtattcaaacaaagatacaagatggcaaaaacgtcgagatatatggggtaaggctcaaagatcttatgataatcttcaaaacaataatactgaagaactacgacaaactattgttgatctggctttagaaagtggattttggtcaatttggatgacagtatttaatgatgataaagatatgcttaaaagatttatcgaagcttttccagggacttgtcaaaactgcttcgatcaagattttaatgctgttcctcgtcctgggggtattgtataa

SEQ ID NO: 86000 - DNA, 1653 bp, Rhodobacter capsulatus SB 1003
atgcggatcgatcgggtatacattgacgggttccgcaacctgcaggacgtcgaagcggactttgacgaaggctgcctgacaacggtcatcatcggccaaaacggcgcgggcaagtcgaacctgatcgaagcgatcgtcgagattttccgccatcttgatccgcccaccagcaaacacggcggcaagctgcgcttcacgttcgaaatcgactacatcatcaagggccgcaaagtgcgtgcgagcaatcgcgacgggtcaaccaaggtgctggttgacggcgagctgatgcccatgacccggtttcaggacagcaaggccgacctcttccccgatctgatctttggctactattccggcaccggccgacgcttggaaaagctcttcgacgaccatcaggcccggtactacaacgtcatcaacaaggacagaccagaggccgagtacgccgccgcccgcaccgcccgacgcttgttctattgccgccccgtgcacggcgtgttcgcgctgctctgccatttcgcgaaaccgagcgaaaagcccgattcagcaaacgtcctcagcaaacaactggggataaccgggtttcattcggccttggcgcacttcaaggaaccgtcctggttcaaccagtcaaactggaaaaaggcccgggcctcagcttcgccggggcgagggcggcgaagctacagcgatctaggcgaacaggccgaagatgtatggggtgcaaggggccccgcaggtgaatgcgcccgtgccctgaaggacatggccttccaccccttgtcggtcaccgggaaggtcgtggacgactatcgtgacaagccaaaggtcgaagcgcagcttgcctgcttcctccgcgacaaggcagccctgcagaagttcgcagcgaggtacgaaacagaccaagacatgtttgcggccctcgaagccgctgacatttcagacctgttccgcgaaatgctcgtgtgggtcactcgcgacggtaacgacagcggcgacgtcagtttcagcgacctgtctgatggcgagcggcagctgctgatggtgcttggcctgatccgggtgtcgcgtggcagagaggccctgttcctactggacgagcccgatacccacctgaatcctgcatggcagctgacctaccttgagctgatcaaggaatggaccgacgtggctgcggacaaggatcggtgtcagatcatcatgacctcacacaatccgctgaccatcgcgtcgctcaccagacaagaggtgcgcgtgatgcagcaaagcgaagctgcccggctggtcgtttcggaaccatttgcggacccacgtggcatgggtttcaccgccactctgacgcagatattcggtctttccacgaccttggacttggcgacccagcaacagatagatgatcggaacgcccttgcccgcatcgaacagcgcagcgaggagcagcagaaggagttgatctccatcaatgagaagcttaataggctgggcttcatgaatgaaagtcgcgaacccttgtaccaagagttcctgagcgcttggcaagacgtgcgctacgcagatcgacctccgttgtcgccagaagcaatcacgaaacgccatgaagcgatgaaggatttgataagaagattaacgactaaggcggggcaggcgcattga

SEQ ID NO: 86001 - DNA, 855 bp, Rhodobacter capsulatus SB 1003
ttgatctacgttcgtcgtgatcccgctctcattcccgaaagggtcctaaaggttgctgagcgtgctcaggcggaacttgaagccttgccgcccgatcagcgagtagcgtttatcaagaagaagtctcacgtttggaccggtttcaagaagtacttgtccaagatgtcctatgggaagtgttggtactcagagagctcggaccctcagtcattctttgacgtcgatcactttcggcccaaagccgaagctcagagaggggacggtggtgagaaagacgaagggtatccttggctggcattcgactgggacaacttcaggtactccgcgggccgatccaatcgccacagcactgacgaagacacagaggaagtagtaggtaaagggagctggttcccactttgtccgggaagcccttgcgccacgtgggacaaccgagccttggcggcggagaaaccggtcttgctcgaccctacgaacgtaggtgacatgcgccttgtcaagattggttcatccggatcggtcgagcccagcggcatctgcgtcggcaccaaccgtgaacgcgtagcaaagtcggtcaagtactatgggcttgatttgccagcattaaaggaagccaggcttcaagttatgcgcgaggttcaagagatgtttgaagtcctagtgcaaactgttgctgccgcgaatgaggttccagccgcagctgatctgctaccagtgcctaaagaagcagagttgataacggcaaagacaatgccgaacagtccttacgccctggcggctagaagccgattgatcgaactcgggatgcctgaattgattgctcggccggaggactaccctgcgccagttatctag

SEQ ID NO: 86002 - DNA, 1293 bp, Cyanothece sp. PCC 7425
atgagagttaaaagcttaaaaatgcagaactttcgaggttttgaaaatttgactctagattttagtgagacagaaccaactgtcttctttggcattaatggagttggaaaatctagtatccttgattgtctcgcgatactcttatctagaattctaacagaggtacaaactttccgttccttaaaaagttcaagacccctaattttgaaagagagcgacatctcaagtgaaaaagatgagtgtgcgaacgaggctttgattttcttgaaaacgtcaagcgaattcattgttaaatcaagcatatttaaagcaaaacatacttatgcacatgctgagcaacagattgatgaagccataatttttcaaaagtatatatatgatgagttaaagtctagtccggatgccaatattccatttgcagtttattattcgattaatcgccatctttcagaggttatattggaagatggaggtgaacagtactctaatcaatttgctgcttatgatcaagctattttagacggaggaatttactttgaagattttttttattggtttaagtccactgaagattatgaaaatgaagtccgtttaaataccgatattcgctatcaaaatcatcaattacaatcagttaggaatgccatctatcaattaattcctactttttcaaatttgagagttaggcgatctcctcctctaagaatgacggtaaacaaaaaacttggagatcaagaacaagaactaactattaatcaactctctgatggtgagaagtgcttactggcaatggttggagatatagctaggcgattggctattgcaaaccctggcttagaaaacccccttgaaggtgaaggcgtagttttaattgatgaaattgagttgcatctccacccggcatggcaaaggcaaattattccagcattaacacggacattccccaactgtcagtttatttgcacaactcactcaccccaagttttaagtgaactgaagccagaaagcatttattgcctggaaagaaccgaagaaggtcaagtcattgcttatcatcctcataacccctatggaaaagatagcaattacattctggaagttctgatgggtgtaacagaacggccaaagcgaataaaagagcaacttcttgagttgtttcgtttgatagaaactggtcaattagaagaagcaaaacgtcttcagagacggcttgaagcagaaatcggtgaagatgaaccagaatttgccaaggcagatgttctcattcgtcgtcgggaagcgatcggacgatga

SEQ ID NO: 86003 - DNA, 666 bp, Cyanothece sp. PCC 7425
atgaagtatatcgagaaaggagaggagccttctagctttacaggctggaaagcacaaaagaatgagaactgggaacccacctgggataatcttcaagcaccacagaagcctgaattgcatgaagcgttattgtttgaacaaggatatatctgctgttattgtgggatgcgaattagtaaaaccaatagccatattgagcatctcaagccccgtagccactttccagaattagcactggattataataatttgctctcctcctgtccgggagaaggagatgaaaagatacaatcagaagcaactaaactgaaacatctgcattgtggagttggaaaagacgattggtatgatccaactctaatggtttcacctttagctcccaattgcactgattatttttcctacaccgcatttggggaaattttagctgcgacggatctcactttgaatgccgctgctctagaaacgatcaaacgcctaagattagatcattctaagctgacattaataagacgtagagcgatcgaagcaattattccacttgatgatgattacacacaagaagaaatcgagacgttaatcgaaagctattctcagcggaatgaaaaaggtgagttcgtccgtttttatgcagcagttatttatattcttaagcaattgatttaa

SEQ ID NO: 86004 - DNA, 1395 bp, Cyanothece sp. PCC 7425
atgaccgaacagccaaagcaagctaaaagtaaacgtcaagcagaaagcccatcagataaaccatgtgctgtttactttttgtcattagaagtagagagagtgctttgctttaaagataaacaaattcttaacctttcagatgggaatggcaaccctgctcaatggacagtaattttagggaataatggcgttggcaaaacaactcttttacgttgtcttgctagtgtcgaggtagaaaccgccaaagactttacctccgacaattctcatatcatcctatcaactgataatatatctttgtggaatgacgaatcaatacttggtaagcaatctgcagaactcaacatttacttcgcttatggagctagtctttcctcacccaactctatagagcaaaccacagaaaataaaaccgaggcatttcaaactttagaaatatctttaatatttaactctttatttagagcactttttccgtcaccttacggtaatagagaagaattattaaacttaattcactatggctatggcgcaacaagaaggacgggagaaacatctttaagtgaaggtataaatcatggaaattcggcaagtttatttttagaaggtatatccttaataaatgcagaagaatggttactccagaccgattattcaatgcgttcagcttcaggtaaaacacgagatcggcttcaaaaacaactcaatcaaattattgatgttctgaaacgcattctaccagacgtagaagacattcagattgccccggctgatgaagagagatcccgaccaaccgcagaatttcttactccctatggttgggtacaactatcaagtttagggttagggtatcgcacgatgatcgcctggatggttgatctcgctgctcgactgtttcaacgctatcctgatagtcctgatcctttagctgaaccggcgatcgttctggtggatgagattgatctgcacctgcatcccaaatggcagcgcacgatcatgaactttttaactgaacggtttccgaacactcaatttattgtgacggctcacagtcctctggtagtgcaggcagctaagaatgccaatattgtgttattgcggcgagagggcgatcgagtggtgattgataacaatccagaaattgtggataactggcgggttgatcaggtgttaaccagtgtgtttgagttgcccacggctcggcctgctgatgttgaaccattgttgcttcagagacaggaattactctctcaagcccacctatcagaagccgatgaagcaaaactgcgggaactggaagccaggatcggtactttacctactggagaaagcccggaagacattaaagctatggacattattcgccgtgctgctaaattattagagaactcttaa

SEQ ID NO: 86005 - DNA, 789 bp, Cyanothece sp. PCC 7425
ttgatccacattaataagccagcaaccccaccgcagaagttagtagtagatgggaaaagaaaacggcgatcgcactctcaatcctatactcgtaactctgacgcttataaattaggagagaaaagctttaattttgacagcaatatctatgcccatcccacagtcaagcaagcattaattttagcccaacatggcaaatgctgtttttgtgagcgactcattggtacagacggagatgtggaacactttcgccccaagcaggcataccggcaagaagtaggtcaacaattacaaagaccgggttactactggttagcttacgaatgggataacctctatctctcctgcactgcttgcaaccagcgacataagcagaatttatttccgcttaaagatccggcactgagggcaacagatcataggcaaagcattaaccaggaagaaccactattcgttaatccaggtagagagaatcctgaagatttcattggctttcgtggtgaatttgcatttccaattaatagtagccagaagggcccaacctctattaatacttttaagctaaatgacaatagcagaggacttcctgaagtcaggctccaacaattaaagagattaaagcaattacagtgcattgtcgctctagcagctagtcagccaaataatttagaactccagaatgaggctaaagatgctcagttattattgcaagatgcagttcttcctcaatctgagtttgcggcggcggctcgttgggcgataagtagtaattttcagtttgttatatga

SEQ ID NO: 86006 - DNA, 1734 bp, Dyadobacter fermentans DSM 18053
atgattgacattatcgagctaaacgagcgtattttccatcgtctcgaacaatccgacttactatacacattccgtaaaagcaattatggaagtcgactggaacaaggttattggttttacggaaatgaaaatcaaatggctatttcgttttggtcaggcatggattggaaaaatcgaactccaaatatagtatttgtgataacgcaaaacggtaatgtctatttggaaatcaatgtttcggattcagatcgaaaaagagaatttatcactaactatcttgctgatcctttggaacttggatctgatagtcggaagttccgaaaatactatgctgacaatctagaccttgatgaagctatattcgagtttgaaaaatttctaaatagtgacaaaattattattgatgaaattatcaatcgcgagtcgaaaagtttctttcttccaaatgaagaatcaatcagcaacattgatagaaaagaatttcgccaacgtctacaaaacgttcataaatatagacgtacaatagttgacatagaacgcaccgaaagtaaacaggcacttgaaaagcctactaaattacaatctttcagagtttgggattctggccctatatcttatacggaactaacggacataccagctgataacaaatggatatttattacaggtgaaaacggatcaggaaaaacaagttttcttcgagcaattagtactgccttaggatatcggtccttagatcgaaacgaacaaatgagaaatcccaactttcgatttgaggcaagactatttaatgaaagtagcaatataactgaaagctttacaagagaacataatgaggggaccaaaaatcgccgtccaaaagtttccgggctttgtatgtacggtccatttcggttgttgaacagcaggaagttgtcagaggcaaaatttaaattactctacacaaagagtggatctttcgagtctctttttagtgataactctcccttgctggatatagacaagcaattagatatatggaagaaggatagaaagtccttacatctgctagaaaagcgccaataccacattaaaaatattttgaccgcagttgtcccaaatctctataatattgatttatctctgtcggaactcggaaagccagtagaataccagaccagaagagatgacatctcaaatcaatattcaacgccatgggaaaatttatcttccggtacaagaagtgtcttctcactaattttagatattttgctaagactttacgatcagcaaccgaaagtcgttgatccggccgaattgaaaggtgttgttttgatagatgaaatagaccttcacttacatccacttgcgcaaaaagagctagtagtaaatctatccaatgttttcagtgatgttcaatttattgtcacaactcatagccctattccattgttgggtgcacctagaaacagtatgatatatgttatgagaaattatgatggcaatgtctcgattgaacgcatggatgataaggtaatgttccgaaaaattttaccgaatgccattttcacctctccgatatttggatttagtgatcttgtgccggatgcaaaaggtaaggacgagataccatatctcgacgatgacttcaatcaagtcaaacgacgagaaaatttgaacagagacatcagagaatatctaaataatgacaaacaaaaggaattattggcattatttaataaagaaaagcaatga

SEQ ID NO: 86007 - DNA, 942 bp, Dyadobacter fermentans DSM 18053
atgagaaatgtgactcgtagctatctaataactgatgcgcccgacatcttgcaagcagaggatactattgcagcttcaacaataattgcgaaagcaggtgatgcaagcggtataaaaaggtcgctgtatagcgatccctatacagctggacctgacgaaggaaaccaatcccgagtcatagacaagcttaacaattggtactttgggaaatgtgcatactgcgagagattctacaagctagatgtcgagcacttcagacccaagggagaaattcgagatgaaaacaatgcgttgacttcgaatataggttactattggctaggatatgaatggtcaaatctgttgccttcttgtatctcatgtaatagagatggcggaaaaaactctaagtttccctacatagcggggggcaaaacagtgaccgcaccaacttttaacgaaagtggtaatctcgacagagaacattgtatcgtagaccacgagttactcgtaggagagctcccagctctccttaatccagaagttgacttgaatgtagaaaggttttttgcctttgaaattgatgacgatacggagggaattcgaatcaaaggtgttgatgctgatcgtcgtggtgaaataactgcaattgtttgtaaactgaacagatctgaaatcaggagagagcgcctacaacatgtagtaatggaatttgtaaatagtgttcataactcagtagccgtactaaaatcatcaggagataacactaacttcaaagatcaactaaatttacatatccagaaaatttatcgagactgcgacgaaataaagttaagccacacattgctcagaaaatatattgttgctacgccattaaattttcaaaaaatcgtgattcccttcatcataccagaatttaaggcaattttatcagaagccttcacaaattatgttcatatctag

SEQ ID NO: 86008 - DNA, 1329 bp, Rhizobium leguminosarum bv. trifolii WSM1325
atggcgctgcgtctcgacaagctctcgctgacaaattttcggtgcttcgctaattgcgaaatcgaattccattccggtctcacagttctggtcgcccagaatgggagcggtaagaccgcggtgctcgacgccgccggcgctgctctttcggtcttcgttaacacgctttatccgctcgagaagatttggcggatcgagcggagcgatgtgcgcttgatccccggtcaggagcataaaatgtctccctgcctcccagtcgaatacgaagcgcaagcgaccgttcaggccacttcagtaacttggaggagcgccgtcagaacgtacggtgacaaagtacgcccgagcacccggaacctcggcccgataagtatggctgcacaaccattcttatccgatacggcggtacttccgctcatcgcctattatggaacgggccgcctctggaacgagcagcgccagaccgaatatcgccgttcctccgttacgaatgttgatgagcgcgtagccggatatgccgactgcctcacctcgtcttcgtccttcaagggcatttcggcgtggtttgagcatcgcttcaggcagacggcgtcgccgttatatcgggagagcctgcaaactaatctcgcgatgatcgaaggtgtgaagaccgccaccgacaccgttctgcagccaaccggctggtcgaatcttcgttgggatgacgagcttcatactctgacagccaagcacgacgggcgcggcgaactgccgttgtccatgctgagcgatggtgtccgcaccatgcttgcgcttgtcgcagacgtcgcgcggcgttgcgctagtctcaatccacaactgagcgatcaggccgcgctcaagactcctggcgtcctcatcgtagatgaagtggatatgcatctacatccaagctggcagcagcaggttcttggcttgctgcaaagcgcgtttcctgccctacagatcatcgttagcacgcatagcccgcatgtgctgtcgacggtcgaaaaatcatcgatccgtgtccttcacgtcaagaacggggacgtagtggttgagacgcctttggttcagacccgcggggtcgagagtgcggatgtcctcgctaccgtaatggacgtggaccccgttccagcgcttgaggaatcgaccgctttaagcgcctatcgtaagctcatcgaggcgggcgaagccgagggccaggaagcgtcagccctgcggtatcgcctgaacgcgcactacggcgaaagccatccggtcatgctcgaggcggatcgcctcatccgtttccaacggttccggctcgccaagagccggccggagagcgcgtga

SEQ ID NO: 86009 - DNA, 642 bp, Rhizobium leguminosarum bv. trifolii WSM1325
atgtggagacttgatcgcattgtctaccccgcgccgccttgcttgggtggctatcatcacagcacgcactcgtggcaggacgtaatctccggccacaaggcggaaattagaatgcatctggaagcgatgcaaggtcggcgctgcgcctattgcgagggcgacatcgactcactcggccagcacatagagcatttccggcggaaaagcctgcattccgcgttgactttcgattgggataacctcttttggtcttgcgaccaaacggactcctgcggccacttcaaagataacggcgcaggtcaatacgacgtagccgacctgataaacccgtgcttcgacgaccccgacgttttctttgtctttcaggcagacggcacgatcagcatcaggcatggcctttcggcggtggacgaacaccgcgctagggagacgttacgcatcctttcgcttgatgccgagtgggggcgactgcgtgtcatgcgcaaaatcgctgtgtcgggatacgttgacgacgctgacactgcattcaacgaaggttggccacccgatgatatttgctcatactttgcggaagagcttgagtgcgctcgcaatctgccattttacacggcaatccggcatgtgttgactgaaagacaataa

SEQ ID NO: 86010 - DNA, 2310 bp, Rhizobium leguminosarum bv. trifolii WSM1325
atgatttttattgaccgcaacagcgtgaccaatcccctttccgatggaactgccctggcgatgaaggtgggcttggagaatcgccgcgctgccgaattcttttccagcccgagcaggcagagacggttcgatttcacggtctatcggcaattcaagccggctctcatggcactcttctcaaacaaatgcgcctattgcgagagccccttcatgagctccgacggcgatatcgaacagtatagacccaaatcatcagtggtcgaagcacccgaccatcccggttactggtggctcgccaacgactggaacaacctcctgattgcctgccacttctgcaatcgtacgggctcgcaagtcggcgcggatggcattcgggagatgatcggcaaggggaaccggtttccgatccttgggtcacgcgcgatgtcacccgcagacgatctggacggggaattgcctctgcttctcgatccgacccgtgaccgaccggaaacacatctcgtctattccgaaagcggatatgtcagcagcgaaacggaaagaggcaacatcacaatctcgctcctcggcctcaatcgtccggccctcgttcagcagcgggccgaaacgcttcgccgttaccgtgacctattccagacggccgaaaagcttttgacaaccgaagggccgttcgagagtgatattgcctatcgaatgcgcgatgacgctcaacagatggcatcttaccaggctccttacgccgcgatcgtgcggcaattcatgcaggccgacctgaggcgactgacaagcgcccatggccaatcgagcagcgaggttgtccccgtgctcagctcgttgcagacatttcagtccgtctcaagcacggcgacgcctgcgcggcagaagcgagccgaaaaaacctcgcgggactttcgccagcgaatggcggactattcgctttccacagaagatggcatccggcgttacaagtcgcagcgacgagtgatcgagaagatctcgatacgcaacattcgcgcactttccgaaatcaacgtaaacctcgtagcgatggaatccgctcccggaggctggctgatgctgcttggcgagaacggcaccggcaagagcacggcgctacaggcagtctcgctggtattggcaggttcggccaacgtcgtcggcctaatcaagagcggaacgcttgaattgcgtgacctcgtcaggtccggtgcgcgctccggccatgtcgaaatcaagctaagcggtttcgacaagccgcacaggctaaccgtcttcagaaaccgactggagtttttcgcaccgagcggggagaaaacgatcataacgcgcagcggtaccgtcgaaggaacctcctggattccacagactgtatttgttgcctatggcgccacccgcctgcttccgcgagacaacgccttgaccaatgatcccgacgaatacgcccggatcgataatctcttcgatccgttcgttccgctgatcgatgcccagcaatggctttcaaagctccccgcaaattatttcgatcgggctgtgcgcgtgttgcgggatctccttgcgatcaaggaggaggacactttcttcaagcgcgcgggcaagatcgcggtcaggacaagcggcggttcctcaataccggtcagccggttgagtgacggctaccaaacggtatttgccgcgaccctcgacatccttgaaatgctgtacaggatctggccgaacttggaggacgccgaaggaatcgtgctcatcgacgagatcgatgcgcacctccatcctgcttggcagatgcagatcgtcggtcgattgcgtcgcgcccttccgggggtgcaattcatcgcgaccacgcatcagccgttatgtctcaggggaatccgagccggggaagtcgccgtgatgcggcgcctgggggatggacagatcgaggtcgttagcgacctcccctcacccgaggacttcctcgtcgagcaactcctgacatcggaattttttgggttgaattcaacggtggatccgaagaccgaagaagatttcgaccgctactacatgtttttggccatggaagagcgaagcgaagagcaggaacgtgagctaagtgcgctgacaatctcgcttcatgatcgaagacagcttggaacgacccggcgtgaaagcctctatcttgccgctatcgacaagatcatcgcggagcagaagacaaggccgtatcaaccacaccaaatggtacaggaactggcggtcagagaaatttccgagattttcgataacctggttgatgagttggacaacgaagccggcggagacagggtttga

SEQ ID NO: 86011 - DNA, 1008 bp, Rhizobium leguminosarum bv. trifolii WSM1325
ttgatattcattgaaagatccgacgcggcagattcgctgcccgtctacacgaagccgaccgtcaaatcggacaacggcgcggcaatgatcagtcgttctgccgacgagcttgagaaggcgatcgcgttctatacggacaagacacgattcaagaacgacgcgaagctcaccaatgaaacgttcaacttcaccgtgtacaaggacaagggccttgccgatgtcctggccctcgatttctttcacaaatgtgtctattgcgagagcagtatcggtcacgtaatgcctgatgatgtcgagcattttcggccgaaatcagaggttgaatgtgatgccggcagcctccgtcccggatactactggttggccggcgactggagaaacctgctgatctcgtgccgcgactgcaatgcaccgcgagcccatcgcgagccagggcaggccaaaggcgtggccgtcggcaaaggaacacaatttcccctctctgacccttccaaacgcgttcgcaatcacagcggtaacgtcaagcttgaggaagcatacagactgcttatccatccctgtatcgacgacccggaagagcacatcatctttgatgagagcggcctagccaagcccgcggctcttgagggggagccgagcatcaaaggcaaaacgtcgatcgacgtttacgcccttcagcgcaaggttttggtagagagaaggctcgcggaaatcaccaagctacgaggacatctgcttgatcttatcagtctcgtgcggaaacacgagcgatatgtcgcaatgccaatcaacacaagttttgacaggcttgaaaacgccaaggacatcagacggtccctgaaaaccataatcgacatgctgcggccggaggaagaatatgttggcgcgaaacggtctattatcagggccgcctatgctcgcggcgactttgatattcttacggcccatggcatcaggctggaccaatttctgaagatcaagcggcgtcggaaggagccaccgaggtga

SEQ ID NO: 86012 - DNA, 1359 bp, Dickeya paradisiaca Ech703
atgatccatgaacttcgccttgccaatgtcgggcctgccagtaccatgcatctcacatttggtaatcggctcaacctgttaaccggcgataatggtttgggcaaaagctttttgctggatattgtctggtgggcgctgactcgtcgatggcccgcagaagtgaaccctaaactggctgctggcaaaaaggctctgccagcgtttgatctcactggagaagaggcaagcattgcgttttcgtttgctggtaaggtcaaaacggaacgttacgaaagccattatgagagtacctatgcccggcgtgaacagagctggacgggtcgtgcaggtcggccggctaaccctggattggttctgtacgctatggcggacggcagcttcgccgtatgggatccgcatcgcaactattggcgcatgcaggatggcattgacgtgcaggagcgggttccggcctatgtgttaaacccgactgaagtatgggatggtttgtcgggagacgaacgctcctggctgtgtaacggattgatccgtgatattgccagttggcaaaaagagaaaggcgcggcgttcagacatataaatgctgttttgaaggtgctttccccgtcgacaaccgaagtgctctcactgggggaactgacccgtatcagtctggatgacgtgcgcgagatcccgactctccgtatgccttaccaaaaggatgtgcctgtactccatgcttcttcggggatgcggcgtattttggcgctggcctattttttggtatgggcatgggaggagcaccagcgagcagcccgtcttctgggagaagacgtcagtccgcagattacgttcctgattgatgaagttgagtcccatctgcatcccagttggcagcgcagtattgttcccgctttgctgagagtgatgggaaagctgaacgccaaagcgcaggtacagttgatcaccaccacgcattccccgctagtgatgacctcggtggaaccattattcgatgccaaacgagatgcctggtttgatttggattttctaaatggtgcggtggtgctggcgcggcgtgaatttgaaaaacacggtgatgtgactaactggctgaccagcgaggcgttcgatttaaaaagcggcagaccgctggagtatgagcgactggttgaggacgcggcaacgctgctgaatcagtctgatgtatcggaaaaagatctggacgcgatgtatcagcagtttctggcggctctcgatgctaaggatgagttcctgtttcgctggcggtttatccgtggaaaaaaagtaacgccagagaaaaatgacaataagataaaaaaaggacgtaaaaatgattccggtggtgttacaggctga

SEQ ID NO: 86013 - DNA, 627 bp, Dickeya paradisiaca Ech703
atgattccggtggtgttacaggctgaacctgatgattttgatgtcgaggtacgccagaaagggcataactggttgattaaaaaaagtattagccttaatgcaccaccgccaaaggcttcggatttacccaactactggacgcacagcaattattcgctttgggaatcttatggtggtgtctgcgcctatctggcgatttattttgagtgggtgacaggggcatcgtctaccgaccatttcatcgcgaagtcccgtaatgccggcgacgcctatgaatggaataattatcgcttaagttcattggggcccaatcgcaacaagaatgacttcgatgatgtcttggatccaatcagtttgcagccggatacctttgtgattaatttcctgtcgggtgagattagccccaattatgcgcggtattcccaaggttcgccgtatgccacgcaggcagaatcgactattacccggcttcagctcgacagtcaggagcatcggcggatgcgcacgcgtcattttgatcaatatatcactgggaaatggtcgcttgatggcctgcacgatgaatccccttttgtttatgctgaaattatgcgtcaaggattgagcgatcgatcgttgctcgattga

SEQ ID NO: 86014 - DNA, 1449 bp, Dickeya chrysanthemi Ech1591
atgaaaataaagcaattccggttgcaccatgtcgggcgctttacctctctcgatgccctcatcgcgccaacggctgattatccttccaatgtaacggtgctggtcggcaataacggcgccgggaaaacctctattttgcaggcgctggcaacctcgctcagttggctagtcgcccgagtacgcagtgacaaaggcagcggcagcgttattagtgaagataccatcaccaacgggcagacgtccgccgcgattgaggtcatggtacgggatgcgccgccgccctccggtaacgatgctgaataccattggaccctggcaaaagcccgcagcggcaaaaaagggcaacacgccagccagttgaatgccgtttccgcgctggcggaccattaccgcaccgcgttaacgcaaaacgaaaaaagcagcctgccgttaatcgccttttatccggtcgaacgcagcgtgctggatattccactgaaaataagaaacaaacatcattttcaacagatagatggatatgacaacgcgctgaatcagggagtggatttccggcgctttttcgaatggtttcgtgagcgggaagatattgaaaacgaaaacgatgaaaccgtactcacgaatatttttgaaaatagccctgaaggggttctgaaggtgctagatgatatcgaaaaagccgatgaccgaataaataaactggcagagtatgattttgccggactatcagaagaagtaaaaaaactcgttaacaccatgaaattcatgcaggatattcgggataaagccaaagatcctcaactcaatgcggtacgttcagccattactgcttttatgccgggcttttctaatttacgtgtacgccgcaaaccccgcctgcatatgtcggtcgataaaaacggtgaagcctttaacgtgctgcaactgtcgcagggcgaaaaatcgctgatggcgctggtgggtgatattgcacgtcgtctggcgataatgaacccggcattggacaacccgctgcacggccaaggtattgtgctgatcgatgaagtggatatgcacctgcacccgtcgtggcagcgcagcattatcgaacggctcaccaccaccttcccaaactgtcagtttattttgaccactcactcgccgctggtgatcagcgattacaaggatgtgttggtgtattcactggataacggcgaattgaccgtagtgccatcccaatacggtcaggatgccaacagcgtcttacttgaagtgatggatacacatatccgtaacgcacgaatcgcagaaaaattgggtgacctgctggacatgatccagcgtcagcaattaacgcaagccaaaacgttgctggatgaactgaccgcggagttgcccgccaccaatctggaattgaccaaagcccgcctattactgcgcaaacaggagttacgcggtgagagaaatcactaa

SEQ ID NO: 86015 - DNA, 624 bp, Dickeya chrysanthemi Ech1591
gtgagagaaatcactaaaggcaccgaacctgccagcctgacaggctggaaacgcgccaaccccacaggccggtatgacgatttgaccgaaaccgagcggcaggacatccgcgatgcctgcgtcaaagagcagttttacctgtgcgcttactgctgcaaaccaatcagcggtgataacagcgacaccatgaacgagcatgtacaggcacgaaaactggcgcctcgccgtagccttgatttcaccaacatcgtcgccagttgtaccacgccaaatcagtgcgacgccgcccacggttcacagccgttttcgctgaccccactcatggcggaatgcgaaaccgaattgcaatttatgattagcgggcgcgtcgaaggcaagacagcacgcgcgcagggggccattaaggtactaaacctgggtgatcatgaaacgaataacaaaaagctgattgaggtacgcaagcaattagtttctatcttactctggttgaaatatgccgatgaactggaaaaagatgagctcattcagttacagatagcagacctcagcactccgcaaaacggcaggctggagccttacgcaccggtgctgattaatatcctgaaaggatggttgtcggcataa

SEQ ID NO: 86016 - DNA, 1263 bp, Leptotrichia buccalis C-1013-b
atgaaaataaaaaatcttcacatagaagaatataacggacttgaaaatttagatataaattttgagtcagaaggaaaagttttggatttgatagttctggctgggattaatgggagtggaaaaactagagttttggaaagtattcgttattggtttgaaatgtttagaagcaaagctgttaatgtggaattattttatgaagagaatgaaagagaagttttggaaagtcttatgaatagtgaaggattgacagaagttgaaaaagaagcacaaaaggatattgaatttacagattgcttgaaaaatataaaattttataactatgattacagacacaataaaacagaaaatcaaaattataattcaaaaataataagcagaagttttagaaaattaaaaatatttcccaaaataatttatgttccaactgagattaattttgaagaaattaaaaaagctcaaacaaatttaaaaaaagaatatagttttattaatatcgtagattcatacgaaattaaggatattccatcttatattgcaactcggatttctaaagttgcgaatgaagaggaagatttgacaatgggacaagttagaaaaaaagtttttgaggaaattaatggaatttttgaaattttggagttggatgtgaaactttcagaaatatcgaaagatgagaatagtatgccgatttttactaattctagtggaaaaaaatttgggataaatgaactttcttcaggggaaaagcagttatttttacgaactttggcgataaaaatgctggagcctgaaaattccataattatgattgatgaaccagaactttcattacatccaaagtggcaacaaaaaattattgatgtttataaaaaaattgggaagaataatcagataattttagcaacacattctccgcatattttagggagcgttgagaaagaaagtataattttgctagtaaaaaataagaatggtgttgtggaagttagaactggagaaaattttggaaattcgtatggacagactatggaaagaatactggaagatataatggggcttgaaacagatagaaatcctagtgtccatgaacttcttaatcaagtaagagaaatggttaagaatgataattatgaaagttctgaatttgagcgaaaatacagtaaaataaaagatattctaggagaagacgatagagatttatttttagtggatatggatttgcaaataaaaaaggggagaaaaaatgctgaaagtagataa

SEQ ID NO: 86017 - DNA, 414 bp, Leptotrichia buccalis C-1013-b
atgctgaaagtagataaaaacgatgagccaaaattttttgcggaatttaaaaagaaaagtaatccgaaaagctggaaagattttgattttgaaataaaggacaaactaaaagagtatatgcttgaaaatgagcagaaaatagatggaatttacttttgcccttattgtgaaagacagatttctgttgagaaaagtcaaattgagcatataaaacctaaagacaaatttccaaagttgtttcataattacagtaattttttgactggttgtcttgaaaatcaaacttgtggttcaataaaagggaacaaatgggatgataattttgtgaatccagttgaatataatcctagagattattttgaatatagtattagtacaggcgaaataattccaaaatatgaaaatggaatatag

SEQ ID NO: 86018 - DNA, 1395 bp, Catenulispora acidiphila DSM 44928
atgtacctcaagcgcgtgacactgaagaacatccgagggtttcacggcgaccgccgggtggacttggatctgacgcgtcccgaccgctcctacgccggctggacggtcttggctgggcggaatggatcgggcaagacaacgctgctccgtgccatcgctctcgcgatagccggaccgactgccgcgtcacgtctgatccccgacttcgaggactgggtcagccacaggacatccggtggtactgccacggtcgagctggtgcccgatccggccgtcgacttgttcggaacgcactcgctgccggaccttcagacgtattactcggagcagaccgatccgcttctcacaggactagcatggatgtggacacagccgattgcagaccgcagcggtaagcaggttcgaaggcggcagctcgctctcacggccgtcgatccagaatccagcgagaggaaccagctcggcccctggatcgatctcccagcgggctggttctgtgccgggtatggaccattccgccggctgatggggggcgcagccgacgttcagcgcctcatgcaaagtgatgacaaggtcgctcgactcgcgggtctgttcttcgaagatgcatcccttgctgaaggcgtcagctggctgattgaccaacatctgcgcaccttggagaagcgagagggcgcgctggagctgcggactgcggctctggcgatcctcggtgacggccttctgccggacgactaccagattatggacgtcgactccgacgggctgtggatcgagcacgggggaagccgttttcccctgcgcgagatgagcgacggctatcgatcggtggccgcgctcgtcgtggacatcctcaagcaactgtgggccgtctacggggaaatcatcatcgatgactccggcggcaagccggttatccggcaaccgggcatcatcctcatcgacgaggtagacgctcatctccacgtgtcgtggcagaagcgaatcggcgggtggctcaaaacacacttcccggcgatccagttcatcgtcaccacccacagtccctacatctgccaagctgccgacccaggcggattgatccgcctgccgggtcccgacgagcgccgcggagccgagatcgtcgcgccggagctgtacgaccgcatcgtcttcgggtccggcgaggacgtagtgctatccgatctgttcgggttggacaccccctactccgaacaggctgacgcggttagagccgaactcgtcgccctcgaaagagaggtcgtcacaggtcgggccagtgcggagcagatcgaacgccaccgcgaactcaccatcctgttgaccagttcaccgagcgcccgagtcgaggaagtcgccgcgcgcctgtacgagcgttcacaggcggattcgtga

SEQ ID NO: 86019 - DNA, 759 bp, Catenulispora acidiphila DSM 44928
gtgatccgaatcgtgcggcctcgccttccagacactgcggcggccatgctggccgaccagacatcaaagatcgagcaggctgtgtcgcagatccatatggcaaaacggctctggaaggacaccaacgttcgctctaccgtgctcactccccacgtgcggcctgcgctcgagcgcatggcccccgggattgcccgctgtatgtactgcggcgagaattacggcaccgacatcgaccactacaggccgaagagcttgtggccgctgcacacgttcgactggttgaaccacctcttgtcatgctcggcatgcaacagcagtcacaagggaaaccgattcccgctcgcggaagacggttcacccctcctgatcgacccgacgaccgaggatcccgccgatcacctccatttaacccttgccacgggcgactacatcggtctgacgtctcgtggtgaagcaacgatcaagactcttggcctcaaccgcggagtcttggttcaaggccgtgctcgcgctgtacgagacacagtgaggctcatgcgtgagtggcgtatcgccatcgagcgccaagatatccttctcgaagagatagttcttaacgatttgcgacagcagcccttcacagcggttgccgacgcgctgtttcgccaagcatccgggattgcggtcatgacaatcttcagtgccgatctcgacacactcgcgttcttgcgcgatccagaggtactggagactgcgtcccgcgcactcgtcgggcggtag

SEQ ID NO: 86020 - DNA, 1470 bp, Candidatus Accumulibacter phosphatis clade IIA str. UW-1
atgatcctgcaagaggcagcggcaaaggagtcttgtgccatgcgccttaagaaaatcaccttgaataatttccgctgcttcgagtccttcgaggtaacgctccacccaagactgagcgtgttcgtcggcgaaaacggggccggcaagaccgccgtccttgatggcatcgccaccgcattgacgcctgtactgaactatctttcgtcggcaaaccagcggctcaccggtcggggtattgcggatgcggatttccgcgttgaaccggcgacagtccgctcgggcaaggagcgctggaaattggctgacttcgcgcaggttgtcgcggaaaccgttgacggtctgaaatgggactattggcggccttctggtaccaaaggacaggaaccgaaaaccaaacacggcctgactgaactcaagagtcgcctgcagaccatctcggaaagctacaaatcttcggcgcctgcactgacgcctgtgtttgcctattttggcgcgcggcgaggctatatcgaggtgccggaacgcttgcgcgaaagcaaggaaaattatgcctatccaacctccgcgctgatcggtgcgctcgattccttgagtgatttcaaggaactgctgaaatggttcgaccgagaagaagcctccgagttacgcgccaacaaaggtgttgcaagcgatgattacgctccttctcaggcgcttgatgccgttagagaaaccatcaagacattactcgatggaagttaccagaatccctgtttcaatcgggaccacaaatttgtcgtggaaccatctgacggcggcgcccccttgctggtgactcaactgagtcaggggtatcaaagtatgttggcacttggcgttgatttcgcgcgcaggctggttttggccaacggtcacatgaattatggcgaccagaattcgattgccatcgctctcgaagaacttcataccttgcgcagacccgatgaagtagctgaagatctccccctttccgcaccgctgatcgcccccgccatcatgctggtggatgaaatcgacctacatcttcacccctcgtggcagcaacgcgtgttagatgatttgatgcgtgcttttccgtcgacgcaattcattgtgaccacccacagcccgcaggttatcagcacggtcaggcgagaaaatatccgcgtattcagtacagacacggacggcaggaccgtggcgaccgaaccactggcaaacccctacggccagcccagcggcgatgttctgcagagtgtgatgctggttaacccccagcccccagtggatgaaaaaagtgaccttgatcgcctgacgaatcttgtcgatcaggggcgttacgagtcagacgaagccaaagatttgtttcgccggcttggacaagccttggggcccggacatcctcaaatgctgcgcttacagcggagcgtcagccgccagactttcctggtgcaaagggacggtgagggatga

SEQ ID NO: 86021 - DNA, 774 bp, Candidatus Accumulibacter phosphatis clade IIA str. UW-1
atgaggcatgttgcaccgacaggcgccgggcccgtagcactttcacaggcaaatcaaacgcccccagaatcatcagatgaagtaacgcgtcgctggcatgagtttgcaccgagcaagcaagcagtcatcgatcgccttctgcaagatcagtacatgctttgttgttacagcgagttgcgtgcggatttgtacgggctgggttatcacatcgaacatattgaaaataagagccagaatccgcaacgaacctttgattggtccaaccttgctgcaagtgccttgagtagtgacgagggcttgcccaagctggcttcgtaccgcgctgccatcccaggcaaggttgaagtgaattttggtggccatgctcgagaaaagcagaatcaagttgatacggtgcagttcgtttcgatccgtgacccgcagtgcgcttcctatttcgcttatctgtccaatggcgaaatggggccgaatctgaatcgcagcctggcagatcaagccagggccgaatacacaattcggctgttgaacctgaatagcccctatctcgtcaccttgcgccgaaatctttgggacgagctggatgcgcttttggcgcaacatttggataagggatggagtattgagcacttgtgtcagggagaaatgactcctcatggtcgccatacagctccccattatctcccggcacttaactctttttttagtctgacgcgccagttcttcggccctgtagccgagcaaaccttgcggcaatacgcgccaggacttgtatga

SEQ ID NO: 86022 - DNA, 1257 bp, Spirosoma linguale DSM 74
atgataactcccgaagaatttccctatatcaaatccttgtacgtaaacaactgttacgcgtacaggaattttgctattgagttacatgattataagccgttcagtcatttgattctgacggggaaaaatgggtcggggaagagcacgattttgagggcaatacaccgacagtttttctctgaagtgaatagtgcgaacaaggcagagttttctggtttatttcagactgtagatactgcaggagaaagtgttcatgtaaagcaggcaagggttccgtccacgccgataccgcaggttgttgtttcattttctaagcaacataagatcacaaaccaagggcaggaggtcagattaatgattcctcaagaggtttttaagttgtaccagcacaagttatattcttatttttcggcaaaacgtactagtgaggttgcaaaggttgaatctccctcaaaagagactgagtttactgagaagatgaattcatcggactcaaccgattttttcatccgcaaattcaaacaatacttagtaaaccaaaaagtagagcaggcctttagtcaaattgagcatcaggtttcccaaattgaacaagtcgatacattcttcaagaagctggaaagtgcttttcggaaaatgtttgacgatgaattcatgcagatagagtttacacgaagtaattacgaattctatctactgctttcagatggtcgaagactcacttttgacaccctttccgaaggtttttcagctctgctaagtattcttatggacttgttcatgcgtgtagatttgattcgcaagcaagtcaatgattatagttacaatccctgtggcattgttctaattgacgagcctgaaacgcatctgcatcttgaattacaagagcaggttttacccttactaacaagtctgtttccgaatattcaatttatcgctgctacacattcaccggcagtcattgccagtattaagcaggcgactatttttgacctgacaactaaagagagccgtactagtgaggagacagcgggtcgtagttattcggatttgatgagagggcatttcgggcttaacaacgaatattccagcattgctgatgagctacttcgaaaagttgaccagatactgaaagactataaacatcagccggaacaattgaaggccaagctccaacagttttttctggaaaatgaagcttacttctcaccaagctttcgggttgagttagaatcaatgattttagaaaacgcttaa

SEQ ID NO: 86023 - DNA, 651 bp, Spirosoma linguale DSM 74
ttgccagctattcagcaaacattgacgaagcctaaatgccacgaatcgtaccgtaacgccgatttatttgaagcgtttgatgagtgcttctttaaaaaatgctacttgaccgaaggggcgttctttacctcgtggtctatggacgttgagcattttgttcctcaaattgagcgtcctgatttaaaatacaactggactaatttatatccagcgtcgcatgacgcaaatatgatgaagccgcgtaatacgccagctggaggttatcttgattgttgtgatccaaatgatgatgtcgaaaacgaaatcctttgctttatagattatgaaaacgatactgttcattttgaagcaaggaactcaacaaatataaaggctgtcaacacagctaaacttttgcaaaaactacacaatggagatacaatcgaaacgaagcgtaaaacggctgaattgagaaatgcaattcatggaaaatacaagaaaatactggagttgatcgatgactggcgggtggcccgcgagattagagatgttgaagctgaatttagaactgaacgtatcctaaagggtcttctttctcgaaaaacttcctttacaatgctaatgcggtcgactaaagctgttaaacgcttaccaccttcttttttcgattaa

SEQ ID NO: 86024 - DNA, 1263 bp, Spirosoma linguale DSM 74
atggctactgaaaacccccgcgtctggttcaagagtatctcactcgaaaacgtccgttccttcggcacaaagcagacgatcaacttcaccgacaaagacggcaatgccgcccgctggaatgtgattttaggcgacaatggaacgggaaagacgacggtgttgaagtgtatctatatttcggcacagaattcttacagtttttatgagtatgagtggagttataaaggcttagctcgaattaatagtaaagggccgaatgtaatgggtttagtgacaggggtattagggataaatgataatgaggagaaagtagggtttagtacgaaatatgtgcctttagagtctggtagatttagtgttgatattttagatgagtttaattttacactacctgaaagaaataattttgaggtaatatatgcttatggtgcagcacgacggatcagtgcaggaatattaaataactatgcggaagatgaaagacgagttgtgaatttgttttcggaaaatagcgcactactaaatgctgagaagtggcttattcaagcagagtatatttctttaaaagaaccaaaatttgctactcaatttcttatagttctaaatatattaaagaagctatttagaggtgaagtatctgatatatttattaaaactgaaaccggagagcccagagtcttctttaaaactcactacggcgacgttcgccttcacgaattaagcctcggctacaaaaccctaattgcgtggatggttgattttgccaaaggtttgcttgatcgctatccagatagtgaaaatcccttagccgaacctgccgtttgtttagtggatgaaatagatttacaccttcacccaaaatttcaacgaacgattattcagttcctaaccgaaacgtttccaaatacacagttcatcgttacggcgcatagtccgttgattgttcagtcggcagaggatgcaaacattattttgctgaagcgtgagggcagtgaaacggtggttgctgatagtatagacgtgcatagctggcgtgttgaccagattctgagtagcgatttgtttggtggcataagccccagaccgccacaggcagaagatagaatgcaacgccgacgtgcgttgttattgaaagatagccgaaccgaaaaggaagataaagaactggagcaactggatgaagaactgggtcagcttaaggcttcagagtcggaagaagcgttaaaagcacttgaactaattgggaaagttttgagcaaataa

SEQ ID NO: 86025 - DNA, 738 bp, Spirosoma linguale DSM 74
gtgattaaaattgacaaatccgccgtaatagtaccatcaattttagcgagtaatggaagaggggagcaggcagcagatgcgctaaaggctttgtttgataagggagatacgacctttgtgtttaacaaagctatctatggtcataaaacagtaaaagaagcactaattgaaattcagcacaataaatgttgtttctacgaagctaaaattacgcacatttcgcacggtgatgtcgagcattttcgaccgaaagcgggttatcagattgatgagatgcaggggttgataaaacccggctactactggctggcctatgattttagtaacctgtttttctgttgtcaggtatgtaatcagacatacaagaaaaactattttccactagccgacgaacgtaaacgggccaattcgcataatgacgattacacactggaagaaagtttgattttgcatccggcactcgatgtgattgatgaccatttggggtttgaagcggagatcataaagccgaaaaatggctctcaaaaaggtgccgaaacgatcaaacgaacaggattgaaccgccccgtattattagaagagcgactttcctatctgaaaacgctacgatttttagaagaggcagcaaaaggagatacagaaacggctatggaatgccgtgctcacttcaaagaggttggaaagaggaaacacctctattcggctatggtacgcgccaacttccccgacctaatctaa

SEQ ID NO: 86026 - DNA, 1284 bp, Fibrobacter succinogenes subsp. succinogenes S85
atgagagtaaagaaacttagaatcgagaactttcgtggaataaaaaatcttgatctagatttttcaaattcaaagatggtcgtctttgcaggaatcaacggtgccggcaaaacgacagtgctcgttgcaatgcaatttcttttctcatggtatgttgcccgactaaaaagccccaaaggtaagggattgtctttaagcgattgcgatattacaaatggtgaaccatatgcctttattgaaattgaagttgtagaaaagataggagaacaagatcaagtagttcgatggtcgctgtttaaaaaacgtacatcatatagaaagaatatagaacgacaagctagtagggctgaactaaataattatgccgattccaagatagaacgcttcatagatgggaaaaatcacaatctgccattggttgatttttattcagtcaacagagttgttgattccgtcccgttgcgtgttcgtaaaaaacacgctctcagtccactcgatgcctttgacagtggcttaaacaatagtgttaatttccattcatttttcttgtggttccgtgaacgcgaagatctagaaaacgagctgtatcgcgaacacggcacaaaattcaaaggcgatgttcaactcacagcagtccgttcggccatcaaaaatcttttgccgggttaccaaaagtttcgtgttaaacgcgatcctctttcttttgttgttgagaaaagaggcgaatcatttaattttagtcaattgtccgatggcgaaaagtcatacattgcgttagtttgcgacatagcccgcaaaatggcgatggcgaatcctaatgcagaagatccgctcaaaaaaacggcggttgtgatgatagacgaaattgagttgcacttgcaccccgaatggcaaatgggggttatagaccatctcaaaaaaacattcccaaaggtgcaattctttttgacaacgcattcaccgcatatcattaccaatctaaaaaactctgaaaaagacatgcttatagcattgtccaatggcgaagcggtccctacaaagcgaaaccagtacggtcagacggtcgatttgatattaaatgatgtatttcagttgagaagcttacgaaatgacgatgttcaaaagaaattagatgaactttggattttgctaaaaaaaggtgattgtaaatcagataagtatcaagagattctatcctggctcaaaaacaatataaaccccgctgacccagaattttttaaaatttccttgcaagaaaagcgtatagagaaggggcttgtatga

SEQ ID NO: 86027 - DNA, 606 bp, Fibrobacter succinogenes subsp. succinogenes S85
atgatctctgtcaagaaaaacgcctctctaaattcttttacagattatgtttatcgcgaaaaacctagaacatgggaagatctgcataaacagacgaaatttccagacctctatagccaaataaaattagctcttatcaaagaacaaggtggcgttagtgcctacacagaagagccaatctctccaaaatctcatatagatcatttctacaagagaagtttattccctaagcgaacttttgattggaacaatttatttgtagacggtctaagcgaacattatggggccaaatataaagacagtattgtcaccaacaaacgtgattacgatttgctaatttctccaaacgaaaacaatgttgaacgatattttacctatatggaaaatggagaaataatcgttgctcccggattgtcaaaacaagaagcccaaagggctgattacacgataaagacctttaatctaaataattccgaattgaaatcaaggcgtgctagaattttaaaaaatgttcacgattttggaatgggattgacgcccaacgacatccgatcagcattagttgatgctggttttaaaacggttgttgaatatgcattgatatag

SEQ ID NO: 86028 - DNA, 1344 bp, Haliangium ochraceum DSM 14365 [sequence omitted]

SEQ ID NO: 86029 - DNA, 762 bp, Haliangium ochraceum DSM 14365
atgatcgatctgcgcggtcgtcgccccgagacgccgcccggattcgatcacagccccgacatcgcccgcgcacgcgcccggatccaggcccgcgccgcagccggcaagctgctgcgcgcgagcgactttccggcgctgtggctggcgcacaaggatgtgttcgccgcggcgcaacgcgacaagtgcgcctactgcgagaccgagagcgcggccgcccagttcggcaccatcgaccactaccgacccaagaccagcatcgtcgaccgagcgtccggcaaccgcggcaggcgtcgccgtccgggctactactggctggcctacgactggcaaaactggctgtacgtgtgccaggtgtgcaatcacgccaagggcgagcagttcccgctacgccggcggcgacgcgtgcgcccgggcgccgagcgcgacgagcggccgctgctgctcaacccctacgacaccgaccccgcgccgcatctgcgcttcgacgcgcgcggcggtgtccgcggcctcacgcccgagggccggcgcacgatcgaggtctgccgcctcgagcgcatacacctggtgcgcaaacgcgagcgcagcgcgcgcgcgctgcggaccatgttcgacacctaccacctggtcgcgcgcgcccggcccgggagcgccgcggagtttctcgagctgctcacccgcagcacgcgcgccgacgccgagtacgcgggcatggcccgcgacctgctgggccagtggctcagcgcaggcgctcagcgcaggtaa

SEQ ID NO: 86030 - DNA, 1323 bp, Sulfurospirillum deleyianum DSM 6946
atgagaatagataaaatagaaatagaaaattttaaattgtttgataaagtagaatttagcttcaatgaacatttcaatctcattattggtatcaacggaagcggtaaaagctcacttttacgagcacttgctgttgcgcttggtggctgggcgaatgcatatattaaagacgatagaaacttacgtcctatagaaaaaaatgagatcagagaaattcaaaaagatggacgatttgataaaactaaagatactctaatcaaaacttacggtgaagcacgagttataaatagatattctaatgaccgtaaggccaatgtagaatggacgaggagaagacaagaaaatcaagagacaagcttaagtggttcaattcaatatgaaaacccagcagacggaactttttctacgtggtattcgcttaattttaatactcttggctctgatatcttaaattatgtagataaaggacgaactttcgatttgccattaatagctgtttatgaatgtgatagattgtggctcgcaaaaaatcaactcaatattgaagcttctgctaaagcacaatactcacgttttgatccttatgtcgattgtttccataccggggcaaatcatgaagcgataggcgaatggcttttaaaacatgaattggcatctcttcagctaaaagaagaaacccctgttttactatctatcaaaaatgctgtcagaaacgctcttgaaaactgtaccgatataagttttgattttgaagaaggtcgtgttattgtcgattttgaagacaagtctattccttttgagcaccttagtgatgggcaaagaaccattttaggattgttttgtgacattgcaagaagagctgctattttaaatcctcattttggtggagaagcaagtgaaaacacttctggcgttgtacttattgatgagctagatttacatttacatcccaaatggcaaatgaaaattatcggtgatttacaaaaagtatttcctaatattcaatttatttgtacgactcatagcccaattctcttaagaagcattgaaaaagaaaaaattattgttttagaagatggcaaacagtctcaatcagagattttttctaaaggtcgagacattaattcaattttatatgattttatgggtgttcccaaaagaacacaagagtatgaagataaagtagataatctttttggctttttagatgatgagaatatagaaagagcagaagaattattaaccgaacttaaaaaagattacggtgagcgcgatgctattgtgattgaagcgcaaacgatgttagatgtgttgaaaccgtaa

SEQ ID NO: 86031 - DNA, 723 bp, Sulfurospirillum deleyianum DSM 6946
atgaaatttattgaaaaacaaaggaatagcgtaggctatagaagacttcttgaactacaaaaaattcctgatagcacctatgatgatgtcagtaataatgtttcaaaaaatgactttatccgcaatgaagttctcacttctttactagaagagcaaggctatctttgcgcttattgcatgcaaaaaataagtttatccaatgcttctattgagcatattatagggcaaaactacgtaaaagacagtgttgaattaggaaagcaacatcaaataaattacgataattttttagctgtctgtgaaggtaaaagttgcaaaggtaacctgcattgcgataaaagtagagcagcgtatcaaaaagaaagacagttatttgcaaatccccttgaaaatcgcattatgcaaaatattagattcaactcaaaaggtttgatttactacaaggatttcattaaaattgaaacgatagaaacacttaacaatcacgctgatttatacgaagattccaacattcgatatgacattcacaaagttttaaaccttaattgccaaaatcttaaagcacgacgagaagcgattataaatgctttaaagagattaacaaataattggactaaaaaaggcagaattgaaactgaactttctaaatatcaaagaaaacaaagtgatggatacattgaattttgtcaagttgcgatttattttttaaataaaaaccgataa

SEQ ID NO: 86032 - DNA, 1260 bp, Pantoea ananatis LMG 20103
atgataaatgatatcaaattatccataagagaagtcatcgataaaataaaagaaagccttaacacttcaatcgacaacagaagaaatggaaagtacacctacattataggaaataatgggacaggaaaaagcaagatattgggcgagttagcagaaacattgaagtctgttgattcaaagaggatcaccgcttgtatatccagcacaatccatgatcgatttacttatagcgaacatgagaaagtaatatacatgggagccagaaactcttctaatgcagtgtttctatcagcgatagacagacaattggcaaaattcatactacaggcgatggaaatagacaggcggtcattaaaaaaattagttgcagttttaaacatgagtatctcttttatttttggagaaaaaacaatcgaaacaattctaacgcctccagacaaagcaaatagagatactgaacgcgtgataaaaagagctagtgatttaggtttgctttccaaacaaaaaataaatacgctgaagcggattattgccggaaatggtagatttgaggaactgactaaagctcaggtctcaacactgctgagctaccttgatttaaacatagatttcactatcagaattgagctgagtgggggtcaatctattaattttcaagatctaagctcaggggagcaaaacaggtttcttatatttgcaaaaattcttagcgtaatgaaaaatggaaccatttatttaatagatgagccggaagtaagccttcaccttcactggcaaatggaattccataataatgtggataaactactttctgatataaaaaattttcacgtcattgtagccactcattcaccaacaattatcagtgaagctgtaaaacatgatagtaaaagtcttgaaaacacagtcgcagttttacaaagaaagaatgaaatcagtgacattaaaaaaactatattaattaatgataaatcagttgcttgtaagattcatagttttgcagaggtagcaagccatgatcagttagttcttagatacttccaaacatccccttataagaccagggaagtaagtgttgagattgcggatgtagtcttaggtatggcagaaggagaaaaagcaaaaaatgatgctttaaatatccttaacgaactaagagctgctattgggttatccagcgaagctaaaaagcagatcgatgcagctttagctttagtagaaaatgatttgataaattcattaaaaataaatggtgaataa

SEQ ID NO: 86033 - DNA, 729 bp, Pantoea ananatis LMG 20103
atgaaatctttatgcaatgacgttcaaaagaatcatttggaaaaattaattaatttgattagaaacgatgttatcaatgggggagaggcttggtcactattttcatcgccagaattatcaaaaaaaatcaccaggaataaaaagcattataaaaccataaaattcactaaggaagaggtcgaaacctataaagctctacgcataggagtaaaagaaaatcttttcaaacagtgcttaggatgttgtgcatattgtcgtcgcccagtagggcattatggatgggcatggcacattgaacatgttattccaaaatcaaaatatccattattaacattcgaaatgtctaatttaactgttggttgtgtacactgtaatcagtggaaaggatccagagtcgataagaaattacaaggaaagaaactacccattattaatccattaggtacagacttcgtttatcctgaacatcttacatatgttcaaattagtacagagtcactgtgctttgctaagtactccattcattcgacagagggacggagaacatatgaattgttatcgttcgaagaacttgaacgagcttacgctattaatggcatgcatgcccctactgctgccttgcatgagcgattgactcgattgatgtataaaaacctcgcagacccagaggggcaggaactggtagaactgctgggagatttaaaattatcaatctataaaataccctga

SEQ ID NO: 86034 - DNA, 1353 bp, Desulfotalea psychrophila LSv54
gtgggattttttgtatatggaaatgtttctaaaggtaagcctatgaagataaaacgactgacactccataattatcgtcgattcaccaactttgaaattgattttgatgagcagttgactgttctggttgcgaaaaacggcgaggggaaatcaactatccttgatgctgttgccacctctctgggtgtttttttaacccgcctgcccagggtgacaggtctggagcccaaggccagtgactttcatatcttctctgacgggcatagacctccctatatgcgtattaccagtgagaccgatacaggttttgtctgggatagaacggagagacgggatcagacagaaaaaacggcaggagaaataccaccggggcgcggggtaaaagagctctatgcatatgttgatcagttcatagaggcagaaaatgccggtgccgattaccagctaccgatattcatctactttggcacggggcgtgacgtttttgaaattcccctgcctgaaccctgtctctgtaagcctcgccggcgttttgatgccctgcatggggccctgcaaagccggacaaattttaagggctttatggagtatttctatgccttgggccagttggaggcgagggcgcagaaaagatcaggttcccctgatcttgaactgcccgagttacgagctattcgtagggctgtaaactctatgctcccggatttttctaatccacaggttgtagagcagtcaaccattcaggtggattggcgtcaggagacgggagtcaagcagttgacaattgagcagctcagtagtggccatcggatgattctggtcttagtgatggacattgccgcccgtatggtgcaggcaaatcctcaaatggctgaccccctgcagaccgaaggtattgtcctgattgatgaggtggatcttcatctccatcccagttggcagcaggtaatcctccttgatctgatgaagaccttcccctgtattcaatttattgttaccacccatagtccccaggtggtttctgctgttgatcctaggagtctgcgggtaattgactggagagaggaccagcccagtctggtgcccgtgggcttttctgccggtgctgaggcccagcaggttctgctccaggtgctgggggttgaatcatcccgggtgcagcagctggcggttgtacaaaagttgaaaaggtatcaggctctggtggatgcggataggtgggactgtgaggaggccttggagctacgtcgggcgcttgatatctggggcggggagcatgagcccgagttggcctgtttggatatggatattcgcatgaaagaaatggatagattcgatgaagaagataattaa

SEQ ID NO: 86035 - DNA, 768 bp, Desulfotalea psychrophila LSv54
atgaagaagataattaagggagaagagcccaccttcctcagagagtatcatcaggcccatttcaccgatagctgggaaaagtataggaaaaacggcgataggcgtaatcaggtgcaggaacagatccgtcgagatcaggggggcttatgcgcctactgcgagattgatttgagaagggccgataccttgagcagtgcagattttcgggttgagcactttcatccaaaatcagataatggcgctgatcataactgggggttggattggcaaaacctgctgggctgttgccatgggggcagtcaaagggatgttattgatggtaagagacgctttaccagccctgactactcctgtgatgtgcctaaggatagagaaaattttgatgaggtgatcttgaacccccttctcctgccggcaagtccgaatctctttacctatagccggacaacggggcggatggaggtgcatattaacaactgtattcgggccggggtcgatgtggagaaggcccagaatacaattgacagcctacgtttaaacgcaaaacgtttgactgatctgcgtcggccagttttgctccatcttaatcggcagtataacagacttgtcagtcagggcttcagtgccgtagatgcgagaagacgacttgcccgggcaatactgcgccgaaataaggtcgggaactggccagcctttttttctgcaatcagggcttatttgggtaaacaggccgaggagcatttagagcgaattggttatgacggttag

SEQ ID NO: 86036 - DNA, 1293 bp, Aromatoleum aromaticum EbN1
atgttgaaccgtctctcactcgaaggcgtcggccctgcacagcagctgaccatcgacttcaagccccgtctgaactttctgaccggagacaacggcttgggcaagagctttgtgctcgacattgcctggtgggcactgacgcgtacctgggcccgcggcgtgatggcagcccctcggcaagatgccggcgagtccagcgttggctacagctacacgggcagcacgggcgactacgcgggcaagcgcctgtttgaccatgaagcccagcagtggtcgatcaaccagggacgacaacccatccccggtgtggtgatctatgccggcgtcgatggcagcttctcggtatgggaccctgcccgcaattactggaaaggcgacaaaggtgaagcagcagcgtcgaatcgccctcgcagcttcgacttcacccctgacgaggtttggaacggcctgctggcaagcgatggcaagactcagctgtgcaacgggctgctgcatgactgggtgctgtggcaagaggcctccaaacctgcttttgacgacctggtgaaggtactcgatgccttgtcaccatcgggcgtcgagaaaattcgaccgggtaccccgatgcgcgtgggcgacagcgtgaaggatctgccttcgctgcgtatgccctacggtcaggacgtacccttgattcacgcctcggccggcatgcgccgaatcgccgcgctggcgtatctgctggtgtggacctggcgtgagcaccaactggcctgcgagcgttttcgcgtcaatccggcacgtgaagtcatcttcctgatcgacgagatcgagtgccacctgcacccgcagtggcagcggcgtatcgtccccgccttgttgagcgtgatggatgcgctgacaggcacgcgcgacgtgcccgtgcagttgctggcggccacgcattcacccctggtgctggcatcggtcgagcccgacttcgaccctgaaaacgactgcatctgggacttcgacctcgtcgatggcgaagtgcgtgcgaccctctatccctggtcgcgcaaaggggatgtgaacagctggctggcgtccgaggtgttcaacctgaaggagccggtttcagtgcaggcagaggaagcgctgggtctggcacgcggttttctgcgcacggttgcgatgacacaacagccgctcaccgatgagcaaagacaacagttgcaggacatcgacgccaaattgcgggcaagcctgagcgacgtggatgcgttctggattcgctggagtggttttcgtgaccaactggcgggccaggcatga

SEQ ID NO: 86037 - DNA, 654 bp, Aromatoleum aromaticum EbN1
atgatccgggtggagcaagccgcagagccggcggatttcgacagcaaggtcaggcagcccggcctgcgtgcgattgccgagatgacgggtgcgcctgggttgcccaaacgcaggggcaggcccagggcgatgatcgcagcatcaccagacgaaattccggccgacaagtttccctccctttggacagaagctttgcctgagcttctcgagagctacagccgtgtctgcgcttacatgagtttttacatcgaacgcgtgaccggggctgcgtcggtggaccacatgctaccgaagtcggccgactggcaagaaatctacgagtggcgtaactaccggctggcgtgctcgctgatgaacagccgcaagaacgtctatcgcgatgtcctcgaccccttcgagatcgaggacggctggtttcgtctggaactggtcgggtatcaggtgatcccggccccagatttgccgccggacatccgcgagaaggtccaagccacgatcgatcggctcaagctcaatgactatgaatgcctgaaactgcgtgaagagtacgcagaggagttctactgcggcgatatcagtcaggatcgtttgcgccgccatgcgccttttctggccagggaaatcgaacgagagccggagagacggagaggttga

SEQ ID NO: 86038 - DNA, 1299 bp, Aromatoleum aromaticum EbN1
atgcatatcgatacgcttcgggtagagaacttccgctgctttaagcaggagacgttcgagttccagtctggattcaacctgcttgtcggtgtcaatggcagcggcaagacatcgctgctgaaggcgattgcagccgggttggcaactccgatcaacgggttgggaaaaagcccacgttggccgcatgccgaggaggcgaacgcccgccttgccttgatcgaactgcaggggcgggttcggtatgagcggtgttaccccgtgcgtatcgagctcgaaggcgaagtttgcgggtctgcacgaagttggtgggtggaacaacccgggccggctagccaatcaaaattcgaacacacggttttttctgcaatcgcggacgagtctgcccgcatcgctcagggaggacagggcgctttgcctctagcggcgttctatggagccgaacggcagtggcggctgagcggggtgggcgctgacaccgccgtgcggcatcaggattcgcgcctggacgcttatgcctcatggttcgatgccgccctcgacatgaaagggctcgaaacctgggtcatcggcaaatcactggaacgcctggaagccgaatcggacagccgcgatgtagacaacggcggtgcgctcgatgagctggcgctggtcaaccgcgccgtggcgcttgcgataccgggggcgaaaggcttgcgctacgacatcaagtaccggcgcttggtcctggagtggcaggacgccgaccccgtaccgttcgagaccctgagcgatggccagcgcgccttggctgcactggtggccgacatcgcgcgacgcatgtgcctgctcaatccccaattgggggcgcgtgtgctggacgaaacgcctggcgtggtcctgatcgacgaactcgacatgcatttgcatccggcgtggcaacgcagggtctgcggcgtgctgaagactgcgtttccgtgcatccagttcatcgccgcctcgcattcgccgcagatcatcggcgagctcgtggccgacgaaatcctgctgatgaagggcggccaggtagtgggccatccagagcgggcgctgggtttgccaagcagcgaagtgcttgccgagatcatgggtaccgaaccgcagaatacggaggtcgcggccgcactgcgacgaatccatcaggcgctggacaacgagcaactcgacgtggccgagcgggaaatcgtggcgctggagtcgaaggtcggggcgattcccgatgtgatcgaggtgcgtagtgagctcgacagcctgcgttggctgggcgaggaggaccagccttga

SEQ ID NO: 86039 - DNA, 687 bp, Aromatoleum aromaticum EbN1
ttgagatgcatcgtgaaagggccggaaccacgcgagttgctggattggaagcgccagaatcgagcaagcccgcagaatctgacctacacggggggcgggtttccgcgtgaagcggtcaagcatgcgttgatggttgaacagcatcatctgtgcgcttatacgatgcgcgggctgaagtctgcggccgattgccacatcgagcatgtgttgccgcaggcacgaaaaaacccggaagaaacgatcgactaccacaatatgttggcctgctacccaggcagcaacagcaagacggtatgcgagttcggcgcccatgcaaagggcgactacgacccggaacggggtccgttctgttccccattgcacaaagcgacaccttcgaagttcagattctctgagacgggagaggtgactggtcgtgatgatgtggcacaggcaacgatcgaggtgctgcggctcaaccacccgatcctggtccatgaccgcgaagctgccattcgaggcggtttgaagccgggcagacgacggcagttctctgcagcggctgcgcggcgtctggctgccgaggtccgaaagccggacttcgaggggcgattgcggccgtactgcgaggcgattgcgcaggcggcgctgaagtatgccgataaggaagagcgcaaagcgcgccggctacgtcagcgccgtgtttag

SEQ ID NO: 86040 - DNA, 531 bp, Escherichia coli IAI39
atggcctcgtcccgggatcgccagttgaccgccgtcagaacggccattagtcgctttatgccagggttcagcaacttacgcgtcaggcgtaaacctcgcctgcatatgtcgatagataaaaatggccagacactgaatgtgctgcaattatcgcagggtgaaaaatcactgatggcgttagtcggcgatattgctcgccgcctggcaatgatgaacccgatgttagaaaacccgctaaacggcgagggaattgtattaattgatgaagtggacatgcacctgcatccaacatggcagcgtacaatcatccagcgtctgacgacaacattcccacattgccagtttgtcttaacaacccactctcctttagtgatcagtgattgcaaagatgtgctggtttattctctggatgatggcgaattaacgcagctcccgtctctgtatgggcaagatgcgaatactgtgcttttgaatgtgatggatacggatattcgcaatgcaacagtgggtgagagcaaaaccacgggataa

SEQ ID NO: 86041 - DNA, 624 bp, Escherichia coli IAI39
atgcaacagtgggtgagagcaaaaccacgggataaaaatgccaatcagtggtttcaggaactttatgcgcaaaaaaaatgggatatcgttggcgatctcagccagcagtgcgctcaggagcaattttatctctgtgcttattgctgcgatcgcgtgacaggtacaaaccgcgataccgttaatgaacatgtcgaagccagggatttagctcctgctcgcagtctggaattcacgaatatcgttgcaagctgcaaaacaaaaggccagtgtgacgactcgcataagaaccagccattgctgttaacgccgcttatgccggaatgtgaaaccgagtttatcttcaagatcagtggtcgaattgaagggacgacgccgagagctatcgatgcgattaaggtactcaaccttggcgatagtgaacgtaataatcgtgcattgattgaaaaacgtaagcagctttccgacagccttctgtgggctaatggcattgacccttcagaggggcttgaggatgacgacctgctgcaagcggttatcgacgaattactcacccccgtcgacggttatctggcacctttcgctcccgtggtggcgaatattctaaaaaactggatgaccgcatga

SEQ ID NO: 86042 - DNA, 1374 bp, Escherichia coli O127:H6 str. E2348/69
atgaaaagactatattatacccatcatgatagtcgaaccttaaaacttgctatagaaggtgatgtttctgataatgcgaatatttttacagtaattgtaggtaaaaatggcgttggaaaaagcagattgttatctcagattgctaaagactgtattcaagatattcatttcttgaaaacttttaatccattatttgacagagaaataacaccaaagttaattgccgtatctaccagcccattcgataaattccctccagggcgtaggtcattaaatcaccaaaggaaagaaaataattatcgctatgtgggtatgcgtggagaaggccccttcggcgtatcaaatgccgtatcccttttatcttcagcagcgagaggttggctagagaaacttgcttattcagaaaatcctgcaaatttactcgatgtttttcattctattgattttgagccccatatagagtttgtatttaaaccaacttacaacggaccggacactcctgactataacttcattggtgtatattcagatgagatattaacggaagttaaggagttatatttaaaatacaatataaaaattgacaggaagaatattgagagtctcttaaagttaaactccgaatcacgtcatgatatttacgaagcactggttgaaattaatcgatttgaacctgaacgtagggctgtaaccttgtcagtcgattttaccaatggtgaaacattggttggctcgacttatgcgaataattatttttctagatcaattcttaaacttatgaacgctggcttcatgagattgatggatatgcgactcataaaaaaaagctatggtcccatgtcacttaaacgtgcgagctcgggagaacaatgtttattagtgatgttgcttggaattgcagggcatataactgatggttctataatactaattgatgaaccggaaataagcttgcatcctcgatggcaggaagagtttatcattatgttaacaaaagcatttttaacttactcaggttgtcaattcataattgcaactcattcaccacaaataatatccaatttgccgaataaaggttgttatataacatctttgtcgaaaagttatctttataaagcaaaatactttagcaaccggtctgcagactatcaacttgcggaactatttgatgcccctggcattatgaatgaatacattgccagattagctttcaatttactttcaaaagttaagactgctaagttagtaacagatgataattggcgtgaattaaaacaactccagcttctccttgaaaacgttaatagtaatgaccctattaatgaactcgtaaattccgtatctcaggtgtgtgaaatttatgccaaaaattaa

SEQ ID NO: 86043 - DNA, 636 bp, Escherichia coli O127:H6 str. E2348/69
atgccaaaaattaaaaatccaattagattcagcgcagagtcattagatattattgagaaaaaattgtcttctccagattttaagcataccaactggggagatgatgatttgcaagttctccgtgcagaaattagaaatcattacagagaagaacaaaagctagaatgtgtatattgtcatgagcctattggggtaagagctgcacaagctgctcctatagagcatattgtgccaaaatctcaatatctatgttttatttttgaacctaagaatctatgtgtagtatgtcctgactgcaatgaattcaaaggtaaaaatgaagtgttatttgaacccgtaataaatggggggcggcgcaaaaactatccaactgcatctgcatcatttcgcatcgttcatccacatatagatgattatgagatgcatattataaaagcaaatcgtgtttatgtggacaaaacacctaaagggcactataccattggaatatgtaaactaaatagattttttcattattttgggatgtgtgatgaatttgttaatgatgcaaaaattgctgaggcaaatgaaaattttttcaaaaaaggtagtattactactaatgaattattggatgatgacattcatttgatttaa

SEQ ID NO: 86044 - DNA, 1398 bp, Sorangium cellulosum So ce56
atgacgacgaggaaggcagcggcgggcggggccaagcgccggatcgcgcggaagctggggccgagcaagggcgcccgtggcgtctacttcttgtcgctcacgctggagaacgtgcgctgcttcgggccggcgcagacgctcgacctgtcgaacggcgaggggaagccgcggcagtggaccgtgatcctggggaacaacggggtagggaagacgacgctgctgaaggcgctcgtcgccagccggccggtgttggctgacgaagcgcccgagtacgttatctgtcacatcatttcgccatcgaaatttctcatcaacaatgaagaactgctacgcacctcggcacgaactgcaatcctcgagagccgtatttcgttcggcggcttgatctctgcacctgaatccaagttccgcgcggagacactgcatgccaaggtcgaacgttcccgaggtcgtggcaatatcgccaagcgggtcgagttggccgatctgttctgtgttgcctacggagcctcccgtcgcatgggcgcgagcgccttgacggatccccgtgacgacgatccgatcgctaccctcttccacgatcacgttcccctgcgcaacgccgaggagtggctcctccaggccgactacgccgcgaacaagccctcaccgcaccaggagcgggctcgcgcccggcgggacgcggtccgatcgatgctcatcgagctgctgcccgaggtcgaggacatccagatcctcgctgatctggacgataaccctgcacgcccccgccctggtatcctgctcgagacgccttatggccgggtgcccctccagggcctgagcctcggctacaagaccttgctcgcgtggatggtcgacttcgccagccgcctctacgagcgttaccccgacagcgagaaccccctcgcggaaccggcggtggtcctcgtcgacgagatcgatctgcacctgcatccggcctggcagcggaagctgctcagctatctctcggagcgcttccccaacgtccagttcatcgtcaccgcgcacagcccgctcgtggtccaggcggcggagaacgccaacatcgtcgtcctgcgtcgtgagggcgaccacgtggtcatcgacaacagcggcgcggcggttcgaacctggcgcgtcgatcagatcctgaccagcgacctgttcgggctgccgagcgcgcggccgcccgcgctcgacgcgctcctcgccgagcgccgggagatcctgaccaagccccgcctctcgacggcggatcgacgcgcgctcgagcgcgtcgagcgagagatcggcgagctgccgaccggcgagacgcccgagcagatggaggccatggacatcattcagcaggcggcgcgctcgctgaagaaggccggtggcggcgcctccagatga

SEQ ID NO: 86045 - DNA, 795 bp, Sorangium cellulosum So ce56
atgatccgggtcaagaagccggagcaggcgcccaggaagctgcgagacaaggcgcccgcggcgcgcgcggccgtctgcgcttcgtaccgcggcgcgcgcgcgtcgatccagcgcggcgcggcgacgctcgacttcgaggttgccgtctatgcccaccccgccgtgaagacggcgctggagacggctcaccacggcaagtgctgctactgcgagtcgaaggtgaagcacgtcgctcatggggacgtggagcactatcggcccaaggccgcggtgcagcaggcgcggacggcgcccatcgagcgcccggggtactactggctggcgtacgcatgggaaaacctcctcttctcgtgcgtgctctgcaacgagaagcacaagaggaacctgttcccgctgcgtgatccccggaagcgcgcccgctcggcgcgcgccaggctggccgcggaggcgccgctcctcgttcatcccgcgcaggaggatcccgagcagatcatcggctttcgcgacgagtacgcctatcccatcgaggggaatccgcgcgccgaagcgacgatcgacgaggtgctgcagctcaatcagcggcaacctctcctcgagcgcaggcgcgagcacctcgcgatcatccgggccatgcaggtgatcgcgggccagccggatatcgatcccgcagagcgagcgcgggcccgcgcgtggctcgatcgcagcgtcgcggacgacgccgagtacgcggccatgactcgagccgcgctccgctcgcactcacctcgtcgcgacgcctcccggcttgcgcgctga

SEQ ID NO: 86046 - DNA, 1272 bp, Sorangium cellulosum So ce56
atgaagatcacccgcctctccctccgcgactttcggggcttcaggagcctcgacctcgatttttcgccggacgtcaccgcgctcgtcggcgtcaacggcgccggcaagacgtcgatcctcgacgcgctcgcgctcctgctctcgtgcctcgtggagagcatccgctcggaagagcccgaaaccatcgcgccaagtgcgagcgacgtccggattggagcatcgacggcgcagctctcgctgaccgcagagatcagtgtgcagcctacccagtggagcatcgcgaagacgttgccggggcacccgcctggagcgccgagcgcgctcgacgcgctgcacgagcccgtcgcggccgcgcagaccacgatcgcgctcggctcccctttcctcccgctcgtcgtctacttccccacgaaccggagcgcgctcgacatcccggagcggatccgcaccccccacgccttcgatgcactgagcgcctacgacggcgcactcgagggcggggcgagcaacttccggggcttcttcgaatggtttcgccaggaagaagacatcctcaacgagcagcaggtcctccagatcctgcacgaggatcaaggcctcgacggttcctccacgccgtcgccattgccggccgtacgcaaggcgatcgaggcgctcctgcccggcgcgcgtagggtccgtatcgagcgtcgcccgcagcgcatgaccgtcgagctgaacggcacgcgcctcgacgtcgcccagctctcggacggcgagaagtgcctcctcgccatggcgggggacctcgcgcggcgcatggcgctcgcggcgccgaagattgagaacccgctcgatcaccccgcggtcgtcctgatcgacgagatcgagctgcacctccatcccgggctccagcgggtgatcctgccgcggctccagaaggtgttcccgcgggcccagttcatcatcaccacccactcgccccaggtgctctcctcgctgcacgcggcgaacgtccgcgtcctggagcgcttcgagctccggacgctcgaccgcggcacctggcggcgcgacaccaaccgcatcctcgaggcggccttcggcgatccagggcggccgcccgaggtggcggccaagctgaacctgttgcgcgacgccgtcgatgccgaccgctacgacgaggcgcgccagctcatccatgagctgtccaccatgatcgagggggaggaccccgacgtcttcttctaccagcagctcctgccgcctgaagacaccaccgaggccgcttcgtga

SEQ ID NO: 86047 - DNA, 675 bp, Sorangium cellulosum So ce56
gtgaggcacatcgtgaagggcgccgagccggcgacggtcacggagacgcgcaccgcatcgacgaccgacctctccacggtggctcgggctcgcaccgcgttcgatcagatcgacaagggtcgcgtgcgcgccaatctcgcgcacgagcagggctggctctgcgccttctgcatgcgccgtatcgcccctgacgccgccgacgctcgtggtgagcgcacgatgaagatcgcccaccgcacgccgatagacgtcgatccagcgcaggccctctcgtggaggaacctcctgggctcatgcgacggcgggcagcgctccgggtggcggacgaggagctgcgacgccgcgcagggatctaccgcgttgaccgtcgacccgaccgtgcaagcctcgtgcattcagcttcggtacgagcgccgcgacacccacgaggggctcttcatcacatcggatcaccccgctctcagagccgatgtcgagcagacgctcggcctgaactctggagacctccccctgctgcgggagcaggcgtggaaggccttttgcgctctccagcagaagcacgcgccgaagcagtacggccgccccgcgcggaccgcgttcttccagacgtggatgaagcagcagcccgcgcgtctccccgagatgctcggcgtgatcgaggagcgcctccggtga

SEQ ID NO: 86048 - DNA, 1287 bp, Sorangium cellulosum So ce56
atgcggataagctccatcaggctccagaacttccgcggattcgcggcatgcacgctgtcgctcgatcgtccgctcaccgtgctggtcggggtcaacggggccgggaagacctcgacgctcgatgccatcgttcgcctcctcggggtcaccaaccgggtacccggccgcgcgaagaggctgctggtcgacgcggacatccggcgcgacgctgccgggtgtgaaatcgacatggtggggacgacgaacggcgcgacattccataccgggatccagctcgcacggggcggtagacaggtcgtgaacacgacgttgccgaggcgcgccggagccggtgaggccgacgcaggctccggcgaggccgacgcaggctccggcgagcgcctgcccacggcgcttcccgctgcctactaccccgcatcgcgcatggtgtctgaccagcgttacctacgggcgcacggggccccgccgtcgctcttcgggcgaggcctcgacgcgatcgaatcgctcgaccgcctctcgctgcgcgcgaacttgagcttcgacgacttcttccagtggttccggctgcgcgaggacctcgagaacgagcagcgcacgcggggcgcccccgagtacgaggaccgaccgctgaaggccgtgcgcgacgcgatagagcgcgtcgtgccggggatctcgcggctccgggtgcagcgcctccccttccggctcgtcgcactgaaaaacggcgccgagtacgagctcgatcagctctcggacggagagcgcggcctgctggcgatggtcggagacctcgcgttccgcctcacgatcacgcaccgcgagctccccgatcccctccagggagaggcgctggtgctgatcgacgagatcgagcagcaccttcacccctcgtggcagcgcctcgtcgtgaactccctcctgcgagcatttccaaactgccagttcatcgtgacgacgcactccccgcaggtgctgagcgaggtgccgaacgacgccgtgctgctgctggacgattttcagttcttccgccctgcggcgccgacgcaaggacgcgacacgaactcgatcctctgggaggtgcttggggtagcagcgcgcccgcaggcgatcgtcaaagagctcgacgagatcacgggcctgctcgacgatggcaggcacgacgaggcgcgtgaccgcctcgaccgcctcgcccagtcgctgaccgaacgagatccggaggtggcccgcctgcggggcctgctcgacctggtggagcgcatcgatgcgagcgatcgcgaagaggcatga

SEQ ID NO: 86049 - DNA, 720 bp, Sorangium cellulosum So ce56
atgcgagcgatcgcgaagaggcatgaaccccctgagctgaaggcgtaccgggcggtgcccggcgcggcctacgacggcaaggacttcacccctgtcaagggcaagatccggacggcgctgctccgcgatcagctcgcgctgtgctgctactgcatgcgcaggatctccagcgatgcacgcccgcatccgacgaaccccgacgcaccgccggtcgtccagatgaaggtcgagcactggaaatcacaaactgccttcccgtcccttcaattggcctggacgaacatgctcggggcttgccttggcaacgagggccgtcgacctgcggatcagacctgcgatacccgcaagggcgaggatgcgatcctgctcaaccctctggatcccgcgcatgtatcgaccctgagctgcacgagcgcggggcgccttcaatccacggatccgcggttccagaaggacatcgatgaccatctgggcttgaatcacgccgtcctcgtcgcaacccgcaaggtgaggctcgatcgcgatctcaagcggattctgatcaagtaccggacatcgcctatcccagagagcgcgatccgagcgctggtggccgagctggagaccccgacggagacccccacggagaccccgacggagacctcgacgggaggaaagctgcccgagctctgcagcgtcgtccggctatgggcgcgaaagcgatttggtgcccagtggtag

SEQ ID NO: 86050 - DNA, 1332 bp, Sorangium cellulosum So ce56
atgcgaatcgacgagatccggctgatcaacttccgcgccttcgagcggttcgcgctgcatctggagccgcggctcacggtgctcgtcggccgcaacgggacgggcaagacgaccgtgctcgaagggctggcagtggcgctgggcgcgtggttgagcttcttcaacgcgagccgggacgaccgcccgatcccgaagtcggcggcgcgcttcgttaccacgatgcacggtggcgtcccgagcatggcgacgtgctacccggtgcgcgtcgaagcgagcggtgaaaccccgctgggccacgtggcgtgggcgagggagcttcgcggcgcagacagccgcacgacgacgggcgtcaccaagtccggtcgggaaggtccgctggaggcgacccggttcatgcctcatggcatcgacgatgcgatatcgggcgccgagcccatcgcgctcccggtgctcgcctattacggaacaggtcggctgtggcaccacaagcgggacaggaaccccgagagggcgggcttgaagtcgaggctgcaaggctaccgggctgccctcgaggccgcgtccgaccagaaggggttcgaggcctggatggcctggcgtgaggaggatcgtgtccagcgcctcgctcgcgccgcggaggaggggcgcccgctcaccgaggtgcggagccccgagctggagggggtgagcgcggcggcctgcgcctgcctcgagggcgctcgtcggatctattacagcgccaaccaccaggagctgcgcgtcgacttcgtcgatggctcctccctcccgttcggcgccctctccgacggccagcggaacctcatcgcggtggcggcagacatcgcgtggcgtgcgacgcagctcaacccatccttcggggccgaggctccggcgcgggcggcgggcgtcgtgctcatcgacgaggtggacctccacctccaccccgcgtggcaatggcgcgtgctggacgatctccttcgcgcgttcccgggcctccagttcgtcgtgacgacgcactcgcctcaggtgatgtccgctgccccgcgcggctcggtgcgtctcctcgacccggatcaccaggcgcaccgggtcgagaggatcgcgggcaaggactccaacaccgtcctggaggacatcctcggcgctccttcacgcttgaaggagacacgggagaagctcgacatgctggcgcggttgatcgacgacggccagctcgtggaggcgaaggcgctgctggcggagctgtcgggctttctcggcgaggacgacgctcagatcgtcgccgcgcgatgggagctcgccatggcggagaccggcgatgcgtcggattga

SEQ ID NO: 86051 - DNA, 699 bp, Sorangium cellulosum So ce56
atgcgtcggattgagaaggaccgcgagcctgcttgcctggcggacctccggggcacgccgggcgcggcctggagctcggtgcacggggcgcagcggcagcagatgcgggagcacgcgttcaaggagcagcacgggctttgcgcgtactgcatgtccaggctgccgggaccgcccagcgccgagggcatgaagatcgagcatttcgagacgcgcgcgctgtcgccggagctggtcttcgactgggacaacctcctcggggtctgcctgggcgacgtgggcatcagcgatggcggaggacatcaccgcgaccgctatcactgcgacacttaccgcggacatctcccgagggaggagcagcggatcgagctgaacccggcggcgtttccgcccgacgtcagctcgatgttttcgtatacaaaccagggggagatgcgcgccgcgcacggtctggagcccacgatgcgcgccagcgctgaggcgcagatcgagcgtttgaacctcaacatcgcccgccatcaacgaaaccggaggaccgcgatcgacgtcctccggtccgaatttcagaggaaagcgccgagggccgcgcgcgtgaaggcgctgctggagctttcgacgactccagatgcagccggcctcttgccgccctactgccaagcagccgcctactatctggaaaagaagctccggcagctcggctga

SEQ ID NO: 86052 - DNA, 1296 bp, Sorangium cellulosum So ce56
atgctgcgcaccctggaactcgtggacgtcggaccagcccccgagctgcacctggagctcggccggcggctcaacgtgatgacgggggacaacggcctcggaaagagcttcgtactggacgtgatctggtgggcgctgtcggggacctgggcagggagccctgcatggccgctgggcggagcaaaagagcccaaaatatcctatgaaatggatgacggtaccggcaacgcgtcctggttccagttcgagtcccaagggtggagcgaagcccctacgcgggctggcgcgctcgtgttgtatgcgcgggcggatggctccttcgccttgtgggatccagctcgcaacctcgatccggaggactacaagcgaccacgcggatcgaagcagacctctctgttcgctggctcaggtaccacgcgacgcccgccagcgtacctcttcgatcctgatgaaatcttggacggtaaaacgcatcaggggaagaccgtctgcaatggtctcatccgcgactgggtgagctggcaggagaagaagcccgagacacaggggggacgagcatttcggcatctttgtgaggctctcgagcagctctcccccaacccgcaggcgggcgccgagacgatcctcgctggcaaaccggtccgcctcttcttggacgacacgcgcgaattccccaccatcgataccggctacggagaggtgccggtgatccacgcctccgctgggatgcgacgcatcatcagcctcgcgtacctgatcgtctgggcgtggcacgagcacgtggaggcgagccgtctgctgaagcaggagcctatgagcgagctcgtctttctcgtggacgaggtcgagaaccacctccacccggagtggcagcgccgcatcgctccggcgctcctcagggtgctagaggccctcgctccgtcgatgcgcgtccaagcgcacctcacgacgcacgcgccgatggtcctcgcgtcgctcgagccctgcttcgatccagagcaggacaagctcttcgtgttcgacctcgaggcgcgcaccgtcgcgctccgagaggtgccctgggcgcgcttcggtgatgcgtcccgctggctcacgtcgcctgcgttcaacctccgtcgcgcgcggtcgatcgaagcggagcaggcgatcgacgatgcgagcgcgctcatgcgcggggaagagcctcgccgttccaggacgcgcgaggaggtcgaccgcgctctccacgacacgctcgccgatcaagatccgttctgggcccgatggcgggccttcgtcgaggagggcggaacgtga

SEQ ID NO: 86053 - DNA, 732 bp, Sorangium cellulosum So ce56
gtgatccgggtcgagctgctcccggagccgacgagcttcgatgaagaggtgcgggcgcccggcaacgcgtggctcgcgcagcatccggacgcgccgccggaggccatgccggcgctctggcgcccgatgacccacctcctcgccgatgggttcaatcatcgctgcggctactcggcgatgtggaccccccggggcacggtcgatcactacctgagccgctccacgcaccccgagaggacgtacgattgggacaattatcggttcgcgtccggggagatgaacagcaggaaggggacgtggaacgaccgcgtgctcgaccccttcgagatcgaggacggctggttcgagatcctcctgccgtcgctcgagctcgtgatggtcgaggagctcatccccgccgagcagcgcgatcgggctcgcttcacgctgaagacgctgcgtttgcaggacgacgacggcatcctcgagcaacgccagtcgtggtacgacgaatttttgaacggcgaggtgacgctctcgtggctttccaggaaagcccccctgatcggtaaagccgtgcaacgccgcctgggaggtcttgatcccgcaacgatcgccgacgacgagacgcactggcggtggttcctcgaagaggacctcacgctgaagggattgcgccgcagggctccgcgcctggctgaggccgtcgagacggcgcttcggcggcctgaccggcggcgtgcgggaggctga

SEQ ID NO: 86054 - DNA, 1509 bp, Acinetobacter baumannii SDF
gtgggacgtaatggctcaggtaaatctaacgttcttgaagcgttggtagctatatttcgcaatcttgatttaggagaagctccaccattctcatataagttgacttatagattaggtgagcctcataaaatgaatcagcctagtgatcgctggatggaaataactattgatgctgatccagagcgcggaacactagcaaaacaatatgaagtacatattcgtgatcttttgaataatgaaaagcaaaaggatatgtttaatgaaacaccttcagatgtaatcattcctttttcaaaagttaaacgtgataaagacggtaaagcaccgtatctacctaactatgtttttgcttattattcaggtcctagtgatcggctcgaaaaatactttaaaaaacaccgtacagatttttaccgtaagctactcaaagatgaaataaatctaagaggtgacatccgaccgttattctacgctaaacctaatcatagccaattcgtactacttgcttttttcttatcagaaaaagatagtgaagaaagagcatttttgagagaacatttaggcattgaaggattggacagtattcattttgtgatgcgccaaccagaatgggctaagaaaaaagaagaactattttggggggctcatggtgttgttcgtcaatttttggatgaactcatacaacatactttatctccaataaaagtgactcgccaagaagatacatctttaactggcaataatattcgcaatgagttctttcacctatttttaccaaatgtggaagccttacgtgcattcgccaaaaatcttacagcagacgaattgttcaaaatgcttgaaagcactttgctatcagaaattatctctgaagtaaacattcgggtaaaagtatcgagcagcgaagccccccttactttccgtgaactcagcgaaggcgaacaacaattattgactgtattgggtctgctcaagtttactggtggtaaagattccctatttttacttgatgaacctgatactcaccttaatccatcatgggctgtaaaataccttaaatttttacgtaaatttgtacctaatcacgaagctagtcatttattaatggtaactcatcaccctcttgctatcgcagagctggagaaagagcaagttcaagttatgaaacgtgatgataaaaatctaatatcagccaatatgcctgatgaaaacccacgagggatgggtatcaatttaattttacgtagtgatatgtttggtttgaagacaacccttgatgatgacactaatcagagacttgctaatagaaatgctcttgcggcaaaagaaacactatctgaagagaaaatagttcgcgagcacgggtttccccctgaagatgaagaacaatatttggctaggctcaattctgagcttgaagaactaggttttaatctagctacggatgatcctgattatcttgatttcctccgtaataagtaccatgttaaacatgaggaaagtaattaa

SEQ ID NO: 86055 - DNA, 810 bp, Acinetobacter baumannii SDF
atgcgttggatttgcaaggatataattgaagaacgcttgactcaggaatggcgagatctagcggagcacgcaaaaaatgagttaattgcagccccagataaagagacaagaaaagcaatattaaaaaaagtctcatccacgaaagtttggcgtgatttttatgatttactacctgactcgttaaatcacaaatgttggtattgtgaagctgaggaaatccggtcagatatgcctgttgatcattttagaccaaaaaacaaagttgaagatgataagcaacatgatggttactggtggttagcatttgattggacaaactatcgatgtgcttgcacattttgcaatagtcgtagagtttttgatgaaactgaaggtggtaaagaatgtcgttttccacttgagaatcctgacgaaagagcctttacacctacagatcaaatcaaactagataatgagcgaccgtactttctagatcctttcaatcctgatgatgaaaaattactttggtttgatcccgatgggaaaccaacctttagaccattagcaacagttgaacagcaaacaaaggtcaaaaactctattgaaatatttcatcttgaccaaacaaaaattgttagggctagaaataaaatacgcttggaagtagagcgacaagttagaaaaataaagaataatgatgatgtacaagcagctaagaatcaattacgacgcatggtacaaaatactgaaatgttatcacgtactgctattgtatatttgcgtgcacatagggaacttcaagaagtgaaagatattttagatttagattaa

SEQ ID NO: 86056 - DNA, 1407 bp, Sphingobium japonicum UT26S
atgaacgccagcaaggcagcgccagtctattacagcgagctgcgcctttccaacgtgaaagcgttcctgcccggtgtcgtgctcgatcttcggctggatggcggacctgcgccctggaccctcgtgctgggcgaaaatggcctcggcaagacgacactcctgcaatgtttggcactaatgcggccgatcctcaacgtggagcaaagcgcacgcaccgatgcacgcgaccccgatcgcgtcgaaccggcgattcccgcctatgaagacgcgctgctggtcgagattgcgcgggtcggcgaaggattgcaggtcggcatcgaagcggaattctcgatcggacgggaacttcggccggcggaacggcccaaagggcgcgggaaacacgtcgcgaccaaagcagcatatcgcgtcgataagcaggatctcaccgaattcgatttcagcaagaccaaacgcaagccattcctgccacccctagtcgttggctacagtgcggcccgccacccgccataccggcgcagcgatgtcgtttccgatcaagaggactcgaccgcctcgctgttcaacgctgagatcgaactcgccgatgcggtccagattctcgaagatctcgatcatatcgcgctgcgcgaggatcgtaatcgtagtgacaaaaccgatagcaccgcagaaagccgcgcggccatcctttaccgcgagatccggcaggcgctcgcctgcatcctacccgaagtcgagcttcccgagcgcatccacgtctatggtccggcacttcccggctttgccgaggaaaagaccggcgtctggatcgaaacttattcaggcgaagtcccgctccactcgctgagtattggctatcagacgatgttcgcttggaccgttgacctcgcgtggcgcatggccgaatatcacaaggacagcgtcgatccgctccgcgaacctgcgattgttctgatcgacgaacttgatcttcatctccaccccaaatggcaacgccgcgtccgtcgtgacctgtccagcgtctttcccaaagtgcagttcatcgtcacgacgcacagcccggtgctggcgcaaacttatctcgacacgaatatcgcggtggtcacccgggaaggcgatcacgcaatcatcgacaacgacccgcagaccgtgcgcagttggcggctcgaccaagtgagcgttgggttgctgcacgatgcagacccctatgcccccgagattgtcgatgccttcgagacacgccggactctgctcggcaagcagacgcttaatcgggaagatcgagaacggctcgaggccgccaatgctctggtggccgccatcccgagcgatctcgcgcccgaggacgataaggccgccaagctcatccgcgaggccgccgcgctactggtgaagcgcgcgccgtga

SEQ ID NO: 86057 - DNA, 795 bp, Sphingobium japonicum UT26S
gtgatccgccatacgaagtctaccaatgtgccgtcgtcgctagggcgcggggtccaagccaatgaggacaactgcaccgcctatgatgccgccgcagcgggctatcgaaacggcgagcgaagcttcgacattcgcaaagggatttatggcaccgatgtcgtcaaacgccaattgaaggccgaccagtacgacaaatgtgcattctgtgagtcgattttcgacgccaatgtcgctggagatgttgaacattaccgcccgaagggtgcggtcgatactgacgacagacgaatttatccgggttattattggctaggctacaactgggagaacctctgttacgcctgtccggattgcaattcctatcgcaagcgcaactgctttcccctagagaacgaagccaaccgcgcccgcgatcatcatgctgatatcacgctggagcagccgctgctgctagatgcctatggtccgcgcgacccgcgcgcgcatatcgcgtttcgtggggaagcggtgaccggattgaccgcggcaggcaacgcgacaattgatattctcgcgcttggaaggacagccctagcgcgtgaccggctccagcacctgcgaatgcttacgctggtgcatgaaagtgtgtccttgttcgacggcgatccgcgtcccgaggccatcgcgtttctccagcgcgcgcgcgctgagcttgctgccgcaatcctacccgatgctaggttcagcgccgcggcagccgatcatctggctgcgctcgatgccggcgagaatttcctccctgtctcggcggcgtaa

SEQ ID NO: 86058 - DNA, 2325 bp, Caulobacter segnis ATCC 21756
atgctaagcgtcgatcgcaccgacgaacctgctccagcctgcctgtccgacgagcggtcggcgccggcgcgcagcgcgctgctcgagctgtttacgggcaatagagagaccatcgcccaaacgcgagtacgcttcgagggcctggcggtagatgggccggagcttggagaggctcttggtcgactctttcgcaaccgttgcgccttttgcgagacccagaccacaacatggccttatcggtttcgcccgaccgaggaggccggtccgagtggccaggcccctggtcaagacgagtatcgctcgcacctctactacacttggctaaccaacgcctggcgcaacatctatcccatctgcgaaggctgccgacccaccgaaccctcgctctttccagtcaaccgcaaacgcacgccgcttccgaccgaggatgcgatccgcctctacgtcgaaaggccagcgggcgactggcgaggtgagatcgctgagagcccggtgttcgtcgcccccgcagggcgcgaggatctacgcaagcacttcgcacctctgccggacggcattttgatgccgaccgatcaacgaggcgaggcgacggtcagacatttcaacctcaatcgcccccccttggtcgaggcccgccgccgcgccctggacgactatttccgccggctgcttctggctcggcagaggcccgacttcgacaagatcatggactttgcgggcctggatttcggcggcggctggtttcttcacctctatcaactggcgcgcatccttgggcacggcggtggcgatcgtcaggtgctgtcgcgccagcggatagccgcttatttccgcgacagggcgaaacggcgggatttccagcaacgcttgcagaatgctcgtgacgagcttgcccgcgatcccgagcagatccggcgcgccaaactgcggccgtcgctggcgccggccggcacggcgcgaccggtccgcgtggcgttgcgaaacttcaaggcgatcgaggagttgacgctggagcttcccgagacctctggccgaatatcgagcgagggcgagccgctcgcgccgtgtctgatcattcttggcgagaacgctgcggggaagagctcaatccttgaggccgcagcgctggcgatcagcgacgaagaggtcagagccgacgaggcgccgctcgcctcaggcttcatgctggatccaatgctcatgggcgccgaagggcaaagccgcccccgcccaggatcagtgacggtcgactatgacgacggcctgcaaaccaagctcgcgttcgacaacaacggttttcaatcgagttttacgctggcgaacgttgagccgcgcatcccggtgttcgcctacggcgcctatcgcatgttcctgggccacgatgaggcaagcgcatcgggtgtgatccggtcgctgttcgagcccgactacgtgttggtcaatcccgaggagtggctcgcggaaatccgcgagactccgctatttgaggaagtgatccgagcgcttcgctacatccttggcatcggacaggccttcgacaccatcaaggtcgatgagaagaccaagcgttgcgtgctcgtcatcaaggtcgagcggccaggccagacgccaatcttcacgcgcacgccgctggcgacagtgtcatcaggcttccgcgcggtgctgggcatggcctgcgatgtcatgcgcaatttggtcgctcgccaaaaccgtttcagcgccaccttggccaaaagccgtgcggtcgtgctggtggacgagatcgaagcgcatctacatccgcgctggaagctgaagatcatgcagggcctgcgcgacgccctgcccaacgtcaccttcatcgtcacgacccacgatccgctctgccttcgcgggatggacggcggcgaggtcaaggtgctgcttcgagccgccaaggccttctgcgcgcccgacgagccgccaacctttgtcgatcagctcgaggatctgccgccaatcggcgcgcttacggtcgagcagcttctgacgtccgatcttttccagctgttcacgaccgacgccgacacgatcgagaccggtttggccggcgtaggcgatcttcttgcgcgagagcaggcccgacgtcttgagccaggcgatgatgcacgcctgcaaaaggtccgcgaccagatcggcaaggacgtcgccgtgagcctaccgatcggatcgaccgaagttcagcgcctcgtccaggaagcggttgagcagtatctgcgcgagcgcctcaggcggccgggcggcggactcatggctttgcgggaagagacccgcagagccatcgtcgatgccttgaaggcgctctag

SEQ ID NO: 86059 - DNA, 1035 bp, Caulobacter segnis ATCC 21756
gtgcgtaaggtcgatcgcaaaacggcgacgccgccggcaagtctcacgggcgccaaccgcaaaggtcccaacgaactcaagcgggcgcgcgctcacttcgccgcccatccgccgcgcgacgagttcacgttcacggcctacaagggcgacgatgttcgctacacgctggaggcgctgttccacggcaagtgcgcctattgcgaggctcgttatgacatggttggacccgtcgacatcgagcacttccgccccaagaacgccgacccgaaaggaacgcatgacggctattggtggctggcggcagcctggagcaatcttctccccagctgcatcgactgcaatcgcaagcgctggcactggacgccgacgcagttggccagcctgaccgagctgctcaaagagcagaagcagagaccggcggcctacgtcaaaaccggcaaggaaagcagctttcccatcaccgggcccagggtgacggccgagcctccaaccgcgcaggccgaggcgctcctgaccgccgagttggctttgctcctcgacccctgtgtcgacacccccgcagatcatattgtttttcatatcgaccgcgccgatccattgggcgtgatctatccgctcggccaggctggcgcggcgcctcacatcccgccgacggttgatcagttgcccgtggtcgaggcagcggctcgagcggccaatgtcagtccacgcggcgcggtgtcgatccagacctttggcctaaatcgtctcggtctggtgcaggagcgcacgaaggttctgcgccaactggaatttctgggcggaacgatcgaggagctttccctcaccgccgacgagcttgagggtctggttctggccgggcaaaacgccgtggttcgagaccgcgccgtccaacggctcagagcaatcgttcggcgcattctggctcaaatcagggcaatggcgcagccgcaggcgcccttctcggccatggtcagcgcctggattgacgcctttacttccgccagcagcgcaagcttgccagtcgcccgatag

SEQ ID NO: 86060 - DNA, 1251 bp, Comamonas testosteroni CNB-2
atgtttatcaatacagtgaagacgccccgaaacattactgttcattttgggattgagccagctaatgagtccaatcacatatccctgctaacaggccccaacggctccggcaaaactgacgtactcgcatcaatcgcaaaagtattccacggaaacacaaaaacaaccaacgcagtagtccgatggtatcgagaggcacggttttataggtcgacagctgaaaaaccaaacccagcggacgaggctgaatatgattacatgcccgtgcgcctcatcacacaaacatttagcccgttttcgagatttccgtcgggccgacgtcaatcagctcagcatttggcctctatttattcacgcggcaacgaaaccaacgagaactacatttgcataggcttcaatcaaaaatcgaggattgaacttcgaaccttcacatcctccattgttgaggacgcgattctccgcttgagtgaacgtccaaaatccgcacgggttgcatttcaagtgcttgaagacctaaatttcaaagagggaatctgcctcaaatacgtggccgacccaaaacttcagcaactcgtcgaaatcgatagacaacccgaccatttggaacgcatcttaagagttttcgcgcggactggaaagttatttctattaaatcaagttttcagtggcaggacactccaccgtttaaggcgcgagctcgaatcgggagacgtgaacgagacgattgaatacctgcgacatgctataaatatgatttccgagcatattgccggaagtcgaattattaaggggataaatgttaatgcatacagctatactgcattcaaacatcgcgacagcatgtcttcagatttcgcttatctccaagcattctccgttctttctcgactgggcctattaagaattacagcctgcgaacttcaacctattggaggcgaaacgattgatatacggcaggctagttcaggtcaacagcaaatgctgtgctcgattttcggtctcgcagcagcagtttacgacgaagccgtcgtactcatagatgagccagaactcagcctacacccaagatggcaaatgcagtttttcaagtatctggaaaccattctgagcgtcgtcaaaaattgccatgtaataatggcaacacactcacccttgattgtgcaagctgccgcacttcacaacgtgcaagttatttcgatggggcatgatactgcagaacaaaccacaactgagctcgacgactaccgatag

SEQ ID NO: 86061 - DNA, 789 bp, Comamonas testosteroni CNB-2
atgaaaagatttagaaggcgtgcaaacgtactacatccggtcaactcactgtcacaagacctgcactcagagattaaaaaacttgcgcttgaaaagtcactccactggtcaacttctgcaggtgactacgtgaatgccatcgttaagttccgaaatgaagtcaaggagcactattacgtacagcaacgcaggaggtgctgctactgcagcactgaactcctagaccacaaaatcacatttgatgcagagcatattctggataaagcagattatccagagtacatgtttgacgaggccaacatcgctgttgcatgcaaactgtgcaatcagaaaaaatctaacaaggcgatatcaacttcgggcagaagattctccgagctttcaaaaaaatcttccgactacagcatcgtgcatccacaccttgacgaatggaatgagcaccttgactttgaccaggtcgaccgcatcgtggcactcccaaactcccaaaaaggaaaaaatacaatagcaatatgtggaataaccgcattaaatgcgactcgccttgctgatgcatttgcaatcgaagactacaaagttgcagaagtaaccttgagaacgtttctggaagttgaagaccaagcgcgaaaacttgaactacttagtctgcttgatgaactcgcgcagcacggcgaaccagacgctgcaacggtgatgcaagccttaaaaggtgatgttcaagcgacaccgcaattaccagtagtggcgtcggctgttggaagtgcattaataggaccttccgctccataa

SEQ ID NO: 86062 - DNA, 1317 bp, Pseudomonas savastanoi pv. glycinea str. race 4
gtgagccaaggtacactggcgcatccgccagttctggtaaaggaaaccgacatgcgcctcgaccacctccatctgcagaattttcgttgttacgaagatgctcattttgatttccagccggggttcaatctggtggtgggggttaatggcagtgggaagacgtcgctgttgctgggtgtcgcgggatgcgtcgggaatttacttggaagcattggcgtccatcagccatcgatagctgagtccgatgttcggttcgcgttagtaaagttcgaagacaggattcgtttcgaacgcagctatcctcttgtattgactgcccaaggtggcgcgtttgagcgtcaggaatggcacgtatcgctagaacgcagcagtcttcagacaaatttcagcgcgctgcacagtctcgtattttcggaaaatctgattagcatcgatgtaagtacccacggggatttgcctgtattcgccgtctatcaagctaatcgacgctggctgacgatgagtgtaaccgctgagcttgctgcacagagcaaaccatcaagactggatgcgtacacctcttggttcgatgccgcctccaatttgaaaaacttcgagacctggttcatcggcaaaacactggagcgctttcaaaggctatcccgagtaggttcttccagcgttttcaacgacgaactgacctggataaactcagccatccaatgcgcactacccgacgccaagggaatagagtacgacatggagctacgtgcgttggtagtcgatatggatgaccgaaaaatcccgttcaacgacctgagcgacggacaacgcggaatggtcgcactcttcgccgatatcgctcgccgtatctgcctgctcaacccgcacatggggaaggatgttctaagcaagacaaacggcatcatcgtcatcgatgaactcgatatccatcttcaccccggctggcaacgcaccattgctccagcactgaaaaaagcatttcccagcatccagttcatcgccgccagccactcgccacaggtcatcggcagcctccaaccgggcgaggtcatcctgctgaataaccatgacggctctcacccaagagcaacctacggcctggactccagcagtattctggaagaagtcatgggtgtaccgcagcgcgagcctgaaattgaagcactgctcgacgagctattcagcacactggaaaacaacgaacttgaaaaagccagactgcagcttgatgcgttaaagcagaaagcgcccgatctgcccgagttcgcaggtgccgaagcgttgctcaaacgcaaggagctcattggccgatga

SEQ ID NO: 86063 - DNA, 645 bp, Pseudomonas savastanoi pv. glycinea str. race 4
atgaaacgcgtaatcaaaggagctgagcctgcgtcattcatcggatggaaagcccgcgcaaacgaagactggacgcccacctatccaaccctgcagaacccgcaaaaacgcgacttgcataattgcttgctgcaagagcagaacttctcatgctgctattgcggcagggaaatagagcttgatagcagccacatcgaacatttcagaccgcaggatcattatctgccattggcactggaatacagcaatcttcatgcgtcttgcctgcgcgagaccacaccaggaaacccgttgcactgcggtcactataaaagcaactggttcgatgaggacctgcacatttccccgacagaggacgattgcgaacagcgcttccgttatttgctcacagggaaaatccaaagcacgtcccacacagatcttcccgccacgacgatgatcgaaaagctcgcactcgatatcgcgtatctgacaaaaagacgccaagaggcaatcatgcgggtgtttgatgagcaaatcttagccggcatcagtgatacagagctgaacattttggtgcaaggcctgcgctctggggatgccaacaaacagctcgcctttggccacgttgttgcccgctatgcggagcaattgctggcatcttga

SEQ ID NO: 86064 - DNA, 1356 bp, Pseudomonas savastanoi pv. glycinea str. race 4
atgcagaactatcgctgcttcggtgaattcgagatcgacttcgatccgcatctgaccatacttattgcctccaacggaggcggaaaaaccactattcttgatgccgctcgagttgcgctgtggcctttcgtcaagggttttgatcttggcggtcagacaggaaaatccgccactattcagattgaagatgtgcgactggcccaattcggcagtggcaatatggagtcgcaggtacccagcgttatcgaggcaaagggcgtctggtgggaaagcgccgttgaaagtagctggctgcagcagcgcgtcagcctgaaaaagtccactaacactattggcgatgctggatcgaaagcactgacttcgtacggtaagtcgcttcaggagtgtgtgcgaagcgatgcacatgtcactctgccaatggtgacttaccttggcacttccaggctatggttcgagggacgcttcagttcggcggcggctcagacaacactcgataaaagtgagtactccagaacgtccgcatacctaaattgcctgtcttattcatccagtttcaagaccttcaccgcatggtacatctggatgtaccgcagctatcgtgaagctcagttgatcgctctggagcgcgatgaagaaatgtctgatgccgggcagcgctttgagaaaatcatctcagctgtcaaagaagccatcgacaggttgataaaggctcctacggggtggcacagactggaatacagtgccagtcatcaacagcaactggtcatgcatcatccggaccagggggttttacctgtcgaaatgcttagcgatgggctgcgtaacactatcgccatggttgcggacctcgcttttcgtgcctgcaaactcaacccgcacctcggcgagagggcgcccttgcaaacgccaggtatcgccttgattgatgaagtggatatgtttctgcatcccttctggcaacagacgatagtcggttcattacgtgcggcttttcccgccatgcagtttattgtcaccacgcacagcccgcaggtgttgagtacggtccgacgcgaaaatattcgggtgatcggtaaagatgcccaagggcgtttgattgcatcccggccccttgccatgacctacggtgagccgagcaacagcgtgctgcgaagcgtgatgcaggtcgatccgcagcctccggtggatgaaaagccgggcctgctacaactcacggaatgggtggaaaaaggtcgctatgacgaaccacaggcgatcttgctgatgcagcagataacggaggctctcactgaacaacaccctcaactgcagcgcctgcagcgcagcataaagcggcagaaggcattgcggggatga

SEQ ID NO: 86065 - DNA, 514 bp, Pseudomonas savastanoi pv. glycinea str. race 4
gcacgtcgaaaacaagagccaaaaccctcagcgtacttttgactacaacaacctcgctgcctgcgcgctggacagtcagagcgatctggaggtattgaaaatacaaggcgctgaggtatttggtgggcacgcgtcaggtaagtcgaaaggggtcgacatggctcgcttcgtttcgtgtcacatgcccgactgttcgcgcttcttcgcctatttgtctgacggccgtgtggtgcctgctgacgggttgtcaccggaggaagttgaccgagctgaatacaccatcggcctgctgaaccttaacagcccttatctccaaggcttgcgacaatcctggtgggatgagctggaagctctttttgaagagcatgttaatcaaaatatgagtctgcattgtctggcggggattgatctcatccctgtgggtgcgaacttaagtcagtttttcagcattacccggaattttttcggaggtatcgctgaagaggtccttgagcaagaggctggtcgctggtaa

SEQ ID NO: 86066 - DNA, 1716 bp, Sphingobacterium spiritivorum ATCC 33861
atgctaaacgtaaatatagtacagaacgaagtatataatttgctcattaagcattggcaaaaagatccttcttttcgattcacttttcgcaaaagtaatagaggaagtcgtttagataaaggttattggttttatggtaatgaatggtatttagcggtttcattctggacaggaatggattggaaaaacaaaacgcctaatatcatttttataattcatctagagtcaggaaatacttgtctcgaaattaatacttccgattctgatgaaaaaagacgatttataacccaattttttgtaaatgaattgggacttcagtcaaatgggataaggtaccaaaaatattatcaaggaaattatctggaatgtttagaaaatttcataaagaccgataaggttttaattgacaatataatattggaacatgcaaagtctttcttccctataattaagaatggtatattttttatagaagctgcagactttgaagggcaaaaagaaaaaattgatagatatagagaggatatccttatagaaaattcaattgaaactcaaaaacctataaaaataagtgagatagaaattgttaattatggccccattaagaatcttcaaataaatgaaatccctttttcatctcaatggatatttttcacaggagaaaatggtactggtaaaacatctatccttagggctatcgctaccgcaatctgtaatcaaaaaatacaagtaagtggatttgaagatgaaaatgctgaaattagcctaaaattattcttgtcctcatctgatacaattacttacttatatccatataaccaaaccttagaaaacgatacttttccattaactcatggttttgcagcctatggacaatccagactcaagaccactcatggattagactcaaaaaacttagaatttatttccacagaattaacatcatcactatttaatgatgaaacacatctgattgatttacaatatcagtttgatatttggcgcagtcagcaacgcattcgatttgacaaacgggaaaattatataactgagattcttaccgacatattaccaaatctatatgatattaaattcgatgatcaaatcgacggtgtctcagtaactacttatattgaaaaagaccatgaaaacgcagaatttgcgaaagtaaccttcaataaattagcatcaggactaaaaagtatgattgctatgataggtgatatcttaatcagattatataatcaacaaccagatgtcaatgatccgtctgagtttacaggaattgttttaattgatgaaatcgacatacatctacacccaaaattacagaagcaaatcgtccagcaactcagtaagacatttccaaaagttcaatttattgcgtctacacatagtccaatttctttcttaggagcacctaaaaatagtcaaatatttagagtagaaagaaactctgctgaaggagtcaaaataagaagattagatgaattattagagttaggagatcttttaccaaatacaatactaacatcaccaatttttggattggatgatattataccagaaagtcatgatcaaaagaaattagtaagaactgagacaaattattcagaaatagaatttaatgatatagttcaaaaacgaatatcctcttttattactgacgagaaagagcagcaattgattaatttatttaaatccagaagacaatga

SEQ ID NO: 86067 - DNA, 909 bp, Sphingobacterium spiritivorum ATCC 33861
atgagatttgtaataaaaagagaagaagataaaacagatcgattagcatcagacgaaacatacagagctttgctagaaataacaaatactcgtaataaagatttaattacagataccatttatagagaagcatacgatcaccctgatggaaagagatcaagagttgaagatcatctctcaatagcataccataataaatgtgcttattgtgaaagaatctgcaaggcagatattgaacattataggcctaaaaaaggagtaaaggaagatggctctcacccaggatattattggctttgttacgaatggacaaatcttataccttcctgcatcacctgtaacagagagggtgcaaaacacaataaatttccggtgataggtcctagagtatccgctcctgtattattggttgatggaagtataaatcttgctttatccaaagccggagttgacccgttactaagtgaaaggccttatttgttacatcctgaagtcgatcatccggaggattattttgaatttgaaatagatccaaatggtgaaggaattaaaattgttggtattgatggtgaaggtagaggaaatgcaactattgaaatttgtttgctgaaccgacttgaggtaaaattggatcgtgtagaacgagttattaatgattttaaagatgctataaatgctctttttgttaagctagaaaatggaaatattgatgataatcaattagcagatcgtattaatgaacatatcgatttgttatatatacgtagccagcaagaaaatagaaatcatacctaccttagcaaatatattgttgcatcagatcaaaattttgaaaaaatagtacttccatttttaccagatagaactagagcaattatattagctgcttttagggcgtatattccgtaa

SEQ ID NO: 86068 - DNA, 2313 bp, Brevundimonas subvibrioides ATCC 15264
atgcttcacgtcgacagagccagccatcccgcgcccgcctgcctgtctgacgaacggtcagagccgggacggcgcgcgctgttcgacctcttctcgctggatcgggcggtggctgcgcaacgcagcttccgcatgtcctcagtctatgtcgaggacaatgaactccactcggcggtcacacgcctcttccgcgggcgctgcgccttctgcgagaccgaggatgaactccgtccctatcgcttccggccgagcgaggaggcaggacccagccaggcagccccgccgcaggacgcggatcgcgctcacctctattatgcgtggttagccaacgcctgggagaacatctaccccatctgcggcggctgccatccccgcgatccttcgattttcccggtcaccggcaggcgtcgacgccttcccaccccgggcgaaatcgaccggaacttcacacagccgaccggcagctggatcacggagatcagcgaccacccccttttcctcgatccgtgcgaggggaccgatcttcgcaaacatctcgccgcaatacccggcggggcgatgctcggcatctccgggcgcggacaggcgaccatccagcattacgacctggataggcccggtctccaggcgcgacggggcgcggccttcgatcgctaccgcgcccagctgttgggtgccaccgatggcggcccccggttcgcgatgagattccaggacatggagttcggcggagggtggtatctgctcctataccagatcgctaggacgctgggcggcgggacgggaggccggcccgttctctcgatcagccggatcgatcgctattacgcgacctggctgtcgaacccggagtttcagttcctgttcgaccaggcctggttcgatctcatggagcggcccgagcagctcctagagcgggaggtccccgaacggtctctggtgcatggcgaggcgcctcagcccaccctgttccagatccacaatttcaaggcgctggagaagatcgaagtccggctcccgcctccccgcagcctcgatgggaccaaggttggaagccagggctcgaccctcgtcgtcctgggcgaaaacgcagccggcaagagcaccctgcttgaggcgatcgccctgtctctggtcgatgaagggacgcggaacgacctgcccggccagagccaggcctttatgctcgacccccgtctgatggggtcccccgacacgtcggagacggcccggcgaggcgaggtccgggtgacgttcgaaaacggctactggacgacgatgggggttcgcccgaacctgccgaccctcgatgatgacaggatctcccgcctcccggtcttcgcctatggcgcctttcgcctctacctcacggccgaaaagaaaatccggcggtcgtcgccaatccggtcgctgttcgacgccggctacgtcttgccgaaccccgacgcatggcttgcctcgctccacaagaagccggagttcgaggaggtttcccgggtcctgaaggtgatcttcggctttgatcaggaaggcgatgtcatcgtcgtcaagcgcggagcctgttatctccgggtccggcatcgccgcgagaacggcgatgaccttgtccaggatacgcccctcaaggccgtatcctccggcttccgctcggtgctggccatggtctgcgacgtgatgcgcggcctgctgagccaacgggaccggttcagcgcctctctcgccttcagccgcgcggttgtcctcatcgacgagatcgaggcccacctgcatccccggtggaaaatgcgcatcgtgaccgcgcttcgcgaagcgcttcccaacgtcaccttcatcatgacgacccatgatccgctctgcttgagagggttgagagccggcgaggtcatggtgttccgccgcgtcgagagccgcgcgccagacagtctccccgtcgtggtcgaacagctggaagatctgccggacgtcggctccttgacggtcgagcaaatcctgacctcggatctcttccagctgtactcgacagacggtccagacatcgaggcccggttcgcaaaggcggcggatctgcttgcggccgagcgggccggggcggacttctcggacgacgatcgggatgcactcaagcaggcgagagcagacatgcgccttctcatctcgcgcgccatgccggtgggatcgaccgaggtcgagcgcctcatccaggaggccgtcgagcaatatctcgcaacccggcgccgggcccgtgctgatgcgctcggcggacttcgcgacaaggcgcggcaatcgatcatcaaagcgctcgagggcctctag

SEQ ID NO: 86069 - DNA, 1047 bp, Brevundimonas subvibrioides ATCC 15264
gtgcgctttgtggatcgttcaaagcaaacagcgcccgcctgcctgacagaagcgaagcaggccggtcagagagagctggcgcgcgcgaggaagaagtacacgagcgccaacccgccctcgacgttcaccttcagggcctacaaagaagacgatgtccgccacgccatggaacggctcttccacggcaaatgcgcctattgcgaaagccgctacgacatcacggcccccgtcgacatcgagcatttccgccccaagggcgaagtggagggcgagatccataccggctactggtggctcgcggcggactgggaaaatttgctgccgagctgcatcgattgcaatcgtcgccgctatcagcattcgccgaccctcctcgcgagcgtgaccgccgtgctggacagttcgccgaccggcttcagccgggactatcagaccggcaaacactccagcttcccgctcgcgcccggcggcgtccgaatgacgaccgagccgatgggcactaagcggaaggacgccaccaaggccgagctggcgctgctgatcgatccgaccagcgacaggcctgaagaccatcttcagcactatatcgatcgccactcgcccatgggcctggttctgccgaccggcgggagtgcggtgtccttcccgcccttcgccttcgagggcgcgaaagacgcgatggcgattgagaaagccgcccgcgcggcccatctcagccctcgcggctcggtctccatccaagtctacggcctcaatcgcctgggccttgtccaagagcggacccggctgctgagacgcctggagctgctgagcgaactcatcctgaagctcttcaccatggaggccgatctggatgatctcgcgacgggtgaagccgatcccgtcaaacaccagaagctgaccgctcttgcaaaacaggcgaacgccctggcgcatcgggccttgtcagaagttcggcttgccggagccgacgaggcccccttcaccagcctggccaaggcgtggatcgccgacttccgtcgcgaactcgcgccgggcgtcatctga

SEQ ID NO: 86070 - DNA, 948 bp, Pseudomonas amygdali pv. morsprunorum str. M302280
atgatggatactctcggtgctgccgttcccattgaggccttgttcgatcagctagggttgcaaactaaattcaggatctcgctttctgctacgagtaaaagaaaattttcagaagcgctaagcagtccagatgctttacttgaatatattcataattattcaaattatcagcgtcgaatgcaggtcgatatgttcacgtccacctcaaaaaaagatgtgatgtctatatttgaggggtataaacatttaagacagcagactgataagtcacactattttgatatagatttaaaaagcgatgggcggggtcatagtgaaatatatgatttcctaaatattgttaggcgagtaggcctgattaaggatgtccatttagaactatttagagttggtgcttatgaatcttctgcattctctaatgcaagctctggtgaaactcagttgctttacggtttttctagtattctaaggtatgcgtgcgacgactctataatttttattgatgagccagaagtcagcttgcatcctgcttggcagattcgttatgtagggctgttgaaaaaagcattggtagctgttaagaattgtcatttgattattgctatgcattcgcattttatcctttctgatttggatgaggctaatagttctctccatgtttttaaaaaggaaaaagatggtggtatttctatcgagaatctcgagtattcaacttatgcatggagtccagaaaatattttgtactctgtttttaatgttagaactatcggtaatcatgcgttcgaaaaagatctgcaggaagcattaaatctgatcgcagttaaagacagcgatctggttcgcttgtcagtgctagcatctaagtttcaagggctggtgttcgactcatcggatccgctaaataaggtgattggagcaatcaggggatactctgatggccatcactaa

SEQ ID NO: 86071 - DNA, 630 bp, Pseudomonas amygdali pv. morsprunorum str. M302280
atggccatcactaattggtacttgaatattgataggctgcctcagtttcccgatgaggtaatagattatttagagggcctaaaaccacacaaggccgccctttgggataagacaaataaagaaatggcggagtataagtcttcccttcttgaacagctggctgaaattcaggataatagatgtgcttactgtggtcttagtttggattggaatctcgttgatcgagagcatttcgttcataaggggcagcttactggctatccggaattcatgttcaatctaaaaaatctatttgctgcttgtgggttttgtaatcgtagaattaaaggtcaaggagttacgttgcaaacatataatgagaattacgatgagtgtgttttttgtataattcatccatttttcgacacgccagaaaacgagattgagttcttggagttgcagcaaggtcagcatattcttgtgaaggctctgacacctaaaggccaatctacaatagatttctttttgctcagcgacaagcgcttgaccgttcgacgggcaggttttattgcggagcgtgagttagaagctgagatggactcaggggcttatgctgaattgaagttggtgtcttactatcggccagattga

SEQ ID NO: 86072 - DNA, 1250 bp, Pseudomonas amygdali pv. mori str. 301020
atgcagaactatcgctgcttcggtgaattcgagatcgacttcgatccgcatctgaccatacttattgcctccaacggaggcggaaaaaccactattcttgatgccgctcgagttgcgctgtggcctttcgtcaagggttttgatcttggcggtcagacaggaaaatccgccactattcagattgaagatgtgcgactggcccaattcggcagtggcaatatggagtcgcaggtacccagcgttatcgaggcaaagggcgtctggtgggaaagcgccgttgaaagtagctgggtgcagcagcgcgtcagcctgaaaaagtccactaacactattggcgatgctggatcgaaagcactgacttcgtacggtaagtcgcttcaggaccgtgtgcgaagcgatgcacatgtcactctgccaatggtgagttaccttggcacttccaggctatggttcgagggacgcttcagttcggcggcggctcagacaacactcgataaaagtgagtactccagaacgtccgcatacctaaattgcctgtcttattcatccagtttcaagaccttcaccgcatggtacatctggatgtaccgcagctatcgtgaagctcagttgatagctctggagcgcgatgaagaaatgtctgatgccgggcagcgctttgagaaaatcatctcagctgtcaaagaagccatcgacaggttgataaaggctcctacggggtggcacagactggaatacagtgccagtcatcaacagcaactggttatgcatcatccggaccagggggttttacctgtcgaaatgcttagcgatgggctgcgtaacactatcgccatggttgcggacctcgcttttcgtgcctgcaaactcaacccgcacctcggcgagagggcgcccttgcaaacgccaggtatcgccttgattgatgaagtggatatgtttctgcatcccttctggcaacagacgatagtcggttcattacgtgcggcttttcccgccatgcagtttattgtcaccacccacagtccgcaggtgttgagtacagtccgacgcgaaaatattcgggtgatcggtaaagatgcccaagggcgtttgattgcatcccggccccttgccatgacctacggtgaaccgagcaacagcgtgctgcgaagcgtgatgcaggtcgatccgcagcctccggtggatgaaaagccgggcctgctacaactcacggaatgggtggacaaaggtcgctatgacgaaccaca

SEQ ID NO: 86073 - DNA, 588 bp, Pseudomonas amygdali pv. mori str. 301020
ttggaggagcagtacggattatgttgttatagcgaaattcgacctgaccgggttggcctgagtttccatatagagcacgtcgaaaacaagagccaaaaccctcagcgtacttttgactacaacaacctcgctgcctgcgcgctggacagtcagagcgatctggaggtattgaaaatacagggcgctgaggtatttggtgggcacgcgtcaggtaagtcgaaaggggtcgacatggctcgcttcgtttcgtgtcacatgcccgactgttcgcgcttcttcgcctatttgtctgacggccgtgtagtgcctgctgacgggttgtcaccggaggaagttgaccgagctgaatacaccatcggcctgctgaaccttaacagcccttatctccaaggcttgcgacaatcctggtgggatgagctggaagctctttttgaagagcatgttaatcaaaatatgagtctgcattgtctggcggggattgatctcatccctgtgggggcgaacttaagtcagtttttcagcattacccggaattttttcggaggtatcgctgaagaggtccttgagcaagaggctggtcgctggtaa

SEQ ID NO: 86074 - DNA, 1359 bp, Pseudomonas amygdali pv. mori str. 301020
atggaaatcaaaagcttcaagcttgttaacgttgggcgtttcagcgatctggaagtcgctctggcgcctaccgaaagacacgcgtcgaaggtgaccgtactggtcggcaataatggggcggggaagactacgctgctcaagtctgtcgctacatcgttgagctggctggtagcgagagtcaggacgccgaaaggtgctggcagtcgtatcgatgaggatatggttcagaacggcaccgctacatcctcgattaccattcggatagaggatgtgttgatttcggatgacgagatcaatccacttgaatctgaatgggcaataaccgctactcggaaaggccgaaacgccacctcatccacagtattaagcgagctcaacagacttgctgatggctatcgctcaaagttgactgaaaaaagtgatacgtctcttcctcttctggctttctaccccgtcgagcgctctgtcatcgagataccgctcaaagtcctcgccagacatacctttgatcaactcgacggctacgacaacgccttggggcgtggcgtggattttcgccgctttttcgagtggtttcgggagcgcgaagacagcgagaatgaaacgggtatctcgacagagttgctgaatgagctgtctcaaaagatcttgattgatacagaactctggaaagtgctgaccagggagcatgcctcttcacgtgaccgccagctgactgcggtcagaactgcggttgaggcgttcatgccaggcttaacaaaactgcgtgtcaggcgtaagccgcgcttgcacatggctattgataaagaaggcaagacgctaaacgtatcccagctgtcccaaggcgaaaagtcgatgatggcgctcgtcggcgacatcgccagacgcctcgccatgatgaacccggcgctggaaaacccattgcacggcaatggaatcgtcctgatcgacgaagttgatctgcacctgcaccccaaatggcaacgcagtctcatcgcccaactcactacaacgttccccaattgccagttcctcctgaccacccattcgccgttggtcatcagcgacagcaaggatgtgctggtgtacgtcatggacgatggcgagttacgtgagcaggacagtctttatggtcttgatgccaatcaggtgctgtcgagtgtcatggacactgatattcgaaatgaggagattcaaacagctctggataaactgcagcactttttgatgagaggagagctcgatgaagctcgtactctctacacagagttggctgacgagttacctgcaaatcacatcgaattggcgaaagcttcgctgctgattcgtaagctggaagtgcgccgtgagaaagattga

SEQ ID NO: 86075 - DNA, 651 bp, Pseudomonas amygdali pv. mori str. 301020
gtgagaaagattgaaaagggaagtctcgcggtgctggaaaaatggaagcgcgcgaacaagggaaagaaatacggcgacctggtggggcatgaagatatcaaggatgccattcgccacgcctgtgtcactgagcagcatggcttgtgcgcctattgctgctgcaggatcaccgcagagaaaggcagtgcctgcaatgaacatgttgaagcgcagcatctagcaccgcatcgcactctggatttcggcaacattgtcgcgagctgcaccaaagcggggcggtgtgacgccgctcatggccatcagactctgccgcttacaccgctgatgatcgaatgtgaaaaagagctgcagtttgagctttccggtcttgtggcaggcaccacgccccgggcgtgcgcaagtatcaacgtgctcaatttaggcgatacccatgaatcgaaccggggtcttgtgggagagcgcaagcagatgattgatgcgctgctgttttcttgcagcattgaccctgctgagctgtttactgaggaggatgaggttctcgatctgctaagaaacgacctgctggaggtaaatgctcagcagttgcttcagcccttttctcctgttttggtgaatgtaattatcggcatccagcgtgctcgacagcgttga

SEQ ID NO: 86076 - DNA, 2382 bp, Pseudomonas syringae Cit 7
atgcgaggcaagatagggtatattgtcaggattacaccgataatattaggccggaccaggcaggggaataaattcatgcagtacatacaaagggatgttccggtacctgcaattttgacaggcagcgcggcaaacgagcacagagagtttttggttcgattcatggctcagagcgaagagcaactgtcgcagaaatatccgcctgcgtcgtctctgaatctttcagatcaaagcatgagtgcagcattaaaaaggctttttatcggccgctgcgccttttgcgaagcttgggcagacctgatgccgtatcgctttagaccgaagtctcagtcactgccctacgaacccaacaaatttgcacatttctattacagctggctggatattgcatggcagaatatctatcctatatgccattcatgcctgcctgcagatggagaatatttccccgttcttggcaagcgcgctccgttacccgatacgattctttaccagcagtacgctcaagaaaataccggcatgtggcctgcgtacccgctcagggagaaatcaatactcctcgacccctgttttgatcaggcgctatacaaagagcttggtacccgatccgacggtagtctggtagggttatccgagcgaggcagcctcactatcaaacatttcaatttgaatgccgctacgcgcactgctgagcgctttgccagtcatcaagaatatttgcagcagttgttgcagtgggtcggggaggccaatgcaaaagaatccataaaaatctttgattttaaaaagctggaatttggaggcagttggtattttctgctgcgtcgattggcaatcttcgtgggagccaagacgattagtcgccctgtattgtcaatggcaggcatcgcccgcgtattcgccaaacttctcaagattgccgacggacgctcgcgtcttgagcagtgcatccagcaacttgccgataacgagccccaagagttttcgagcgaggacacgattatgtacctcaagcgcccgagtacagacagtgtcactagccttcgcatagagaatttcaaatctatcgagcatctagacatcaacctgcgcccccaaactcccactacaccagccgagggcactcggcaagttcctgcacttctcatcattggtgagaactcagcaggtaaaagcactattttggaggccctcgccctcgggctctcctcaacacaagcgtttgttagtttggggctgaccacgaacaatttcatcctcgccccggaatttctaggcgccgcgcagccacgagcggtttccagggctttgatcgaaattggcatctcaaacgggtccaaacgtactttgctcatcgaacaaggcggtatcaatatccctgacgagatgcagcaggaaaatatcccggtattcgcctatggcgcgtttcgccagtatcagcaccagggcccaagctccaaacccaagccggatgcctttgtacacaatctttttgacggccgtatgctgcccaaccccgaacgatggctgctcaagctgagtgatgcccgcttcccaatggtgatccgagccttgcgtgaaattctgtccatagacggacgtttcgatgtcatccgtcgagacattgctagcaagcaatgctatgtcgtgacaggtattcgcgacgacggcagccctctgtctcaaagctcgttgaaagttgcttcttccggctttcgctccatcctggccatggcttgcgacgtgatgcgcggtctgatgaaccccagcatctacccggacttcgagagccttcagaccgccagagcagtagtgctcattgacgaggtcgaggcccatctgcacccacgatggaagatgcgcattatgcgtgggctgcgggaggcgctacctaatgtcacttttatcgcgacgactcacgacccgttatgcatccggggcatgaacgacggcgaaatcgtggtgctgcgacgggtccaactcagacaaggcaccaccgatgcggggctgcaatcccaggttgaggcgcagaccgacttgccgccattgtctgagctgaggatcgaacaattactaacctcggatctgttccagctgcactccacagacgatccggaaatggatcagcaattcgcgcatatcgccgatctgctggccataccgtcggaacaacttgagccggaacaactacggacgctgaaacgattcaacgacgatgtagcatccgcgctgcccgtcggcacgtccgaagcccatcgagtggtgcaggatgccgttgctgaatacctgcaaatccgtgcacggacatctgtgcagcgagtagcggacgccaaggccagtgttaaggccaagatcatccaggcgctggagggaattctttaa

SEQ ID NO: 86077 - DNA, 930 bp, Pseudomonas syringae Cit 7
atgcgccgtgtcgaacgcattggaagcgtaccgtctaatctcgaatcggccaacaaaggaggcaaaaccgagcgcgaccgtgcccgcgatcaccagctcgataccaacccgaaaaaaggcagttttacctacgcggggtataaacatgacgacgtcaaacgcaaactcgcagcgctgtttcacaataaatgcgcctactgcgagactttcttctcggcgtccgccccagtggacatcgagcactatcgcccaaaaggttcggttgcagatgaccctgcccacccaggctactggtggctagctatgagctgggacaacttgctgcctagttgcatcgactgcaaccgaaagcgcaaacaatacttgcccgatgcatcgaccagccttaaggcgctttacgacagtagcaccaacgcaggcatgaacttgggcaaaggcggaaaacaggatagttttccgatccgggattccggaaaacggctcgctgcagagagttatgcctacatcgacgaggagccgcttctgctggacccgacacgtgatgatcctcgcgagcacctacgcttcagcgtcgaccatacatccccggtaagcctagtcttggcgggtagtgcgcccggacgagcaagcgatcgaggtgcgatgtcgatacagacttacggtctgaatcgcctcgggctggtgcaggatcggacccggttgctgcggcgtctggagtttctaggtgaaatgattcttgatttagggattaccgtcgacgagctcaaagcattgcccgcccaagccgctctggacaacgccatcaaacgcttggaagtcatgcaaggccgtatgctgatggaaattaaggagatggctgcccccaaggaaccgtactcagagatggtaggcgcctggctcaacaattatatagaacagttaaaagcttaa

SEQ ID NO: 86078 - DNA, 1076 bp, Pseudomonas syringae pv. maculicola str. ES4326
cggatgaggtcaatccacttgaatctgagtgggaaataaccactactcgcaaaggccggaacgccacctcatcgacagtactgagcgagctcaccagactcgcggacggctatcgctcaaagttgacttcaaaaagcgactcgtctcttccgcttctggctttctaccccgttgagcgcgctgtcattgagataccgctcaaagtcctcgccagacacacctttgatcaactggacggctacgacaacgccttgggtcgtggggtggattttcgtcggtttttcgagtggttcagggagcgggaagacagcgaaaatgaaacgggcatctcgacagagctgcttaatgaactgtctaaaaagattttggtggatacagaactctggaaagtactgaccagagaacatgcctcgtcgcgtgaccgtcagctgaccgcggtcagaacggcggttgaagcgttcatgccgggcttcacaaaactgcgcgtcaagcgcaagccgcgcctgcatatggcaatcgataaagacggccagacgctgaacgtgtctcagctgtcccagggcgaaaagtccatgatggcgctggtcggcgatattgccagacgcctcgccatgatgaacccggcccttgaaaatcctctgcatggaaatggcattgtgctgatcgatgaagttgatctgcatttgcatcccaagtggcagcgcagcctgatcgcccaactcaccaccacattcccgaactgccagtttctcctgaccacgcattcgccgctggtcatcagcgacagcaaggatgtgttggtatatgtcatggatgatggcgaattgcgcgagcaagacagcctttacgggcttgatgccaatcaggtgctgttgagtgtcatggacacagatattcgcaatgctgctgtccagaaacgtctggacagacttcaagaattgctgatggctggcgatctggaggaggttcgctcgctatacaaaaagctggctattgacctgccatccgggcacatcgagctggcaaaggcttccttactaatccgcaagctggaattacgccgtgcgaaagattga

SEQ ID NO: 86079 - DNA, 651 bp, Pseudomonas syringae pv. maculicola str. ES4326
gtgcgaaagattgagaagggaagtctcgcggtcctggagcagtgggcgcgctcgaacaagggaaagaaatacgaagatctggtcgaccgggacgatatcaaggatgccattcgacatgcctgtgtccgagagcaacatggtttgtgtgcgtactgctgtcgcagaatcacgctcgaaaaaaccagtgctcacagcgagcacgttgaagctcagcgcctggcaccccaccgcacactcgactttcagaatatcgttgccagctgcaatcagccgggtcgatgtggcaaagcgcatggtcaccagttattgcgtttgacgccacttatggtcgattgtgagacggagttgcagttcgagttgtccgggttggtgcgaggcaacaccgaccgagcgcgagactgtatcaaggtgcttaatcttggcagtgatcaagcctccaacaggtggttgattagcgagcgtaaagcaatgatcgataatttgctgtattcacagggcatgaactcttcaggactgggtctggagagcgatgacgtactcgatttgttgcatgacgagttattggttcctgatgaacaacaacagctccaggccttttcccctgttctggtcaatgtgattcgtcggctcaaggcttcgcaggcctcctga

SEQ ID NO: 86080 - DNA, 1356 bp, Pseudomonas syringae pv. maculicola str. ES4326
atgcagaactatcgctgcttcggtgaattcgagatcgatttcgatccgcatctgaccatacttattgcctctaacggaggcggaaaaaccactattcttgacgccgcccgagtggcgctgtggcctttcgtcaagggttttgatcttggtggccagacaggaaaatccgccactatccagattgaagatgtgcgactgacccaattcggcagtggcaatatggagtcgcaggtacccagcgttatccaggcaaagggtgtctggtgggaaaacgccggtgacagcagttggctgcagcagcgcgtcagcttgaaaaaatccactaataccattggcgatgctggatcgaaagcgctgactttgtatggtaagtcgcttcaggacagcgtgcgaagcgatgcacatgtcactctgccaatggtgacttacctgggcacttccaggctatggttcgagggacgcttcagttcggcagcggctcagacaacactcgataaaagcgagtactccagaacgtccgcatacctcaattgcctgtcttattcatccagcttcaagaccttcactgcatggtacatctggatgtaccgaagctaccgtgaagctcagctgatcgctctggagcgcggcgaagaaatgtccgataccgggcagcgctttgagaaaatcatctcggctgtcaaagaagccatcgacaggttgatcaaggctcctacgggctggcacagactggaatacagtgccagtcatcaacaacaactggtcatgcaccatccggatcaggggattttacctgtcgaaatgcttagcgacgggctgcgtaacaccatcgccatggttgcggacctcgcttttcgtgcctgcaaactcaacccgcacctcggcgagctggcacccttgcaaacgccaggtatcgccttgattgatgaagtggatatgttcctgcatcccttctggcaacagacgatagttggttcattacgtgcggcttttcccgccatgcagtttattgtcaccacgcacagtccgcaggtgttgagcacggtccgacgtgaaaacattcgggtaatcggcaaagatgcccaagggcgtttgattgcgtccccaccccttgccatgacctacggtgagccgagcaacagcgtgctgcgaagtgtgatgcaggtcgatccgcagcctccggtggatgaaaagccaggcctgctacaactcacggaatgggtggacaaaggtcgctacgacgaaccacaagcgatcttgctgatgcagcagataacggaggctctaactgaacaacaccctcagttgcagcgcctgcagcgcagtataaagcggcagaaggcattgaagggatga

SEQ ID NO: 86081 - DNA, 588 bp, Pseudomonas syringae pv. maculicola str. ES4326
ttggaggaacagtacgggttgtgttgctatagcgaaattcgacctgaccgggttggcctgagtttccatatagagcacgtcgaaaacaagagccaacaccctcagcgtacctttgactacaacaaccttgctgcctgtgcgctggacagtcagagtgatctggatgtgttgaagatacaaggcgctgaggtatttggtgggcacgcgtcaggtaagtcgaaaggggtcgacatggctcgcttcgtctcgtgtcacatgcccgactgctcgcgcttcttcgcctatttgtctgacggccgtgtggtgcctgctgacgggttgtcactggatgacgttgaccgagctggatacaccatcgacctgctaaaccttaacagcccttatctccaagacttgcgacaatcctggtgggatgagttggaagcgctttttgaagagcatgttgatcgagagatgagtctgcattgtctggcggggattgatctcatccctgtgggtgcgagtttaagtcagtttttcagtattacccggaatttcttcgggggtattgctgaggaagtgcttgatcaagaggctggtcgctgctaa

SEQ ID NO: 86082 - DNA, 945 bp, Pseudomonas syringae pv. actinidiae str. M302091
ttgcgctcagtttttgccgccgccctctctcacttgagtgctgtgctcgccaggaacaacgcaggtgagcagattgactttccggttcttgccttctatcgcgccaatcgtcgttggagcagtgcgcgcatatctgccgagttcgcagcacagcagcggacttcccgttttgacggatatgcaaactggtttgacgccgtagccgatctgcgtgattttgaaagctggttaatcgcaaggacgcttgagcgccttcaggaccgtcttgattcaacttcgactgtcgagcgtgaagatgaacttgaatgggtgaatcgagcgatcagacttgccataccggatgcccatgatctccgatatgacttgaggctacaaagcctgctcgtagatatgggggaaggcaacgccgttccgtttcacgaactcagtgatggtcaacgtagtttgattgcgttgattgcagatattgcacgacgcatgtgcgttctaaacccacacataggaaaagacgttctggcgaataccagtggcatcgtgattattgatgagctcgatattcatctgcacccggcctggcaacgcaacattgcgccgacgcttaaaaaagcattccccaaagtgcaattcatcgccacaagccactcgcctcaagtgattggcagcctgcaaccgggcgaggtcatcctgctgaggaatggcgacagctctcacccgcgagcaacctatggcctggactccagcaccattttggaagaagtcatgggcgtaccgcagcgcgaacccgaaattgaagtgttgcttgatgagctgttcagcacgctggaaaacaatgaacttgaaaaagccaggctgcagattgacgcgctaaagaaaaaagcccccgatctacccgagttcgcaggtgccgaagcactgctcaagcgcaaggagcttattggacgatga

SEQ ID NO: 86083 - DNA, 645 bp, Pseudomonas syringae pv. actinidiae str. M302091
atgagacgcatcatcaagggaactgagcctgcgtcatttaccgaatggaaagccagcgcaaatgaagactggatgcccacttatccaaccttgcagaacccacaaaaacgcgaattgcataacagcctgctacaagagcagcattcctcttgctgctattgcggcagggaaatagaacttgagagcagccacatcgaacatttcaaaccccaggagcactacctgccactggcgctggagtacagcaatctccatgcgtcctgcctgcgcgagaccaaaccaggaaacccgctgcattgcggacatcacaagagcaactggttcgatgaaacgctgcacatttctccactggcagacgattgcgaacagcgatttcgctatctgctgacaggaaaaattcaaaacactgaatccgcagaccttcccgccgccacaatgatcgagaaactcgcactcgatattgcctacctgacaagaaggcgtcaggaagccatcactggcatttttgatgaacagttcatatcgagcgccagtgaagcggagttaacgcatcttgtgcagagtttgcgctcaggagatgccggcaagcaggtcgcctttggccacgtcgttgcccgctatgcggagcagttgctagcgtcctga

SEQ ID NO: 86084 - DNA, 1356 bp, Pseudomonas syringae pv. actinidiae str. M302091
atgcagaactatcgctgcttcggtgaattcgagatcgacttcgatccgcatctgaccatacttattgcctccaacggaggcggaaaaaccaccattcttgatgccgcccgagttgcactgtggcctttcgtcaagggttttgatcttggtggccagacaggaaaatccgccactatccagattgaagatgtgcgactggcccaattcggcagtggcaatatggagtcgcaggtacccagcgttatcgaggcaaagggtgtctggtgggaaagcgccgttgaaagtagctggctgcagcagcgcgtcagcttgaaaaagtccactaacaccattggcgatgctggatcgaaagcgttgactttgtatggtaagtcgcttcaggacagtgtgcgaagcgatgcacatgtcactctgccaatgatgacttacctgggcacttccaggctatggttcgagggacgcttcagttcggcagcggctcagacaacactcgataaaagtgagtactccagaacgtccgcatacctcaattgcctgtcttattcatccagcttcaagaccttcactgcatggtacatctggatgtaccgcagctaccgtgaagctcagttgatcgctctggagcgcggtgaagaagtgtccgataccgggcagcgctttgagaaaatcatctcagctgtcaaagaagccatcgacaggttgataaaggctcctacgggctggcacagactggaatacagtgccagtcatcaacaacaactggtcatgcaccacccggaccagggaattttacctgtcgaaatgcttagcgatggtctgcgtaacacgatcgccatggttgcggacctcgcttttcgtgcctgcaaactcaacccgcacctcggcgagcgggcacccttgcaaacgccaggtatcgccttgattgatgaagtggatatgttcctgcatcccttctggcaacagacgatagtaggttcattacgtgcggcttttcccgccatgcagtttattgtcaccacgcacagtccgcaggtgttgagtacggtccgacgtgaaaatattcgggtgatcggtaaagatgcccaagggcgtttgattgcatcccggccccttgccatgacctacggtgagccgagcaacagcgtgctgcgaagcgtgacgcaggtcgatccgcagcctccggtggatgaaaagccgggcctgctacaactcacggaatgggtggacaaaggtcgctatgacgaaccacaggcgatcttgctgatgcagcagataacggaggcactaaccgagcaacaccctcaactgcagcgcctgcagcgcagcataaagcggcagaaggcattgaggggatga

SEQ ID NO: 86085 - DNA, 470 bp, Pseudomonas syringae pv. actinidiae str. M302091
ttggaggagcagtacggattgtgttgctatagcgaaattcgacctgaccgggttggcctgagtttccatatagagcacgtcgaaaacaagagccaacaccctcagcgtacgtttgactacaataacctcgctgcctgcgcgctggacagtcagagcgatctggaagtgttgaaaatacaaggcgctgaggtatttggtgggcacgcgtcaggtaagtcgaaaggggtcgacatggctcgcttcgtctcgtgtcacatgccagactgttcgcgcttcttcgcctatttgtctgacggccgtgtagtgcctgctgacggattgtcactggatgaagttgaccgagctgaatacaccatcgacctgctaaaccttaacagcccttatctccaggacttgcgacaatcctggtgggatgagttggaagggctttttgaagatcatgttgatcaagatatgagtctgcattgtct

SEQ ID NO: 86086 - DNA, 2118 bp, Pseudomonas amygdali pv. lachrymans str. M302278
atgcaacgatttgcccgcaatgaaatacccccacctattttccgcgaaaaaaggttcaagttggctcgaaaggagttgcttgaactcttcacgctcgacacacaggaactctcacaaacccgcattacgggagaagagctgagtctggatctgagccaggtcggccccattcatgacgcgctagggcacctgtttcatggcaaatgtgcattttgcgaaagccaggacctgaccgtcccctaccgatttcgagcggcgtcatctgtaacgtctgccatgggaatggtggactcacacctctactacgtctggctcgcgaatgcctgggaaaacatctatcccatctgcatcaaatgtattccgcgccagcctgcgttctttcctgtcgacggcaaacgtgtgccgattccaagcctggagcaaatacgccggtatgccgcagaggatctcgggtcatggcgcacctccggaccacgtgagtcagccgttttgctcgatccatgcattgacaggaattttgagcgacacctttttccctccgttgatggcgatctgctgccactgagtgaaaggggtgatactaccatcgccaatttccgcttggatcgtctcgacttgaataaggcgcgtgccgccagacttcgcgagtatcgcgaggctctattggcgcccgatcgaaaccgggcgaatttacgctacagtaattttcaaaatttatttgacttccaagaacttgaatttggtggcctgtggtacctgcaatgccggctcattgcgcggtacctatcgcaaaaagttggcatggtaatgccgaccggccgctcccatatagcaaggacactgaaaaccctgctctttatgggggactataagctgtcgcatgaacaattaaagagttggattgaagagaccgatttcggccacctaccgcttgagatcccgcccacggactatggcgttctggagcccgcgccggtcatccaaaaggcagtcgtaccgcggatttatccttctttgcactctttgcagttcgaccacttcaaggtcatcgagcacctcaagctgaaacttgatatacccaccgccgaatcgcagttgaacaacgcagcgttgcaaccggcactgttgatattgggtgaaaacgccactggtaaaagctcgattctcgaagcaattgcgctcgcgctgagtccccgtgaaacacgtagggcattgaacctgacgccaggctcactcgtgctctcccctgcacaactcggttcaaatgacacgcccacgcaattctgggcacgcgtgcgactcgggtttgacgaggggcgtgacaaagtgttgagcattgacaatgccgcctgtaaacaattcggaccacgccttgtgccacctgtgtttgcttatggtgcctttcgccagtaccagaaaaaaacaccgccggtttttgaacccgctcacgggatcatcaacctgttcgaaaccgatcgcctcctcgcaaatccggaacaatggttacttgggctcaaaggcgaagatttcaatgacgtagcacgcgcgttgaaaatcatcatgtccgtggaaggcgacatcaaagtcatcgaaccagcgcccgacggcaaatcctgcttgatcgtgacagcgcccgccggcgttgtgaccaagacaccgctcaatgatgtgtcctcaggttaccggaccatcctggcaatggtgtgcgacatcatgcaacggttgatggatcggcgcataaaccccgacttcccgggtcttgagcatgcccaagctgtggtattgatcgacgaagtcgaagcgcacctgcacccacgctggaaaattcagattatgcaggtgttgcgccgggcattgcccaagatcacgtttatcgccaccagccatgatcccctgtgcctgcgcggcatgcaggacggagaaatcgtagtggttcatcgccggtccagggccggcggggccaatacccagtacgcgacgtgtattgagcaactgcatgatctacccgactccacgcagttaacgattgagcagctgttgacatccgactttttcaatctgatgtccaccgaccagccggcaacggaaaaacaattggcaacgttgccgacgtgttga

SEQ ID NO: 86087 - DNA, 1098 bp, Pseudomonas amygdali pv. lachrymans str. M302278
gtgcgcttcgttgaccgatccttgattaaaaagccccgtgcaatgcggccgagaaagacaaccgtcagtgctgcggatcaggaactcctcgacttgaccgcccattatgaaaaaaagtccgccgcgcttgcagctgcactggcggctgatgatccggttgcggcctcagcctctgtggcggaggagttctcagcgaaaaagcctccgttcacgacctaccggaaagactcggtcaaaacccagctgtacgcaatatttcatggcaaatgcgcgtattgcgaaacattctaccctgccgtagcgccagttgacgtggagcattaccgacccaaagggggcgtgagccaggatgctgatcatccagggtattggtggttggcaatggagtgggaaaatctgctgcctagctgcattcattgcaaccggctaaataaacacgcaacgccgaagctttcgacccagctagttgaactgcgcgctgacggcacaggcttcagtgaccaatacaaggtcaccacgggcaagggcaaccactttccaatactggggccacgcgctacgccagcttcaagggattgttcaaccgaatacccgctgttgctcaacccttgcctggatgacccacaagagcatttggccttccatgtcgaccgcaaaaaactcatcgggctggtgttacccaaaccgcacaacggtgcggggctaccggcgcacgtttccaccacggacctgctgccagcgttcgcagacgaaatcgatcaggcgctaagggacaagctcagcctgcgcggcgccgtgtcgatccacacctatggactgaaccgattgggattggtccaggatcgcacgcgtgtgctgcgccaactcgcatttctggaggagtcggtgaaggatctttgcgccatgatccagagcctggaagcacgcataaacgaccccttcgcggttgaaaacatacgcatcatcaagcgcatggaggcattggtagaacgcacagcgcagcacatggcggatatggccaagcctcaagcgccctactcgaccatggttcgcgagtttttacagggctttgaggcgcgcctggttgccattccctag

SEQ ID NO: 86088 - DNA, 903 bp, Pseudomonas amygdali pv. lachrymans str. M302278
gtgctcgccaggaacaacgcaggtgagcagattgactttccggttcttgccttctatcgcgccaatcgtcgttggagcagtgcgcgcatatctgccgagttcgcagcacagcagcggacttcccgttttgacggatatgcaaactggtttgacgccgtagccgatctgcgtgattttgaaagctggttaatcgcaaggacgcttgagcgccttcaggaccgtcttgattcaactccgactgtcgagcgtgaagatgaacttgaatgggtgaatcgagcgatcagacttgccataccggatgcccatgatctccgatatgacttgaggctacaaagcctgctcgtagatatgggggaaggcaacgccgttccgtttcacgaactcagtgatggtcaacgtagtttgattgcgttgattgcagatattgcacgacgcatgtgcgttctaaacccacacataggaaaagacgttctggcgaataccggtggcatcgtgattattgatgagctcgatattcatctgcacccggcctggcaacgcaacattgcgccgacgcttaaaaaagcattccccaaagtgcaattcatcgccacaagccactcgcctcaagtgattggcagcctgcaaccgggcgaggtcatcctgctgaagaatggcgacagctctcacccgcgagcaacctatggcctggactccagcaccattttggaagaagtcatgggcgtaccgcagcgcgaacccgaaattgaagtgttgcttgatgagctgttcagcacgctggaaaacaatgaacttgaaaaagccaggctgcagcttgacgcgctaaagaaaaaagcccccgatctacccgagttcgcaggtgccgaagcactgctcaagcgcaaggagcttattggacgatga

SEQ ID NO: 86089 - DNA, 645 bp, Pseudomonas amygdali pv. lachrymans str. M302278
atgagacgcatcatcaagggaactgagcctgcgtcatttaccgaatggaaagccagcgcaaatgaagactggatgcccacttatccaaccttacagaacccacaaaaacgcgaattgcataacagcctgctacaagagcagcattcttcttgctgctattgcggcagggaaatagaacttgagagcagccacatcgaacatttcaaaccccaggagcactacctgccactggcgctggagtacagcaatctccatgcgtcctgcctgcgcgagaccaaaccaggaaacccactgcattgcggacatcacaagagcaactggttcgatgaaacgctgcacatttctccactggcagacgattgcgaacagcgatttcgctatctcctgacaggaaaaattcaaaacactgaatccgcagaccttcccgccgccacgatgatcgagaaactcgcactcgatatcgcctacctgacgagaagacgtcaggaagcgatcacaggcatttttgatgaccagttcatattgagcgccagtgaggcggagttgacgcatctggtgcagagtttgcgctcaggagatgccggcaagcaggtcgcctttggccacgtcgttgcacgctatgcggagcagttgctggcgtcctga

SEQ ID NO: 86090 - DNA, 2214 bp, Pseudomonas syringae pv. aptata str. DSM 50252
ttgcgcgttttgattaagctaaaaaaactgtcgaatcctaagcccgttgaaatctctacaaaaaacaccctgtatgtccgggagatggctaagcttagggcctacttcaagcttaacccaaccgaacgggcacccacccggccgccgttcgacaaggatgtacttgacgcgcagtctgtcctccaggaactcaagcggatccagcacagcaagtgtgcctattgtgaaactattctcgaacacaacccgagtcggttcgtgtcccactatcgaccgttgagcaacgcgtttgatcctcatcaggacgcagagcatctagagtgttatgcatggttcgcctacgaatggcggaacctgatgcttatctgcaaggactgcgataaccataaactcaattttttcccgatagcaggcagaaccgctattgcactttcgtcctggagagcggcccagctccgggaaatgccgctcctgctcaacccattcgaggacaatccttcggatcacctcatgttcgatacggatggtgtcgcttgctctacctctgccgccggaaaagagactatcaacattctcaacctcaatcggccagcgctttgcataaaacgtaaggagcagatcggtgcggggctaaaaatcattctgggcaacagcaacgagcatgcactaagagaggcgctacgagaatacaccgatcatgaggtactccacggtggggccgttaggaactgcctggggcatgtctgccggatcctgcaaacccagatccgccatggcagatactctgctcacaccgatctgatcaaaaagatcattcgactcaggaatgagttttcggtccatgattgggaagaggctatttcacggtgcaagagcaatgatctggcgttcgttatccagaacaacgaactgggcgagctacaacctcggcggtatgcctacatcaaccgtattgagatcggccgtttcaagggggtcgaacacttcacgttggatctcgacgcaggaccaactggccagagtcgtagcgaaacgtcctgcacaatgctgttgggagaaaacgccactggaaaaagctcgatcctgcaagctattgcgctggcgctaatgcccagtggagagcgccagcgcctacgtctcgaccaaaagagcattattccctatggcatcgacgacaccttcatgccccctcttcaaccagcagttacattgcgcttcagcaatggtgaggcagtagccatcagcatgaacctgcaaacgggccgcctgaaatccgtcggttccccacataacgtggtcttcggttatggttcccgaagatacttcgtactagggaagtccacgaaagcacagacctgccctaacaggacgctgttcaaccaggcagccaatctgccggacccgactaactggttgctgaatctcaaggaggagaaaaaattcgacgctgtggcacgtgcactggcttctctgctttccctgcgcgccggtgagttcgtgggccgggacgaccattcgatcttcatccagcgccacacttcgcctctgcccattgaacatcttagtgatggctataagtctttgttcgccatggccgttgacatcatgcgagaaatgctcaaacactgggatagcttggagttcgcgcaaggcatcgtgctgatcgatgaaatcgaaaaccacttgcacccacgctggaagatgcgcgtgatgagagcgctgcgcgactcgttcccgcgcgtacagtttattacgtctactcacgatccattgtgcttgcggggaatgctcgaaggcgaggtgcaagtgctatatcgagatcgcgttggacacctgcaacgcgttgagcaattacccaacgtggcaaatttacgtatcgagcagatcctgacgtctgactacttcgggctagccaccaccgaagacccgctgcgtcagcatgcactggaacagctcgccaaatatgccgcgcacggagacagcgacctcacgcaaacggagcggaggcaccgcgacgacctgctggaaaactacggcagcctccccatgatcggcgataccctcgaccgacagatcatcgctcaagcgctgacccgtcacatccgtgatgcggacatcgccactcccttcgagcatgctagcgcaagggaagcatctgtgcgggcaattatagaggtactagaacgcaacaggaaaaagtatggtacccgttaa

SEQ ID NO: 86091 - DNA, 373 bp, Pseudomonas syringae pv. aptata str. DSM 50252
atggtacccgttaaccgcagcctggtcgaaaaaccggcatccctaaccgcgccgaatggcgcgggccaccgtgagcatttgcgcgcagatatccactaccagaacccgcacactactgcatatggtttctctcattacaaagagcccgatgtggtcatggcgttgaacacgctgtttcacaataaatgcgcctactgcgagggcaaaataactaacactggccccatcgacgttgaacacttccgccccaagggccgagtagcgggcgtgctcaaccatcccggatattggtggctagccactgaatggaccaacttgctcgcctcctgcatcgattgtaaccgcagccgaaaccagacgctgctgggcagcg

SEQ ID NO: 86092 - DNA, 1731 bp, Pseudomonas syringae pv. aptata str. DSM 50252
atgcgtctcgacaagctaactatcggcagcgccaaagacagcccaacccaccagttcaagaaccttaagaacgttaccattgacttcgatcaggatcattgggtcacggtagtgatcggctggaacggcaccggcaagtccaacgtgctggaggctctggccatcatcttccgtgatttgatcggcaaggagcgtatgccagccttcgctttcaaactggcctatcgcatgggtacgggggagggcgttcggcacattcacatcgatgccgatcctgatcgcgagaacgagccgttaatcattcacgttgcgacggatgcagaggctcgtggtgaaggtaccttgaccccattcattgagggtgaggaagcagcatcggctctacgtggcaaagccatcaaactcacggccttcttgaaggcggacgccgagtccttgccgcgctatgtgttcagctactactcgggcgagagcacgcgtatgtatgaggtgttttccccttacctggaaagctatgacagcaagctgcgaaacggcatagacccaggcctgaaacggcttttctatgccatgccggtgcacagtcagttcgtgttgctggcttttatgattcaacagtccgacgtggtgcgggcttttctcgatgaccatcttgggattgatccggacgacggtattgaatcggtgctgttcgtactgcgacaaccaccttggaagtctaaagcgccggatggcgatccacggttttggaatgcacggggcgtggtgcgcgacttcctatcgcgtttgcacgacatagccctggcacccatcgaaattagtcgacaggtttccacatcaatctggaacaagacaaagttacagttcaagtacctgtacgtgaaagatattgctgcgctgcgccgcttggtgggcaaccaggcacctgcgcagttcttccgtgacctagagagcacctacgtctccgagttgatcgaagaggtgcgcatccgtatacgcctcaagaagaacgacggtagcgtgacgttccgcgaattgagtgaaggtgagcagcagttgctcaccgttttgggcctactacgttttaccgccgaggatgaaagcctgttcctgctggatgagccagacacgcatttgaatccgcgctggagcgtagattacatctcgtacttgaaacaattcattgccaacggaacaaagcaagaagaaaccagccacatcctgctcaccactcacaacccgttagctgttgccgaactggatcgcgaacaggtgcagattttgaggatgagcaagcaggaaggacaacgccagattctggcctgctatccggaggtggcaccgcgcggtatgggttatgcggccatcgtcaccagcgacatgtttggaatcgcctcatcgatggatgcctccacccagcttcagcttgaaaagcaacgggcattaggagcaaaacccgatttgtccgtcaccgaacaaggggcgctggacgagataaatgatgacctcaaccggctcggcttcagattttttcatcccgatgacgagttttcacgttatctgcgcttgcgaaatgaagcgcttaaagcgcgttttggggtaatcgatccactggatttggcggaaaaagccgtcactatgacccgtcaagagcgtgaagacctggctacagacctgattacgaagctcgtggaagatgagaatgaagaattgggcgggcctagccgatga

SEQ ID NO: 86093 - DNA, 804 bp, Pseudomonas syringae pv. aptata str. DSM 50252
atgaggtatatcgaccaagatgagctggctttgcctgaggggtggctggctaaggcgaccagggcctcagcagccgtagtggctggtgctaaaccggacgaggatgaaagtatctggaaagaactcaaggatgctttagctgccctatttcctgaaaaaaagtgttggtattgcgagtcgcctgtggaccgagctgacaatgctgttgaccattttcgtcccaagggtcgggttgcagatgcggcgaatccgcatgcaggttatcgatggctggcatttgatcatcgcaactatagatatgcctgcactttctgcaatagccgtcgtaagggcatcgagaacgacacagtcggaggtaaggcggatcgcttccctcttctcgatgaagctacacgtctgtataccccgggcccattgggccaggaaaagccgatactgcttgatccctgcgagcttaacgactgggagctgattggatgtcggcgtgagaacggaaaaccttgcgcgacgagccaggacgccgtagaacggcgtcgagcggaagagtcgattgctatttatcaccttaactatgaaccgacctgtaaacagcggcatgccgcagcagttcgattgatggctgatgttgagcaggcgaagctatttttcgggcaacctggaatgaatgatcacttcaccgccactgccaagaaagttcgtcgcgctatagatcggaaggcaccctacagtggagacatgatcttcctactcaaggggcagcggcacgccgatcacccatggatccaaaagttattagaggcctaa

SEQ ID NO: 86094 - DNA, 1011 bp, Pseudomonas syringae pv. aceris str. M302273
gtgttgactgcccaaggtggcgcgtttgagcatcaggaatggcacgtatcgctagaacgcagcagtcttcagacaaattttagcgcgctgaacagtctcgtattttcggaaaatctgatcagcatcgacggcgctactcacggggatttgcctgtattcgccgtctatcaagccaatcgacgctggctgacgatgagtgtaaccgctgagcatgctgcacagagcaaaccatcaagactggatgcctacacctcttggttcgatgccgcttccaacttgaaaaacttcgagacctggttcatcggcaagacactggagcgctttcaaagactggccagaacgggtttccctggcattctcaccgacgaactcacctggatcaattcagctatccagtgcgcactgccggagtccaagggcatagagtacgacatggaaatgcgggggctgatggtggacattgatgaccgaaaaaccccgttcaacgacctgagcgacgggcaacgcggaatggtcgccctcttcgccgatattgcccgccgtatctgcctgctaaatccgcacatggggaaggatgttctaagcaagacaaacggcatcatcgtgatcgatgaactggacatccaccttcaccccggctggcaacgcaccattgcacccgcgctgaaaaaagcatttcccagcattcagttcatcgctgccagccactcgccacaggtcatcggcagcctgcaaccgggcgaggtcatcctgctgaataaccatgacggctctcacccaagagcaacctacggcctggactccagcagcattctggaagaagtcatgggcgtgcctcagcgtgagcctgaaattgaagagttgctcgatcagctattcagcactctggaaaacaatgagcttgaaaaagccaggtcgcagcttgatgcactgaagaagaaggcgcccgatctaccagagttcgcgggtgccgaggcgctactcaaacgcaaggagatcattggacgatga

SEQ ID NO: 86095 - DNA, 648 bp, Pseudomonas syringae pv. aceris str. M302273
atgagacgcatcatcaaaggaactgagcctgcgtcattcaccgaatggaaagccagtgcaaacgaagactggacgcccacttatccaaccttgcagaacccgcaaaaacgcgacctgcatgatcgcctgctgcaagagcagaacttctcatgctgctattgcggcagggaaatagaacttgatagcagtcacatcgaacatttcagaccgcaggatcattatctgccattggcactggagttcagcaatcttcatgcgtcctgcctgcgcgagaccacaccaggaagcccgttgcactgcggccactacaagggcaactggttcgatgaagacctgcacatctctccgacagaggacgattgcgaacagcgcttccgttacttgctgacagggaaaatccagagcacatcccacaccgaccttcccgccacgacgatgatcgaaaagctcgcactcgatatcgcgtatctgaccaaaagacgtcaggaggccatcacgggtgtgttcgatgaacagttcatatccagcgccagcgatgcggaactcgctaaccttgtagacagcctgtgctcgggcaccgctaatacctctattgctttcggccatgtcgttgcgcgctatgcggagcaattgctgacgcagcggtag

SEQ ID NO: 86096 - DNA, 1350 bp, Pseudomonas syringae pv. aceris str. M302273; identical to SEQ ID NO: 85922

SEQ ID NO: 86097 - DNA, 651 bp, Pseudomonas syringae pv. aceris str. M302273
gtgagaaagattgaaaagggaaccctcgcggtgctggagaaatggaagcgcgcgaacaagggaaagaaatacgcggacctcgtggggcatgacgatctcaaggatgccattcgtcatacctgtgttatcgagcagcatggtttgtgcgcctattgctgctgcagaatcaccgtcgagaagggcagtgcctgcaatgaacatatcgaagcacagcatcttgccccgcaccgcacgctggacttcaacaatattgttgcgagttgcaccaaggccggacggtgtgacgatgcccatggtcgtcagcctctaccgcttacaccgttgatgagcgaatgtgaaagcgagctgcagtttgagctttcgggtctggtggcaggcttaacggctcgggcacgcgtcagtatcaaggcacttaatctgggtgatactcatgactcgaaccgaggcctcgtaggtgagcgcaagaggatgattgatgcactgctgttctcctgcagcatgaatcctggcgaactattggttgaagaagatgatgtccttgacctgttaaaggatgagcttcttgaatcagacgctcagcgtttgcttcaggccttctccccggtgctggtcaatgtgattcgtagtatccaggccgctcgctattcctga

SEQ ID NO: 86098 - DNA, 1359 bp, Pseudomonas amygdali pv. tabaci str. ATCC 11528
atggaaatcaaaagcttcaggctcgttaatgtggggcgtttcagcgatcttgaagtcgctctggcgcctaccgaaagatatgcgtcgaaggtgaccgtgctggtcggcaataatggagcggggaagactacgctgctcaagtctgtcgctacatcgttgagctggttggtggcgagagtcaggacgccgaaaggtgctggcagtcgtatcgatgagggtatggttcagaacggcaccgctacctcctcgattaccattcggatagaggatgtgttgatttcggatgacgagatcaatccacttgaatctgaatgggcaattaccgctactcggaaaggccgaaacgccacctcatccacagtattaagcgagctcaacagacttgctgatggctatcgctcaaagttgactgaaaaaagtgatacgtctcttcctcttctggctttctaccccgtcgagcgctctgtcatcgagataccgctcaaagtccacgccagacatacctttgatcaactcgacggctacgacaacgccttggggcgtggcgtggattttcgccgctttttcgagtggtttcgggagcgcgaagacagcgagaatgaaacgggtatctcgacagagttgctgaatgagctgtctcaaaagatcttgattgatacagaactctggaaagtgctgaccagggagcatgcctcttcacgtgaccgccagctgactgcggtcagaactgcggttgaggcgttcatgccaggtttcacaaaactgcgtgtcaagcgtaagccgcgcttgcacatggctattgataaagaaggcaagacgctaaacgtatcccagctgtcccaaggcgaaaaatcgatgatggcgctcgtcggcgacatcgccagacgcctcgccatgatgaacccggcgctggaaaacccattacacggcaatggcatcgtcctgatcgacgaagttgatctgcacctgcaccccaaatggcaacgcagtctcatcgcacaactcactacaacgttccccaattgccagttcctcctgaccacgcattcgccgttggtcatcagcgacagcaaggatgtgctggtgtacgtcatggacaatggcgagttacatgagcaggacagtctttatggccttgatgccaatcaggtgctgtcgagtgtcatggacactgatattcgaaatgaggagattcaaacagttctggataaactgcagcactttttgatgagaggagagctcgatgaggctcggacgctctacgcagggttgactgacgaactacctgcaaatcacatcgaactagcgaaagcttcgctgctgattcgtaagctggaagtgcgccgtgagaaagattga

SEQ ID NO: 86099 - DNA, 621 bp, Pseudomonas amygdali pv. tabaci str. ATCC 11528
gtgctggaaaaatggaagcgcgcgaacaagggaaagaaatacggcgacctggtggggcatgaagatataaaggatgccattcgccacgcctgtgtcactgagcagcatggcttgtgcgcctattgctgctgcaggatcaccgcagagaaaggcagtgcctgcaatgaacatgttgaagcgcagcatctagcaccgcatcgcactttggatttcggcaatattgtcgcgagctgcactaacgccaagcggtgtgacaaggctcatggccgtcagcttttgccgcttacgccgctgatgatcgaatgtgaaaaagagttgcagtttgagctttcgggcctggtggcaggcaccacgcttcgggcgtgcgcaagtatcaacgtgctcaatttaggcgatacccatgagtcgaaccggggtcttgtgggagagcgcaagcagatgattgatgcgctgctgttttcttgcagcattgaccctgctgagctgtttattgaggaagatgatgttctcgatctgttaaaaaatgacctgcttgaggtagatgctcagcagtttcttcagcccttttctccggttttggtgaatgtaattatcggcatccaacgcgctcgtcagcgttga

SEQ ID NO: 86100 - DNA, 1266 bp, Pseudomonas amygdali pv. lachrymans str. M301315
atgcgcctcgaccacctccatctgcagaattttcgttgttacgaagatgctcattttgatttccagccggggttcaatctggtggtgggggttaatggcagtgggaagacgtcgctgttgctgggtgtcgcgggatgcttcgggaatttacttggaagcattggcgtccatcagccatcgatagctgagtccgatgttcggttcgcgttagtaaagttcgaagacaggattcgtttcgaacgcagctatcctcttgtattgactgcccaaggtggcgcgtttgagcgtcaggaatggcacgtatcgctagaacgcagcagtcttcagacaaatttcagcgcgctgaacagtctcgtattttcggaaaatctgattagcatcgatgtaagtgcccacggggatttgcctgtattcgccgtctatcaagccaatcgacgctggctgacgatgagtgtaaccgctgagcttgctgcacagagcaaaccatcaagactggatgcgtacacctcttggttcgatgccgcctccaatttgaaaaacttcgagacctggttcatcggcaaaacactggagcgctttcaaaggctatcccgagcaggttcttccagcgttttcaacgacgaactgacctggataaactcagccatccaatgcgcactacccgacgccaagggaatagagtacgacatggagctacgtgcgttggtagtcgatatggatgaccgaaaaatcccgttcaacgacctgagcgacggacaacgcggaatggtcgcactcttcgccgatatcgctcgccgtatatgcctgctcaacccgcacatggggaaggatgtgctaagcaagacaaacggcatcatcgtcatcgatgaactcgatatccatcttcaccccggctggcaacgcaccattgctccagcactgaaaaaagcatttcccagcatccagttcatcgccgccagccactcgccacaggtcatcggcagcctgcaaccgggcgaggtcatcctgctgaataaccatgacggctctcatccaagagcaacctatggcctggactccagcactattctggaagaagtcatgggcgtaccgcagcgcgagcctgaaattgaagcactgctcgacgagctattcagcacactggaaaacaacgagcttgaaaaagccagactgcagcttgatgcgttaaaacagaaagcgcctgatctgcccgagttcgcaggtgccgaagcgttgctcaaacgcaaggagctcattggacgatga

SEQ ID NO: 86101 - DNA, 684 bp, Pseudomonas amygdali pv. lachrymans str. M301315
atgagacgcgttatcaagggaactgagcctgcgtcactcaccgaatggaaagccagcgcaaacgaagactggacgcccacctatccaaccttgcagaacccgcaaaaacgcgacttgcataattgcttactgcaagagcagaacttctcatgctgctattgcggcagggaaatagagcttgatagcagccacatcgaacatttcagaccgcaggatcattatctgccattggcactggaatacagcaatcttcatgcgtcttgcctgcgcgagaccacaccaggaaacccgttgcactgcggccactataaaggcaactggttcgatgaggacctgcacatttccccgacagaggacgattgcgagcagcgcttccgttatctgctcacagggaaaatccaaagcacgtcccacacagatcttcccgccacgacgatgatcgaaaagctcgcactcgatatcgcgtatctgacaaaaagacgccaagaggcaatcacgcgcgtgtttgatgagcaaatcttagccagcatcagcgacacagagttgacacttttggtacaaggcctccgctctggggatgccaacaaacagctcgcctttagccacgttgtcgcccgctatgcggagcagtttctggcgtctttaaaccctcctcccgaaaaaagctcggtcgggaatacgtga

SEQ ID NO: 86102 - DNA, 1290 bp, Pseudomonas amygdali pv. lachrymans str. M301315
atgcagaactatcgctgcttcggtgaattcgagatcgacttcgatccgcatctgaccatacttattgcctccaacggaggcggaaaaaccactattcttgatgccgctcgagttgcgctgtggcctttcgtcaagggttttgatcttggcggtcagacaggaaaatccgccactattcagattgaagatgtgcgactggcccaattcggcagtggcaatatggagtcgcaggtacccagcgttatcgaggcaaagggcgtctggtgggaaagcgccgttgaaagtagctgggtgcagcagcgcgtcagcctgaaaaagtccactaacactattggcgatgctggatcgaaagcactgacttcgtacggtaagtcgcttcaggaccgtgtgcgaagcgatgcacatgtcactctgccaatggtgagttaccttggcacttccaggctatggttcgagggacgcttcagttcggcggcggctcagacaacactcgataaaagtgagtactccagaacgtccgcatacctaaattgcctgtcttattcatccagtttcaagaccttcaccgcatggtacatctggatgtaccgcagctatcgtgaagctcagttgatagctctggagcgcgatgaagaaatgtctgatgccgggcagcgctttgagaaaatcatctcagctgtcaaagaagccatcgacaggttgataaaggctcctacggggtggcacagactggaatacagtgccagtcatcaacagcaactggttatgcatcatccggaccagggggttttacctgtcgaaatgcttagcgatgggctgcgtaacactatcgccatggttgcggacctcgcttttcgtgcctgcaaactcaacccgcacctcggcgagagggcgcccttgcaaacgccaggtatcgccttgattgatgaagtggatatgtttctgcatcccttctggcaacagacgatagtcggttcattacgtgcggcttttcccgccatgcagtttattgtcaccacccacagtccgcaggtgttgagtacagtccgacgcgaaaatattcgggtgatcggtaaagatgcccaagggcgtttgattgcatcccggccccttgccatgacctacggtgaaccgagcaacagcgtgctgcgaagcgtgatgcaggtcgatccgcagcctccggtggatgaaaagccgggcctgctacaactcacggaatgggtggacaaaggtcgctatgacgaaccacaggcgatcttgctgatgcagcagataacggactctcactga

SEQ ID NO: 86103 - DNA, 588 bp, Pseudomonas amygdali pv. lachrymans str. M301315
ttggaggagcagtacggattatgttgctatagcgaaattcgacctgaccgggttggcctgagtttccatatagagcacgtcgaaaacaagagccaaaaccctcagcgtacttttgactacaacaacctcgctgcctgcgcgctggacagtcagagcgatctggaggtattgaaaatacagggcgctgaggtatttggtgggcacgcgtcaggtaagtcgaaaggggtcgacatggctcgcttcgttttgtgtcacatgcccgactgttcgcgcttcttcgcctatttgtctgacggccgtgtagtgcctgctgacgggttgtcaccggaggaagttgaccgagctgaatacaccatcggcctgctgaaccttaacagcccttatctccaaggcttgcgacaatcctggtgggatgagctggaagctctttttgaagagcatgttaatcaaaatatgagtctgcattgtctggcggggattgatctcatccctgtgggggcgaacttaagtcagtttttcagcattacccggaattttttcggaggtatcgctgaagaggtccttgagcaagaggctggtcgctggtaa

SEQ ID NO: 86104 - DNA, 1530 bp, Dickeya dadantii 3937
atggatgtatcattgccagaagatttgtacactgcgcaggcgactcaacgtttacctaaggaacggatgatgaaaataaagcaattcaggttgcacaacgtcgggcgctttacttctcttgatgccctcatcgcgccaacggctgattatccttccaacgtaacggtgctggtcggcaataatggcgccgggaaaacctccattttgcaagcgctggcaacctcgctcagctggctggtagcacgggtgcgcagtgaaaaaggcagcggtagcggcatcaacgaaggcaccattaccaatggacatacttccgccgcgattgaggtcatggcacaagatactcctccgctctcaggccatgctgccgacaacgacgctgaataccattggacgctggcaaaaacccgcagcggtaaaaaagggcagcacaccagccagttgaatgcggtttccgcgctggcggatcattatcgctccgcattaacgcaaaacgagcaaagcagcctaccgctaatcgccttttatccagtcgaacgcagcgtgctggatattccgctgaaaataaaaaataaacatcattttcaacaggtagatgggtatgacaacgcgctcaatcagggagtggatttccggcgttttttcgaatggtttcgtgagcgggaagatattgaaaacgaaaacgatggcgtcgtgctaacgaatctgtttgaaagtaaccctgaaggggttctgaaggtttttgaagatatcgaagatgccgattatcgcgtagataaattggaaatatttgattgggccgggctatcagaagaattcaaaaagctcaataacgccctgaaactcatgcaagaagttcaggataaagccaaagatcctcaactcaacgcggtacgctcagccattaccgcgtttatgccgggcttttctaatctaaaagtacgccgcaaaccccggctacatatgtcggtcgataaaaacggtgaagcctttaacgtgctgcaactgtcgcagggcgaaaaatcgctgatggcgctggtgggtgatatcgcgcgtcgtctggcgattatgaatccgacgctggacaacccgttgcacgggcaaggcattgtgctgatcgatgaagtggatatgcacctgcatccgtcgtggcagcgcagcattatcgaacggctgaccaccaccttcccccactgccagtttattctgaccacccactcgccgctggtgatcagcgattacaaagatgtgttggtgtattcactggataacggcgaactgaccgtggtgccatcccaatacggtcaggatgccaatagcgtgttgctggaggtgatggatacccatatccgtaacgcgcgaatcgcggaaaaatttagtgacctgctggacatgatccagcgccagcaattaacgccagccaaagcgttattggatgaactgaccgcggagttgcccgccaccaatctggaattgaccaaagcccgcctattactgcgcaaacaggagttacgcggtgagaaaaatcactaa

SEQ ID NO: 86105 - DNA, 633 bp, Dickeya dadantii 3937
gtgagaaaaatcactaaaggtacggaacctgccagcctgacagcctggaaacgcgccaatcccacaggccggtacgacgatttgacagaaaccgagcggcaggacatccgtgatgcctgcgccaaagagcagttttacctgtgcgcctactgctgcaaaccgattagcggtgataacagcgacaccatgaatgagcacgtgcaggcaagaaaattagcgcctcaccgtagcctcgatttcaccaatatcgccgccagttgtactacgccaaatcagtgcgacgccgcccacggttcacaaccgttttcccttactccactaatggcggaatgcgaaaccgaattgcaatttatgattagcggacgcgtcagcggcacgacagcacgcgcgcaggatgctattcgggtacttaaccttggcgacaatgaaacccataacaaaaagctgattgagatacgcaaacagtttatcgatagcctgttatggactaacggtatcgatcctgacgaagggttggaagacgacgatctgttaacagccgtcattaacgatttcagttccccgcaaaacggcaggctgacgccttacgcaccagtgctggtcaacatcctgagaggatggctgtcggcataa

SEQ ID NO: 86106 - DNA, 1377 bp, Streptomyces violaceusniger Tu 4113
atgtacctgaagaaccttcgcctacggaacatcaggtcgttccacggtgcacgcgacgtcgacctggacctgaccaggcccgacggctcatacgccggctggacggtcctggcgggccgtaacggctcggggaagacgaccctgctgcgcgcggtcgccttgacgatcagcggacctgccgtggcccgcagtctcgtccccgggttcgacacctgggtctcgcgggacgagacggtggcgaaggccgaagtgtgcctggtccatgacccggagcaggaccagttcaccacggggcggcgtccggtccggccgatctgggccgggctgcgctggaccgcggcggagcagacgtctctctcgggcaagccgggttccagcagggccggacagccggcgctgaacgccatcggctaccagaaggaacgccccgtcgcccagcgcggcccctgggcggacaatccggtgggatggttctgcgcggggtacggtcccttccgcaggctcgccgggggctcgagcgacatccagcggctgatgtccagctcgggcgcggtcgcccgactgacgagcctcttccacgaggacgcgtcgctggcggaaggcgtgagctggctcatcgagcagcacctgcgcgcgttcgaggacaaggacggcgcccgggacctcaaggcggccgccctggccatcctgggcgacgacctgctgcccgacgactaccggatcgataacgtcgactcagagggcctgtgggtcgtcaaccgcaaccaccgattcccgctgcgggagatgagcgacggctaccgcacggtggcggccttggtcgtggacatcctcaagcagatccatgacgcctacggcgaactcgtcctggacacgacgggcggcacgccgaacgtcgcgagttccggggtcgtcatcatcgacgagatcgacgcccatctgcacgtgtcctggcagaagcgcatcggtggctggctgaaggcgcacttcccgaacatccagttcatcgtcaccacgcacagcccctacatctgccaggcggcggaccccggcggcctgatccggctgccgggcccggacgaggacagccctgtcgaggtcgtgccccagcacctctacgaccgcatcatcttcggcagcggtgacgacgccgtactctcggacctgttcgggctcgacaccccctactcggaccaggccgaacagaagcgggaggaactcctcgccctggaactggacgtcgtgcgaggccgggccagcgaagaggaaaaggaccggtaccgccatctgaaacgcaagctggccagttcaccagccacccgcgtcgacgaaatcgcggcccggctccactcccgtcacccacggcacgattcatga

SEQ ID NO: 86107 - DNA, 747 bp, Streptomyces violaceusniger Tu 4113
atgatccgagtgacgagggtgccactcccacaggcgacgctgacttccatggccggctacaccggtgacatcgggcaggcgaccgtacccaagcagcgagccaggcagttatggaagcagacgtccgtccgcaggcacatacaccccgtgctgaaaggcgtcctcgcggagatggcgccgggactggagcggtgcatgtactgcggggacagccagggcacggacatcgaccacttcgagcccgtccgggtcaatccgttacggaccttcgactggaacaaccacctgctggcgtgctccctttgcaacagccacctcaaacgtgacctcttccccctcgccgccgacggcacccccctgctcgtcgacccgagcagcgaggatcccgctccgcatctgcacctctcgctcgctgccggcgcatacatcgacctcaccgacaggggcgccgcgacgatcaaggtcttcggtctcaaccgggaaatcctcgtccggggacggcgcaacgcctaccggatcaccccactcctactgaacgattggcgcgccgccttcgacaccggcgataaggaggatgcggcggcatgcgcgtccaccatctgggagcagccgaccgccgatgtcgtccacgccatgttccaccaggcggtcgcccccggcgccgaagatatcttcaccgacgagtcccaaactctcgcgctgttacgcgatcccgtgatccgtgccgcactgctgagtacgggttga

SEQ ID NO: 86108 - DNA, 1398 bp, Escherichia coli ABU 83972
atgagaatcgacaaactgtcactgcttaactttcgttgcttcaaacagctcgatatcacttttgatgagcacattacgattctggttgcaccgaatggcgcgggcaagacgacagtgctggatgcggtacgcctggcgctgttcccctttattcgtggttttgatgccagcctctacgtgaaagataaatcactagcgatccgtaccgaagacttacgtctgatttaccgccaggaggcactgaacatggaaatgtcgtctccagccaagattacagctaccggagaatgggcaagcggaaaaacggcaacctggatgctcgataaacgaggagaacagccgccacatgaagataagatggcggcgcagcttacccgctggggtgagcaactccagaaacgagtacgtgaagagcatagcttgcaacaagttgaacttcccctaatgctttatttggggactgctcgcttatggtatcaagaacgttatgaaaaacagcctactgagcagcgcctggataatagtgccttttcacgtttgtccggctatgacgattgcctctcagccacatctaactataaacagtttgagcagtggtatagctggctatggcttagctaccgtgaacatcaaatcacacaacttgaatcaccttcagcaaagttaaaagaaggtgttcgtgttcaacggatgaaagaagccattcaggctatccagcaggccattaactgtctgacccagcaggtgacaggctggcacgatctggaatacagcgccagccataaccagcaactggtaatgagccatccgcaatacggcaagatccccttatcccagctcagcgatggcttgcgaaatgccgtcgcaatggtggcagatatcgcatttcgctgtgtcaaactcaatcctcatttacaaaatgatgcagccttaaaaacgcagggaattgtgctgatcgatgaagttgatatgttcctgcaccctgcctggcagcagcaaattatccagtctttacgcagcgcatttccgcagatccagtttattgttacgacccatagcccgcaggtgctcagtacggtaaaacgcgagtccattcgtctgcttgagcaggatgagaatggcaacgggaaagcgttgatgccgctcggagcaacctacggcgagccgagtaacgacgtgctgcaaagtgtaatgggcgtcgatccacagcctccggtgaaggagaaggcagacctgcaaaaactgacaggatgggtggatcaggggaaatacgacgagccgaaaacgcagcaactgatggtcgcattggaagttgcgttgggtgagaagcatccacagcttcaacgcttacagcgcagtattgcccggcagagactgctgaaagggaaagcgcaatga

SEQ ID NO: 86109 - DNA, 732 bp, Escherichia coli ABU 83972
atgaggcatgtgatcaaaactcaacttgggaccgttgccttactgaccgcacatgaaaacccaccacaagatgctgatcaatcaaccaggcgctggcgaaatttcagaagagataaagccgctgtaatggtccagctcattaacgagcagtatcacctttgttgctacagtgaaatacgctctgatcttcgtggtcttggttatcacattgagcacgttgagaataagagccagcatccagaacgtacttttgattatcagaatctcgctgccagtgcattagattcaggggagaacggcggtttatcttccctgaaaggaaaaaatgcttttggcggtcatgcccaaggaaaacaagatgttgtagatatggcaaaatttatccattgccatattcgcgattgttcccgttattttgcttacctttctgatggtcggatagttcctgctgatgagttaaatgcacaagaaacggagaacgcgcaatacactatcgatctactgaacctgaacagcggattccttcaaacggaacgtcgtaatcattgggaagagctggagcagctttttgatgaacacattgaaaaagattgggatttgcagcaattactccagcttgatttggtttcaacaccagaccataaactgcatgaattcttcagcattacacgccagtttttccagcaagaagctgaacaggtattacagagccacgccccagcattaatttaa

SEQ ID NO: 86110 - DNA, 1623 bp, Vibrio cholerae MO10; identical to SEQ ID NO: 85886

SEQ ID NO: 86111 - DNA, 618 bp, Vibrio cholerae MO10; identical to SEQ ID NO: 85887

SEQ ID NO: 86112 - DNA, 2529 bp, Vibrio splendidus 12B01
atgagcaccaataactcgagtcatcgtgatgcaagaaatcaagctagagatatttggaaattaattgattacattcgtggtgcttcctcgatatcagactatcgttcattagcatactccctattgtttattcgatacatgcaggcaaagacgggtgaacgcttcgaatattctaacttttattcttctgaggacatcagcaatttcatagataatctagtgcaaagatgcatagattccgagatgtttcatcacgatgttgccggcttcttaagggagcatataagctatgtgttgttaaagcatggttctataaacgagccaaatgtccgtttggcgctttctgataatttcaaaaatagtagtagaagctttgtcgaagctacacttagcgaactcgatattctctttgcagaaaacgaatcaaaatcaggaggtgaattttataccccccaagatgttaattggttagttacaagattaggtgcagaatacgagcctgatagtgtatgtgatccatttgctggtgcgggtagtactgcattttcgtttgatagtgctcttggtacttactttaatatcgatactcaagaagtaaaccgagatgcgcattttcagattgtcgtaagccgtatcgttaaggatgtgtatggtaaagattatcttggagattcattatcaactccttattaccaatcacaacaatatgacttagtcgcttctttccctccttttgggatgaaaataccgaagtccaaccgtaggcagattttggaaagaagagggaactattggttagagcaagcttataaccttcctgagagtagaagtgattggtttgtcactctatcaatgcttcctgctttaaataagaaaggtaagttaatcactggcatgtctttggcgtcaatgacacggagtggggctgaaactaaaattagaagctttctagttgcccaaggtaacattgagaaggtgatacttctaccaaagaacatataccattctacttctatttcttctgtattattagttctaaacaataaaagtgacggtgagaaacgacgcgatatccagtttgtagatgcttctcttttttaccagccagcacggggtagaaataccctgtcatttgataatatagaaaaaattgtagcttcttgtttatcagatgggcgcttcagtaaaacgatatctagtgaagacgttgctaacaataatttcaacttaaaccctagcttatatgttgaaaaaacgattaaagtaaatcaaataaagctaacaaattttagaggctacactgactttacaattccaattcatgaatctttgacggtattagttggagagaacggtgctggtaaaacttcaatactcgaagcaatttcatgtggcttaggaccatttttaactgcaatgcccgacgcgaagggtaaactgatacgcaaatcggatgttcatgttggccctaacggtgttgccgactctgctcgtatctcaatagatacaaattcaagcttaagctgggatctggcaacgaagggttctgatcgaaataatttggcaaaaataggtactcaggctctttctgattatgccaatcaaattgttgatagtgatgaggaatacccacttattgcctattacggtacgaatagagcattgtcttcttcgagtggaaaagtatcgatcagccctttcgaagtggttcaacgaagtgaaggatatgattcagccctcgatgcaaaaataaactatggttcgttaaaaaattggttttcgaaaattgaggtcgatgagttaaaattaagagatgaaaacaagaaccattcttttgtgcacccagcaaaagcgcttgtaactagtgctgtgaagaccatggtagaaagagcggaagatgtagcgtttgataaagcaacgaatgacgttgtagtatcttggaaaaatgaagatgaagaaatcatttgtttaggtttagagcaactaagcgaaggctatcgaaacatggttgctcttactattgaccttgttcgtcgggcttatctcttaaatcccacttcaaaatctccactagacgtatcgggagttgttctgatcgacgaaattgaactgcatctgcacccgagatggcaacaggtggttcttaaggatcttacgactctctttcccaatgttcagtttgttgtaacaactcatagccctcaagtgctcactaccgtagaaggtgagtgtattcgagttgtatctaactcttatagggaagccgaatttgttagttctccttatggtggcgaaaatagtcgagtaatgcagcagatacttcatgtaaattctagaccagacacagaagtatcagaaaagcttaaagagtacttcgatctcattgagtctggtaagggggaagaagaatcggctatggccctacgtaaggagcttactcgtttaactgatggaacagagcccatgctagcggaggctgatttagctattaaacgtgtaaattggatgaagtcgagaaagagtaagtaa

SEQ ID NO: 86113 - DNA, 753 bp, Vibrio splendidus 12B01
atgtcagttttagaaattgaagagcctgaattgctaaagaacttcaggctagcaactccccaagcgacttggagacagttaaaagataactctgatgcaaacaatgctctaaaagttaatgctataaagaaaactggtggtttatgcgtatattgtgaacagaagttaatagctaaaactgactaccagattgaacatttccaccctaagaaagggaatgacaatagtgattttggagatggcgtgccaaatagagctatagagtgggggaatttgtatcctggttgcttaggtggtacagcaaaagtagtggattttactacccaagatgatttggattttcgtacgaatgctaaatacaaaaataaaggtagacttacatgtggccaaaggaaaggggatgtagaaccagagggaaacttcatttcaccacgagatttaaacaataaatctcctatattctcgtttaatgattttgatggctcagtatctcttaatataaaggcttgtatttctcagggtatcccagtcgaagtggccaaaaaccatttaacaaagttgaatttagatagccaaaggttaaaagacgcgaggttcgcactggcaagctcacttagaagtgagtttgataaagcattcgaatttgactctgatacagttgatgagttggtaaatgattggttggcgttagatggaaatgggatgtatacatcccctttcattagtatgatttcaggtaaatacgtttgttaa

SEQ ID NO: 86114 - DNA, 888 bp, Vibrio splendidus 12B01
ttggaacgctcctatcaaaaaaactttttagtcagtttctttgaagcgactcgtcagtattcaaatcaagggaatagaaaccagccttcaagtttatctgcaataagaacaaatgctcaacatcagcagttaaatcaagatttctctactagttttgagtcttatcttgtagcattttttgaagctggctatatggcttcgatgatgcgaaatgacccttctgagaaacagaaagttgataattggttggattctatagcaggtgatctacgttacttatttgaagataactctttaaacctcaaatacaacgaacaagaaaggtgcttttatattgagcaaagaggcaagaatccatatacattttctacgttgtcttcaggttattcttcaacgctgaaaatatacaccgatttgttaatgaaagtagaacttcgtgaaatgagtccaaaagagttgactggtatagtaattattgacgaagttgatgctcatttacatgtgtcacttcaaaagaagatactatctttcttagaccgttcgtatcctaatgttcagtttatcatttcaactcactcaccatttgttcttcagtctgttgataatgcagtgatatatgatttaagtaaattggagcagctagaagacttatctttatactcttatgacgctattactaaagggctactaggtgttagcacaagttctgatgagttattccaaattacaagtgagttgtcatctttaattactaatattgaagaaaatcaaattagggtaaacgaattaatagaaaaattatcaccagtagagggcgaattagactcaaaatctaaagtaatacttcttatggccaagcaatctattgaagatttggagggtaaataa

SEQ ID NO: 86115 - DNA, 666 bp, Vibrio splendidus 12B01
ttgtttaatgtgattcgcccaaccaatggcccttcttgtttatcaagtggatcttcatacaatcaaccagacgttgttgtggcattaaaagatgtgtttcataagaagtgctacttatgtgagcgtgatgaaatacatgacgttgagatcgaacattttgtacctcaagctgctgggggggatagaatggattggaacaatttgttttattcttgtagtcgttgtaatggcataaaaagcaacgggcatttaaatctacttaattgtacagaccctagtataaatgtttgcagagaaattcgtttaaaagcttttccgactccagatagcgacgtgttagtcgaaccccagtcagataatccaagcgaggaaacgctaaacaccgttgaactgctgaaactttgttataacaattcttcaacggcactgcgtggcgtcagccgtgaagcattaatggagcaaatctttgatggtatgtgcacttttatcaacgctcgtaggttactaaaaaaaccttctacaggtcgaagtaatcgacaagatgcactagaaaccatagaagctatgttggacgttaaacacccttttagcgctttttggcgctggcagtatttagatgacaattttctgacaactgagtatccagagcttggttcggctttctag

SEQ ID NO: 86116 - DNA, 1317 bp, Vibrio sp. MED222
atgaccaaacaaatccaagatatacacgtaaagttaactcatagtaacaactcagtaagaatagaacctaaaggcaagaacataattatcacgggtgctaatgagtgtggaaagaccaagtttttagaacaacttaatgatgctttagtacggatagctgacgttcaaaatagaaagtcataccaagtcttatatgaagactatcaacaaagtgagcgtcagcttcaaagtcttaccacgacagaccccaactacccatatttcaaaaaacgagtcaaagagctccatgatgaaatggaggttgctcaaaaagtagatttacttttgagcgatcagacatcttatattgagggctataatgaaaaaacgtttctttttggcttttatcaagcaactagacaatctcagatccaaattctccaacaaaaaccaagtttgaaagcactgttagactcgaaagtaaacacacccctatcggcagactttggtacagtctttgagcaatacttggtagctatgaaaaggctttctaacgatattaaggttgatggctcttgcgaagaacaatcagatgccgaccgtattgacagttggttctcgaaagtccaagaagacctcagagagttgtttgaagatgataaactatgtttaagatataatcgtgaggaagaatcctatttcatagagcagccttcaaagacaccttttaggttcgaccaattgtcgtctggtttttcggcaataatgagtatctacgctgatttgctgatgaaggtagaacttaagagtatctctgcaggagagcttgagggtatcgtccttattgacgaaatcgatgctcatctccatgtatcgttgcaacgcaaaatccttgccttctttgtagaagcattccctaaagtacagttcattgtgacaacccattcgccatttgtagtccaatctattaaagacgttgttgtgtatgacctatcacttctagagcagctggaaaatctatccgcgtattcatatgaagcaatactagaaggtttacttggagttacggctaattctctgacactagaagatataatggatgatctctcggacgaaatcgaactaggcgctccaaacccagaaacagtggctaaattactcgaacgactcagtccacatgaagctaatttgagtggtgaagcccaattgtttgtatcgaaaggaaagagactcttgagggagtacagaaaaagtgaaccgactaatgaccgacaaaatgttgaattaatggctatggaaactaagtctacaactaccgatcttaatgaaaaggagtag

SEQ ID NO: 86117 - DNA, 681 bp, Vibrio sp. MED222
atgttcaaagtaaaaaggcccaaagtcgctccagctgggttgataaaaaaatacgactctgaagacgttgttcttaaacttagagatatattttacggcaaatgttacttgtgtgaatccaaatggccttctgcaccagaagtggagcattttgtaccacaatctctagatccgaaacgcttagctactgactgggacaacctgttttatgcatgccgtcgttgtaatagcataaaaacagctaaagacgctaaattgttggattgcacaaaagcggacgttttcagcgcgataatttgcgaactaccaacaagaaaatctaaacctgtagtagttgaagtgaatcaaggattcgagtcaccagaggcagaaaacaccgcagctttgctgagagattgcttcaataaagataacactggttatagaaaaataaccaaagctcaacttcggaacgaattggttcggtattgtacaaggttcatgaaatacaatgacattttactagattatgaagctggccgaaaagagaaagaatatgctgcggatcggcttgagagaatggtgcaaccagacttcccgtaccatgcattctggcgtcgaatgtttatggaagattctgatctaatgcagttctaccctcacttaatagaccctgaagaagatttggaaaaagttgggtaa

SEQ ID NO: 86118 - DNA, 2097 bp, Bacillus sp. NRRL B-14911
atgattagagtttataagagcaaatggccagaaccatttttttatgagtgggtcaataaaaatcatatcgaatacccagatgattataacagatatcacttagaggagtatttaagttattttaataataagtgtgtattctgtgaatcttccctatctgatatgaagttaatggttgggcattacagaccaactaatggtgcattgaatataactaatggtcatttctctgaaaatcattatcggtggttggataaagattggtcaaacacattggttctatgtgttgaatgccatagaactaaaagtaataggttcccacttgaaggagagttttgttcacctgaagctgatgaaattgatttaactagcgaaaaacgtttgttaattaatccctttcgtgattttccagaaaagcattttttgtatgatgaagaaggaattatcatacccaaaacaaaaaaaggagaagtaacagtagaggtattgaacttaaatcgacattcattaattgaaggaagaagaagggaatattctcattttaatagagtctgtcaggcctttatagataataaagaagatgagggaatacttgaagaaataataaagcaaataagccaagaagctccatttgctgggattaaaagatactttttattaaaaatgattgctgatgacttaattccatatgtacaagattttacaccatacctccgcatacttagaggaagaaaccctattacaagagaggatattcaaaataaggttgcaaaggagaaatattttaataacacaaaaaaaaatgattattatgatgtaacagatgaaaatgatatacataaatatttttctaaacagaggtttatagaatcagttgaaataaggaattttaaaggcttgaagtatttaaacctagactttggattaagtcaaagtatgggcgcaccatggttaatgttattaggagaaaatggagtaggtaagagttcagtgttacaagcaatatctattggactaatgggagagcaaaagcgtaaagaagtaattttgaagagtgccaataattttgtgactaaccaaaaaagagaaggctctattaagataaaattaactggaatggtagacccaataataatagatttcactagagacagccatttatttggaggggaaaatcatgttgatccccgtgtactaattttatcttatggttcaactagacttttaccaaccgaaaataagatagatatgtttaggccatcgtgggcaagagtagagaatttatttgatccatttgtacccctggttgatgtagagaattacttaacttggttggaacaagaagacttttttattgttaaaaatgctattgaaaatttattcatggaaaaagtagagttaattagaaatggtggaactaaggggataaagttccggttttctaattcaatagttcgactagaagatttaagtgatggttatagaacaatcattgctttagctactgatattatgatggttatgaagaatagatggcgtagttatgatgctgaaggtatagttctcattgatgagttagatgctcacctacatccaagatggaatatagagattgtcaggaagctaagaatggcttttccgaagatccagttcatagctacaactcataaccccctaacactacgaggtttattaaaaaatgaagtagcagttatgctggaggataatgatagagaaactattgtattgcaaaatcttcctgaacaaaaaggtatgatgattgaagatatcttgacttcaaagttttttggtttgtacgatacattacctgagttaaattcaatttttcatgagtactatagattgttagctaacccatctcctaacactaaacaaaaggatagaattgctatattgaaagaaaaattaaaagattatgataagttagggaatacaaaaagagatcaaatgttttatgaggctatagatagatatatagctaaagagaaagcaacaaatgaaaaactaacaagtgattcatttatccaagatattgataatattattaattcacttagagggttttataaaaaatga

SEQ ID NO: 86119 - DNA, 870 bp, Bacillus sp. NRRL B-14911
atgatatatatacaaagaagcgagacaccacctgtattagatttagaagatagtaattcagttggttcaaaggagtacacagaagcaattaaacactttgaagacaaagaccgtaattttacttttagagcatacaaggaagtaaaggatgttctagaagttatgtttaatagcaaatgtgcctattgtgagagtgacatatcgccggtatcgtacggcgatatagagcactttaggccaaagagcgcgtatcatactactaaagccgaaactctaaaatatcctggttactattggttagctatggattggaataacttactattatcttgtgaagtatgcaataggacatataagaaaaaccagtttcctttggtggatgaagctaaaagaaagaaaaagtatgatgaagaggttattgaagagccattacttattgacccctgtgacgcaagttctaatccccaggatcatattaattttacagaagaaggattagttgagtatacactaggtggtagatgtaaaggaaaaaagtctatagaagtatatggtttagataatccaaaactaacaaggaaaagaaaaaaattagctaaagaaataagtgataaaaaaagccaggttttaagatacatggataatataagagcgttattagcaacccccttgcctggtgagcttaaaagtgtattagagaataattttatagatttagaaacagtttataaatctataaaaaacttaaatctaccaacagagccatatcagggattggtaagaaatttaactgcagaatttttagctaaatattctccaataattgacaagcttctttttgaatttcatgaacaaaagaaggaagaataa

SEQ ID NO: 86120 - DNA, 2538 bp, Pelagibaca bermudensis HTCC2601
atgatcttcttcgatcatgccgaccgggagcgcgacgcgcccgagtggttcgcctcgcgcgaggtcgaggaggcgctccgccagatcgacactttcctgtcgctgggagcacgtgagcgtgcccagaccgacccgccgccggtctggaagctccccgtgggtcgggatgtgctggacgcgctggagcatcgttcgatggggctctgtgccttttgcgagcaacgcgcccgcctcggggcctggcggtttcgcccgccggcccatgccatgccgatggccgccccagatgagcggatcgcctatctctggcgcagcttcgagtggccgaatttcttcccgatctgtcgtgactgcaccccctcgccgcaaacctatttcccggtcgacggtcctcgcgagggccctccgccccgtcccgcgcccgacaagagcagctcgaccggcagcttctggcggcttccgctctctggcgatgtgcaccagaccatcatcgggcccgggcaggcaccgggtcgctcgcccgacgaagaagctatcctctatcacccgggcgaatccgcacagcccgccagcgccttccgcgcgaccctcgatggcgcgctgatccccctcaaccgccgcgcccgggagacggtgaagacctaccgcctcgaccgcgcggaactcgtcgccgcccggagccgggtcgcgcgcgagctgctacttcgtcttgaaaaaacgccggaccgggcgagcgagtcccttcatcggctgaccgggttgcggaccgatgaagcccacccaattcccgagggcctgcagttccccggcttcgcctatctcgtcttcaggcaattgcttgcggacgcgctcgggcgcatggggctcgagcgcccgctctcgctctcccagatcatgcgcagcacgctctctctcgaacgcgacgtcgatttcccccgcgccctgaccgagtcgctcgcggcgttccaggccgaggatgagggcactgccggcaccggagaacaggcccccgaggcaccgcagccggcgcctccccccgacgacaccgccgcccggcgcgcccatccacgcatcgctcagatcgcactgcgcgatttcaagtcgctcgaggccatcgacctgaagctgcccgcagcactcgataccgagagcgacgagatcctcacagagaccagcatggagccgccctcggccccctgcctcctgatcctgggcgagaatgccaccggcaagagctcgatcctcgaaggcgtggcgctcgcctgcctcgacgccccggcccgcgccgcgctggccgagagcgtgggcctgagcccccgccgcctcacgctcgatccgcgctacatgggcgccccggagcaagaaccgcgagaccgtgccagcgtcgagatcgtctttcatcccgaagagcccgatgagaccggtcgccacctcgccctcaccgcgcggcgcgacgcccgcggcggtgtcttcgacgaacgcgacgacctgcccggtccgcgccctttcgttttcgcctacggccccaaccgcatctatggcagcgagacactcgacacgccctggcgccactacgacacgctcttcgaatccggccgccggctgtcgaacccggaagcctggctggtcgagctggcgcaacgcgacgacggcgccctcgacatggtcgtggcagcgctgcgccacatcatccagatcgacgggcgcttcgagaccatcgacattgccccggacccgctcgaaggcgacgcgctttgcgcctggatccacctcacccgcaacgggccggagggccgcaagagcagcgtgcgccagcgccttgccttcgcctcctcgggctaccgggcggtgctggcgctggtctgcgacgtgctgcaggggctgatggcggacggcgcctcggtctacgaggcgcggacctcgaacgcccttgtcctgatcgacgagatcgaggcgcatctgcacccgcgctggaagctccagatcatctcgggcctgcgccgcgccctgccccgggccacgttcctgctcacctcgcatgacccgctctgcgtgcgtggcatgcgaccgggcgaggttctgatgctgaaccgtcacctgcgtgatcccgatgccgtagacgatggcccctccgagatggaggtggtggagcgggtttcggatttcggcgctttcgagcggctgaccatcgagcagctgctgacctcggacatgttccagctggtgtccgtcgatgatccccgcgccgagcgacgctacgctgaggtcgcccggttgcttgggcaacaggcgaaggccgaggcttccgggaacccggatgccggcctcaccgccatcgaacgcgaccagctgcgcgcctttcacgaagaggtcgccgagggcatgcccgccggtgtgagcgaggtcaccacgctggtgcagaaggcggtcgccgatttcctccgggatcgccgcacgctggacgcgaccgcccgccgcgagcgccgggaggcggtcgagcaggagatccgctcgtttctcgaggagctgttgcgatga

SEQ ID NO: 86121 - DNA, 1068 bp, Pelagibaca bermudensis HTCC2601
atgaggttcgtcgaccgcaaggccgtggccgagcccgagatcctgcaggcccccttcacccgaggcaggaagaagggcctgtccgagcttgacgacgtcaccgatttcatggcgcgcaaggcggctggtgaggcgaccggatcctacaccttcctgcgctacaaggaagatgcggtcaccgaggcgctcgaggcgctgttcttccgcaagtgcgcctattgcgaaagcgcctatgacatcgtccagccggtcgacgtggagcactaccgccccaagggcgcggtcgacggcgccgagggccatgacggctactggtggctggcgatggactggcgcaacctgctgccctcctgcatcgactgcaaccgacgccgcggccagcgcatcgcgggcccggccggcgcgaccgacgtcaatgccggcaagcagacgctgtttcccctgcgcgacccgacgaggcggtgggcagacagcgccgcacagggcgaggacgacggctcgggcgaaggccgtctgctgctcgacccgacccgcgacgacccggccctgcacctcgcgttcgatgtcgatctcgccgcccctctggggctgatctacgcgcgcccggatcccgaccggcccgatcccgggcggacggatgccgccggagcgctgccggccctggaggagaccggcccgatggtgcgtgccgccgccgaggccgggctgagcccgatgggagcggtctcgattcaggtctacgggctcaaccgcaccgggctggtgcaggcccgcacgcgggtgatgcgcgacatggccttcctgcaccggctggtggtatcgctgggcgagctggcaatggacctccgcgagcgggccgaggaaacgacgcgccccgcctcagaccgagacttcgaccgccgcgtcgccgtcaagctcgacgcccttcgggccgacgccaaggaacagatgcggctcaagaccgcgcctgacgcaccctactccgaagccgcccgcgcctgggccagagccacgctggccgagctgaagtcggaccccgcccaacccgcgccgccagcagggcgctag

SEQ ID NO: 86122 - DNA, 1623 bp, Vibrio cholerae MAK 757
atgaatgagccaactagaatccccaaatatgttaaagataaaattagacaggctaaacagggagatctgtactcatcctttactgtttctgagtattactacgatggtgaagttttagaaagggacatagaacagagtgaactatatctaagaaacgtgtcacgtattatcaacaatgctaaaatcagactcagaaatatctccttgtatgattacaagaaattctccaaattaaaattcacgtcatcagaaaaaaatacaacgatcattattggtaataacggttccggaaaaagtactatccttgaatctatatccaaatgcctacaatttctttctgataacatcagaatccaaaataataacaactacaaattccaagattcagaaattaatatccattcaataagcggacaaaccattgtaagatgtattttggaaatagaaaatgatttttctttttcatgtagcctaacaaagaacagagaaaacatatcaagaaaagtgtctagtgagcttgaagaatttaaagctctagcacgcatgtaccaacgctctaatgaactggataataatactctctcttaccctttattagcctattatccagttgaacgttcagtaactcttaaaagagatgacgctgtaaaatattatgaacgaaaaaaagccaaatatagtgataaaagtgaaggtctaaaaaatgcctttgatggcacatctaatttcaatgattttttttcttggtacaaagaaattgatgatattattaatgaattcaaagcaaatgactctataacaaaggaggaaattgaatatttattatctaagactgataacaaagagaaaataggaagtcttatttctcaattactagagaaaaaaaataattacaacaataatgaagatagagaatttttaattagacaacaaaaagtaattcaagagtccataaaaacttttgtatccgatatagatcaagttaagataagtagaacacctcacttagatatgacagttataaaaaatggaagtgagattagtatttttaatctatctcagggtgagaaaacacttatcgctttggtttctgatatcgctcgaagattagtaatactaaatcctagcttagaaaatccgttaaatggatatggtattgttttaatcgatgaaattgatcttcatttacatcctaaatggcaacaaactattgttcaaaaactagaaaataccttcccaaatatccaattcatcctatcaacgcatagcccactagttctaacaacagttacttcggaacaaataaaaataattaatgaattagactatagattcaaattactatctccaacaagcaatccatttggcaaaaatgcctcggatgcactagctatcatggaaacatccgaatctccattagttcatagtgaagaaattttagctcttataaaaaaatatgaatctctggtgaaaagaggacaagaagattgtcgaaagaccaaagagattaaaaaacgcatagaaagcactggatatacatttgatatagcagacattgaaatgtggcgttttatagcagaaaatcgtgaattttttatcgataaatctgaaagtgatgactaa

SEQ ID NO: 86123 - DNA, 426 bp, Vibrio cholerae MAK 757
atgcaagttgaacatattaaaccaaaatcgggaagaaatgctcaacctaatctctgtttcacctacagtaattatgctgtttcatgtattcaagaaaatcgtaagactcaaacttgtggacaaaaaaagaaagataacattttatttattgagccgacatcaccatcatgcaatagtcatttctctttagacactgatggttttataaatcctcgcgggtttaaaaacagaaaagaaaagcatagtattcaaactacaatcgacatgttaggcttaaataaaccacacctacaactagaaagaaaaaaacaaatagaaagattaatatacattttaaaagcaacaaaacacaatagacatgaactaaccaataaatttataaaaagtggtaattttaaatatattttacgagaacttacaatgtga

SEQ ID NO: 86124 - DNA, 921 bp, Vibrio parahaemolyticus AQ3810
atggatatcagtgattctgatgctctgttcgaattggttaacaataatcaattcatccttcgctttttcgaagcgaatcgacttgcaaacaacatagctgggaatggtcaaattgaaagcatatcgaacgtgaagcaggctggtaaatcccaaaatttcgaacaagattcaagtaatcagttcgaaaaatatctagtcagttattacaactatggttcgcacgtaattgctcgtgaaaacaatccagagaaagagcaacagataaacgcatggtttgagaaagtacaaaatgatctccgtgacctgtttgaagatcatggactaattcttcaatacaacccagaggaacaagccttctacattcaccaagaaggcaaagatccatatcgatttaataacttgtcttctggctacagttcaattttaagcatttatgccgatttgcttatgaaggttgagttacgtgatatacctgcggaagatatcactggcttcgttttaattgacgagatcgatgcccatctacatgtttcgattcaacggaaaatattttctttctttgacaaggctttcccaaagattcagttcattgtaactacacattcaccttttgtagttcaatcggtaaatgactcaataatctatgacctaagtaaacttgaaccactggaagacctttctatgtactcatatgagtccattttaaaagggttactaggggttgagagcacttccgatatattaaacaaacggttggatgagatggctgaaatcattaaccaagagccagtaaacaccgaaaaattacaggaattaatcgattcaattgaaccgtatgaagggcagttaaacgctcgttcacgagcatttcttttacttggcaagaatgctcttttagattcgactgatggtgaggggtaa

SEQ ID NO: 86125 - DNA, 666 bp, Vibrio parahaemolyticus AQ3810
atgttcaatgttgttcgaacataccctgagccacctagcatcgctaagaacgaatacaataaagatgatgtactcaagaaactcagaccgatgttcttcgataagtgctacctttgtgaacgggatgacattcaagatgtggaagtggaacatttcatcccacacataaaaaatacggcactgaaatacaattgggaaaacctgtactattcatgctctcgatgcaatggtatcaaaagtagtacacacattaatctattggattgcgctaatcgtttctacgatgtgggtgcaatggttaaatgcttgatgccttctacacctgatggagacgttgaagtttcggcaaccagtgccaccccatgtattcaaacagcaaacacggtgacattacttgaggcttgttacaacttagataacacggctctcagagaaattagccgagagactctgatggaggacatgtgggatcattacacggagttacttaatgctaggcaggtacttcgtaaaaagaggtctgggcacacagaaaagaaaaatgcaaaagaaataatcgaagtaatgcttgatgtagaatacccattctctatcttttggcggtattactacttgaacgattcttttcttgtgcagcattatcctcaactaagagttggattttaa

SEQ ID NO: 86126 - DNA, 2373 bp, Kordia algicida OT-1
gtgataaaaattgacagatataaaattcaaaaacccaaattttttcattccaaagaatatgaacgcttgcaacaagaaatacgtgatttttacggattgcatagaaattctcgttcgcaacgttcttatgctgttcaatatatgcctgaggaagtcatcagcgaattgatggaattgtttgattataaatgtgcctattgcgaatcgcacttattaggtttaaaatctggatatgaatcgtatttagaacgctttagacctagcaacaacgcacaaggttttgatagcaaagaaattgacgccgatcattattggtggcttacctatgactggcaaaatttgtatgcaagttgtcacagttgccaacgatttaaatcgaatgtattccctgttgaaggaaaaagagctgctctacaaacaaattatgacgaaattgccaaaaaagaagatgcttatttaattgatccatgtgtagattttcctgaagaattttttacgtttaacttaaaaacatatgaaattattccaaatgaaaaatcaagtccgttagcgttctcaaaaataaaatttacgcctgtggttggcgaagtcatcaagcaaaaagcagaagcgacgattcaagttttaggtttgaaccgaaaagacctaatttacgaacgccaaaacattgcagaagaaaccaaacgtgaagttgaaggcttacgaaaagggattaaaaactcacacgccattgccacagaatggaatgaaattttagatgggaagtctaaaaaaaatcatttggcatttcgaaaaacacttctcaattattatataacggaagacaaggaaatttatagtatcctatataatctgtccgatcaaatacaatcgtatttagatcagcaacaaaacatgcaacaggaaattcagaaactacaaataccaccgaattttcaggcacaggaacaaacaaaaggctttaatgaaagtcttcctgatgatcttctagaaaactttatgaatgttgatgatgaaaagccgcgatcatccaaacagaaagaaaaaaagaaaaaatatagtaagtattttgctgatattctcaaaaatgtatacctcgacaaaattgagttgaaaaactttaaatgcttttcacatcttgtgttagaattgccagggtatgccgaagatacaagtgccgaaccttggttggtatttttaggtgaaaacggtgttggaaaaagttctgttctcaaagccattgccattgcgcttatgggaaaagaatatttagatgtgcttaaaattaaagttgacgacatcctaaaatacgggaaacaaagcggttatataaaagtgtatggtaaaggaaatgacgaagtttttgaagtcacttttaacagaaaaactcaggaaattaccgcaagtgttgaaacgcctccagcatttatcattggatacggttctacacgtttgttgcctaacggaagaaatttagaacccgaaacggatcacccaagttatttaaaagtaaagaatttatttgacgcttctgtttcactgtcaaatgcaaaagattggtttttaaatagtgaccgaaaaacgttcgatcaagtgtctaaaaccctgaaaaatttgttattgttagacgatttagattctatcggaagaagtaaaaaaaataatcaaatatttatcaaatatcatcactctggcgacaatattaatattgaccatttaagtgatggttacaaatctatttttgctgttgcgattgacatgatttatacactgtcgcagaaaaacgttgtgtacgaattggcagaaggaattgtgctgattgatgaaattggcacacatttacatccacgatggaaaatggaaattgtagaacgtttacgtaacacatttccaaaaattcaatttctcatcacaacgcatgaacctttgtgtttacgaggtttaaaagaaaatgaagttgtggttttaaagcgtgattcagaaaatgcaattattgttttgagcgaattaccagacccaagtagcttacgcatcgatcaattattaacttcagaatattttggattgaatagtacgatggatgtcaaaaccgagttgctctttaaagaatattatgagctgttggctattgatgaatctgaacgaaatgacgaacagaaagtaaggcttgaacaactccaaaaagaagtaaaagaattgaaatacatgcgttttggaaacgacaagcgcgaagaaattatttatcaagttgtagacgaattgttagctaaaaacatgcgtaacaaagacttgaaaattgatgtgaaagatattaaacaagaagcaattgacagagtacgtaatctttggaaaaaattagatcaaaaaaagtag

SEQ ID NO: 86127 - DNA, 921 bp, Kordia algicida OT-1
ttggaaaaaattagatcaaaaaaagtagttatgattgcaattgaccgaaattccgttgaaattccagacattctcaaagatggaagcgaaaagttgaaaaaagaacttgaagaagcgattgcgtactattcagatcctgcaaatacaaaagcattcaagtttaaagtatacagcaatccaacagtgaaagaagcacttataaaaatgagcattggaaaatgcgcgtattgtgaaagtgatattttggtaacgtatgttggtgatattgagcattttcgtccaaaaggtgaaattgaagaactaaaagccacaggaaactccaaaccaggttactattggcttgctgccaattgggacaatttattattatcgtgtcgaaattgcaatcagaagtccaaacaacgaacggcaagtgatgatcgattgaacagtcttggaaaaatgaatcaatttcctttatttgatgaaacaaaaagagcacggtctccagaagataattttcaagaagaagaaaaagtgcgtttactgttaaatccgtgtattgaagatccagaagaatattttaaatacaatatcaattctggtgtgattcaaccaaaaaaacaagaagaatttccaaaacaacgtgcgttagcctctgtaaaagtatttggtttgcaacgtgttcctttggtacatgcgcgtgcaaaaaaagcagttcaaattttaaaacaaatgacacgagtagaaagacgttacaaagatttactacgtgctattgatgatgaagcggatgacattcctgatcgtcaagaagaattggattgggaaattgaagaactacacagttttttaaatcctacagaagaatatttaggcatggcgcgacaaatgattggcgaatttatgcaaaagaattttcaattagatatttctgcttga

SEQ ID NO: 86128 - DNA, 1272 bp, Streptomyces pristinaespiralis ATCC 25486
gtgatggccgggcggaacggctcgggcaagaccacactgctgcgcatgatcgcgctcacgctgaccggtgagcgccgggcacaccagctggaaccggagctcgaggggtacctgacacacggtgccacccgcggttccgccgtggccaaggtcctcgcgaaccggtccgccgacactatggctcaggacgggaacgagctagtggaggcacggctcgactggcggcccgagcaggacggcagcctcttcgacgaactcgtcgaggactatgagccacccaccgaggtggtcttctcggccccccggcccctcgcctccgcactgtggtcctcggccccgccgcccggctggttctgcgccgcgtatggccccttccgacgcctcaccggcaccggcctctacgagcgcactccgcagcagcttgaccgggccgccgcgctccgcaccctcttcgaggagcagtcggccctaactgaagccttcgattggctgctctccctccacctgcgcaccttggaggagcgccccggaatcggtcagctgaaagcctgggtgcttcggctactcaatgacgggctgctgccggatcgctaccacatcgaggatgtggactcggaggggatgtggcttcggcggcagggtgacagcggcccggagggcgcccggaccgagctgcggcggatgagcgatggtcagcggaccgttatcgccctagtcctggacatcgtcaggcagatgcacgcagcgtatggggacctcgggttcgaggaacacgtcggcggcaggatcgtactgccgcacccgggcgtggtgctcatcgatgagatcgacgcgcacttgcacatgacctggcaaaagaacatcggccagtggctcacgacgcacttcccagcgatccagttcatcgtcaccacccacagcccgtacatctgccaggcagcagacccgggcgggctgatccggctgccgggctcgggggagcaaaaaccgccacaggtggtagacggagagctgtacgggcggatcgtgtttgggacaggggacgacgcagcactctcggacttgttcggcctggactcgccgtattccgacgaggcacgtgaactgcgaagcaaattggccgagttggagtacgacgtcctgcttgggcgggccgacgccgtaaagaccgaggaatacctgcgcttgcgcgatcgcctgtccagttcacccgtggcccgtgtcgatgaagtgatggaacgataccggctgtcccgggagcgcgacgcgtga

SEQ ID NO: 86129 - DNA, 795 bp, Streptomyces pristinaespiralis ATCC 25486
gtgatcccaatccaacgactatcgctgccccaggccgtgacggcacgcatggcggtactcacggaacggatcgggctaagggacacagcaagtggcctgcgcaagaaatacgcggataacctgtggaacgaagaggccgacgtcaagagggggctgcgcgaagtactcctcaaaatggctccgggagtcctcggctgctgcatgtactgcggtggttttaccgcgaccgatatcgaacacttcgaaccacgggagcacgacgcgctcaagactttcttctggcccaaccaccttttggcgtgtggcccgtgtaacagcacgtacaagaggcactggtgggagtgtgacgaggagaccggcgagcccctactgatcgacccgacccgggacgacccgttcgaccacttgctgctgaacctcagggaaggcaagtaccgcggtgagacggacagggggcggacgactatcaacgtgctcgccctcaacctccctgagcgacgcttggtggctggccggaagattgcccgactgaacattaggtctgtagtgagggactggggccgggcctggcaacagggagacgcggaggcccagcgcgatgccctggacgtactaaaggggcagcccttcgccgatgtgtggcaggcgatgttgcgccaagccgtgctcccgggagcagccttggtcatgagcgatgagccacccgagattctctccctcttgcggaatgaggaactgcgtgcggcgacgctgatccagttccctctgcagccaacgaccgcagaggcgacctaa

SEQ ID NO: 86130 - DNA, 1254 bp, Clostridiales bacterium 1_7_47FAA
gtgaatcaactatttatttcagctttgacaatagagaaggtccggcatttggaggatatctgcattccattgtctaaagacagaatgaagcatctgatatttaccggaaggaatgggagcggtaaaaccagtgttttggatgccatggcaggatttttgaatgcggtatctacaaccaatgaccctatggaagcgcaagagtatttaaataaagatatagatactctggaattatggattaaaaatggaaaatccggtaatgaaatttcagatataaggaaactcatagagcattataagctaaggatagaacaggcaaagcaaggaatcaatatgcaattgaattatccattgaatgagatacgcagtatgtatgaagccggtggatatatcacggcctattataaagccgaccgtatattccacactgagattccaagacatgtagaaaaggtggaattgaaggaatactattcaatttcagatacgccacgccaggattttgttaaatatctgctggatttaaagatgacccaggctctggcggcaacgggaggtaagacggaaaaggccgatgtaatcaagacctggtttaataaatttgaggatttattaggcaggatttttgaagatggctccttaaagctgaactttgatgaagatacctttcaatttacgatttgtgaaacaggcaaggaaccctttgattttaacagcctttccagtggatatgcagcggttttggatatcattgttgatattatcatccgtatggaaaagcggaccggcagaagctttaaattcgaaatgccgggaattgtcctcattgatgaaattgagacccatcttcatctggaattgcagaagaggattctggatttattgacaaccatatttcccaatatacagtttattgtttcgacccattctccatttattttaaacagtctggagaatgtggtgatttatgatttggaaaaccatctgctggtggaagatggcttaacagatgtgccctatgatggaattgttgagggatattttaatgtggataagatgtccgctatgttaagggaaaagtatgaaagatataaaatgctggtgagaaagaaaaatctttccgatgaagatattgctgagattgctaaattggaaatatttttagatgaaataccggattatctggccttaaatatatcaacagagtataaaggtttaaaattagacttcgaaagccgggaggatttattgtaa

SEQ ID NO: 86131 - DNA, 291 bp, Clostridiales bacterium 1_7_47FAA
atggtaaagatagaacgcagttatcccgcaccggaatcattgttaaaggaggctgcgaagattaatggaagttatgccaaacccgatgtggtagaaaggctgaaacgtgattttcataataaatgctatatttgtgaaatgaaggagttacaggacccgcagatagagcatctgcttccccataaggatggcagatataaggaaagaaaatttgattgggaaaatctcttctgggcatgtggacattgtaatggtgtaaaaaccaaagtaagtatgatgacggtatattag

SEQ ID NO: 86132 - DNA, 1233 bp, Coleofasciculus chthonoplastes PCC 7420
ttggattgcatcgctgctcttttgattcaactagaaatacgaatacttaaaattgaactcactgatctttttgaatctgatactgtttccaaaaaaatcaatgaaactttcaaaatagatgatattaagctggaagccaaagaatcttatgcatccgttacaatctcattagagtctagcaataaaatatgttggaaaatccaaaaaaatatcaataaacaagaagtttcaggcaactatgatcaagtcaatcattatattgaatatttgcgccaacaattacaacaagaaaatcaatctataaatttacctttactaatatattacagaactcgtcgaatggttttaggcactcaaaccattgacttagatgatttagatatcacaatcattcaatgcagaattaatcaattgaatgcttacaggggagcatttaatcccgaaataaataactttcaagattttttaatatggtttagacaagaagaggattacgagaatgaaattcgcttgcgccaagataatgcatatagaaatcccaacttagaggtcatcagaaaggcaatagaagtatttttagcagagtttcccgatagcgattttcataacctgcgggtagttagatcaaaatcccaaagaaatcttgattttactcgcaaccctgcccccccttccttaacaatcaccaaaaataatcaagacttcaagttagagcaactctcagatggacaaaagatgctgttaatgttggtgactgacttggcgaggcgattggcaattgctaatcctggtttgggagttaatgcgttagaaggcgaaggtattgttttaattgacgaaattgatttacatttgcatcctcaatggcaaagaatagtgattcccagcctgacccgtacttttccgaattgtcagtttattgtgacaactcattcgcctcaagttctgagtaacgtcaaacgagaaaatgtatttattttagaagactttcaacttgttgaagtaacgcctcatacctatggtagagatagcaattcaattttatatgaattgatgggggtgaaagaacgccccaatcaagtgcaggaaaaaatcaatgcttgttttgctttgatcgatgaagagaaaatagaggatgctaaaataaaactgcaagaactcgctgagttactgggtgaaaatgacccggaagttattcggggtcaaacgctgattagttttttaaccgaataa

SEQ ID NO: 86133 - DNA, 663 bp, Coleofasciculus chthonoplastes PCC 7420
gtgaagcatattgtcaaaggcaacgaaccccgctccttattggaacaccgttcacagccttatgctgattatgataactatccgcaaaaagatgatttacgccaattattattgactgagcaaggatatatttgttgttactgtatgcaacgcatagcccgcgatactatgaagattgagcattggcaacccaagagtatttatcccaatttacaattagattacagaaatttacttggtgcttgtcacggtaatcaaggtcaacctcaacgtttacaacattgtgatacgagaaagggtgaaatagaaattacgattaatccggctgacgcgagtaaaaactgtgagaacttcatcaaatacagcagtagtggtcaaatctactctgatgatgaaacgattaataacgaattaaacgaggttttgaatctcaatttagaaaccttgactagaaatcgcaaagcggctatggatgctgtgattgagggcttgcgtaaaaaatatccatctaagtcttggacggttggtattttaagtaaggaaattgctaaatttgacaatgtgactcaaacagctaaatatcgaccttattgtaaatttgttgtttgtctcttaaataaaaaattatccgtggcgaagaatcaagccaaaagccaagggtaa

SEQ ID NO: 86134 - DNA, 1371 bp, Coleofasciculus chthonoplastes PCC 7420
atggaaatccaacgggttatcttaaataacattgggctatttgaaaacctggaaattcctttagcacccaccgagcaaaatcccagcaatatcaccgtctttgttggtaataacggcgcgggtaaaacctctgtgctgaaagccttagcaacctccctgagttggtttacggctcgtttacgcacagaaaaaggtagtggtaaccctatccccgaagatgccatacttaacaccgccaacgccgccagtattgaaatagaaatttgtgatgcttctggaacatcagacaatccgaatcaaaacgagatccagcatcacttcaagtggactttagccaaaaatagaacaggacgtaaatcccggtacactagccatctcaacgactgcactcgcttagccaatcgttatcgtgatgcccttacccgtgatcacaaaactcgcctacccatcattgggttttatcctgtcgagcgcgtcgtacttgatattcccctaaaaattaggacaaagcataccttcttgcaactcgatggttacgataattctttaagtcagggggttgactttcgccgcttttttgagtggtttcgggaacgggaagataccgaaaatgaatcagcaatgcctgaagatgttctcaaccaactgaaaccattattggaaaccaatccagacgcatggcaacggttaaacgaactcaatgcctcagccaaagatcggcaattaaccgcagttcgcaccgccattcgccaatttatgccccagatggataatcttagagtccgtcgtaaaccccgtctccacatggcgattgataaaaacggtgaaacgcttaatgtcgcccaactttcacaaggcgaaaaatctctcatggctctggttggtgatattgctcgccgtctagccatgctgaaccctgctctggagaatcctttagcaggagatggtatcgtcttgattgatgaagtcgatttgcatctgcatccctcttggcaacgcagcctgtgcgatcgcctaatcgcaacgtttcccaattgtcagtttgtgctgactacccattcacctctggtgatcagcgactgtaaaaatgttttagtttacaccttaaccaatggtgaattgcaacaattgccctctcagtatgggcaagatgctaatactgtcttattagatgtcatggacaccagcatccgtaatcagaaaattgatgctgaactgaacgatctgctggatgccatacaagatttaaagctaactgaggctcaacaactactcgccaaattaactgaggaactacccgccaatcatctggaattagtcaaagccaaattactgatccgtaaacaagaattgcgtcatgcgaaccattag

SEQ ID NO: 86135 - DNA, 324 bp, Coleofasciculus chthonoplastes PCC 7420
atgcgaaccattagtaaagggactgaaccgtccagcttaacagcctggaaacgagcaaaccctcacggacgctacaaccagttaactgaagagattcgccgaactattcggcaatatgctctagcagaacaattctacctttgtgcctattgctgtcagcgcatccaaaacattgatgcttgccacaatgagcatatagaagctcaaaaattgaatcctagacgcacagttgacttttcaaatattgtcgccagttgtaatacctctaatcaatgtggtgatgctcataaatcccaacccctacccctaacctcacaagggtag

SEQ ID NO: 86136 - DNA, 1269 bp, Mitsuokella multacida DSM 20544
atgcacgtcaagaccatcgccattcacgacttcaagggaattgaacactgccagctcacattcaagccgggcttcaacctgatcatcggtgaaaatggcaagggaaagacctccctgctagaggccctggccatcggcatcagcggtttcctctcaggcgtccatgggggaggcatccacccgcgcaacattcagtcggaagaagctcggaccagctatgtcctgcagggagatggcgcatatgagccacagtattcctggccccacatcgatatgaatgcagaggtggcggggagcccgtacgagtgggagcgggcgaaagacagctacggcgcgcagaccaagacgatgccgcgcgatatctgccatctggccgaacagatggtggccgacacgagtgctgtcctgcccgtcatctgctatcagagcgcaggccgcgtctggtcgcagaagcgcaagaaacagacgagtaccttcgcacgtaagaagagcagccgcatcgcgggttacatcgactgcgtgaccgatgaatccagcatgaagctgatgctcgagtggtgctcgcgcatggagcagatcgcctggcagaccgacaagcctgttcgcgagtatgaagccgtcaagcaggccgtcgccacagcgatgaccaagcttgaaggcgcatctgtcgctatcttctacgacaagcgctccgaagagctgctttaccagaaaggcagtgccgtcatgcccatctcagcactgagtgcaggctaccagtccctcatctggatggtcttcgacatcgcctaccgcatggccgtcctcaatccgttcctgaccgagcgcatcaccgagacacccggcctcatcctgatcgacgagctggacgttcacctgcatccgcgctggcaatggcacgtcatcgacgtcctgcgccacgtcttcccaaacgtccagttcatcgccaccacccattcacccatcatcatcgcctccgccaaagacgtctggtgcatcgatatcgaaaacctcgcctcgcccaaagccgccatgagcggctacggcctcgaggttgactacatcctgcggcgtatccagaattctgccgacctgccagcatctgtggcagcgcagttggaggcgttctacggtgctatcgaccgtgaagattttaccacggcgaaagaagccttgacgaagctcgagcacgatatcgggcctgacagcccgctggccgtcaaagccagagagcggctggagctagagctggcactgtcggagggatga

SEQ ID NO: 86137 - DNA, 705 bp, Mitsuokella multacida DSM 20544
atgcgttacattgaaaaacatgcagagccaagatccctgactgcctacaagcagcagccccatgcctattacgatggctgcaacaaggaagatatccgcaagcgtctgttagaagaccaagggtatctctgtgcctattgcatgcggcgcattcccgaggaaatcactgttgaagacgacatgaaagccgaagatggtatcgtcaagaaggcccagaaaatgaagatagagcattggctccccgagagtcagtgtaccgaacagcagaagctggacttccacaacatgctcggcgtctgcatgggcaatgccggccatccctatagagagacgacctgcgacgcgcatcgcaaggataagatcctgactatcaatcccttggatagagacatggtcaagaaaatccggtataatacacatacaggcgaaatcctctcagacgatactcagatcaacgatgacctcaacaacaccttgaacctcaactacgaaggcagcgacttcagcctcccgctgaaccgccgcaatgcgttggctgtctgcctgaccaaaatacaggtccagtcgcggaataagccaggcaactggcgcaggtctttattgcagaagatgctcaaagcctatgagaataaagatacaaacgggaagtacatagagtactcaggcatcgtgatctggtacttgagaaagaaacttggatcttga

SEQ ID NO: 86138 - DNA, 1317 bp, Butyrivibrio crossotus DSM 2876
atgaagttaaaaaatattaaaatagaaaactacagatgttttaaaagagcagacattgactttgacgaaaatataacattgattgtcggaaagaatggagccggaaagacggcaatacttgatgccgttgctgtagcagtcagtacatttttattggggattgacggtggagtaagcaggggaattctaaaagatgatgcaagatatgagttttatgattttgatgggacaattgactcacaacaccagtttccggtgagtattgaaagtacaggtgattgcttagataagcgtaatattaaatggatacgttctttaaattcagaaaatagtaatacaacaataaaggatgcaagagaattaacaaatatctcgaaagatgtacagagtaggattatggcaggagataggacattagttctccctctggtatcttattatggaacaggacgattatatgcacagaaaaaggaaaagaagaataaaaaatcattgactgaatttaaacgtcaggttggttatgtagattgtatggcggctgagtcaaacgagaaattgatgcttaattggtttcagattcagacattaaaaaaccttcaggaacagcagaagacaggtgtggtagagaaaccattattgttaaagactgtagagaaagctatttgcaaatgctttgaaagaattagtggttcaaaaaatgcaggaatgatatttgaccttgatactcatagattagtattggagtatgaaacagcagatggaagtttgcgaaaatttgcaatggatgaaatgagcgatggttataaaaatacacttagtatgattggggacattgcatatcgcatggcggttttaaatcctatgcttggagataaggtattagaacaaacacccggtgtgattctgatagatgaaattgatttacatttgcatccacaatggcagcagacgattataagtgatttaaacaccgtttttccaaatgtgcaatttattgtcagttcccatgctccggcagtaattaattctgttgcaaaagaaaatatcagaatccttgataatggagaagtctatatgccggtggcacagacatatggaagagatgctaattctatactaagagaggttatgaaggtatcagaacgtccgattgatataacaaaacgtttagatatgttctatgcatggatggatgataagaaatatgatgaagcagataaagttttatcagaaattgaagatatagtaggaacaagtgatccggatattgcagcagcaagaacatcattggatttagaaaagatgctgggagaatag

SEQ ID NO: 86139 - DNA, 678 bp, Butyrivibrio crossotus DSM 2876
atgattgttataaaaagaggtaaagaaccgaacagtcttttacaattccgcaaacaaaatcctaatgcggattatgaatcagatacaccttcagatgttcttaaggatgtcagagaacagatgtggagggaacaaaagcatttatgtgcatattgtatgaaaaaaattgacagccctgatcttgtaagaattgaacattgcagaccaagacatccacataatgaagtagaacatgataaaaaggcaacattagattttaaatggatgttaggtgtatgctatggaaacagtctggtaaaaggtgtgaaaatggaagatgagacctgtgacgcacatagaggaaacacagaacttacaatcaatccatttgatgaaaaatctgtaagaaagattaaatataaagagaatggatacatatattcagacgatgaaaaaattaacaaggatgttacagaaacactaaatctgaactgtcaggcaatgtctttaccgcagacccgaaggagggttctgctggcagaaaagaacagaattatgaaaaagtgtaatggaaaatcacatgatgcatttatacgggaattagaacgtacatatcaaagtctggtgcaggaccaaaatcttacaccatattgtggaattattatttcatggcttgaaagcaaattgaagatatcgtaa

SEQ ID NO: 86140 - DNA, 1236 bp, Desulfovibrio piger ATCC 29098
atgtcgctggactttggcccacgcctgaatctctttaccggtgataacgggctcgggaaaagtttcctgctggacatcgtttggtgggccatgacacgacactggccggccgaactcaatccaaagcttacggcaggaaaaatggctctgccaacggacaagacacgaaaggccgaaatagacttttcgttctctgcagcatcaaaaccgatgcagaccaaaagccggttcatgccgcgtctgcagggctggacggcaaaacagggacgccccgccaatcctggactagtcttctacgcgatggcggatggcagctttgccgtatgggatccggcacgtaattactggaagtcaaaaggtgaagatgggaatgcccgcccagctgcctacgtgtttagcccaacagaagtttgggatggtctccagagggaagacgggacttggctctgcaatggattgatcagggattgggcaggatggcagaaggagaaaggcacggctttctcctacttggagtccgtgcttgaagctctttcgtctccggatgaagaaaagctcgttcccggtgaactcacacggatcagccttgatgatgtgagagacatgccgacactgaagatgccttatggtcaagaagtggccgtagtacacgcgtcttctggcatgcggcggatagtttccctggcgtattttctggtttggtgctgggaagagcatttgagagcaaaaaaactgcttggcgaacgcccatccaataagacgactttccttatagatgaggttgaggcacacttgcatcctaagtggcagcgatcgatcattcccgccctgatgaacatcatggacagactgatgccgcatgcggaagtccagcttatactggctactcactcgccgcttgtcatgtcatccgtcgagtccgtttttgacgccaaacaggatgtctggtttgacattgatcttgttggtgacaaagtctgtcttactgaaagaactttttttcgacaaggaaatgtatgcaactggctgaccagtgatgcttttgacatgaagtccggttactcacgggaggctgaggccgccatagaaaaagcaaaagcgttgttatcctgcgataatactggtatgtctgaagccagacaggtagatgtccttctgcgcaacgcattatcagaaatcgatccgttctggattcgttggcgatatgtcgcagagaaaaaaggatggctgcgatga

SEQ ID NO: 86141 - DNA, 600 bp, Desulfovibrio piger ATCC 29098
atgatacatgtcgatcaacagcctgagcctcatgattttgatgaaaaggtaaggcggaaaggtcttgattggttgaggaaccagaacttcgatatccacggaccagtaccgaaaggagtcgatattccacggtactggttagtatgcctaaaagatctgtacgacagctacggtggttactgtgcttacctcgctgtattctttgagtttgccgttggcggagcaactgttgaccactttgtcgcaaaatcaaaaagcagcgctcttgcctatgagtgggcgaattaccggctaagctgctcacgaatgaatagccgaaaacgcgattacgacgatgtccttgatcctttctctgtagaaaacagctggttccatctcgagctcgtaacaggacacatttttcctgatcctgaactgccaggtgagcaaaaagtccgtatccagaaaacaattgaccgactcaagcttgatgacggggcgagcaaggaaatgcgcgccagacattttcaatactactgcgaaggtcaactcacgtctgaataccttaaaaaatattctccttttgtctggatggaggcaactagacaaaatcttttgtaa

SEQ ID NO: 86142 - DNA, 1158 bp, Streptomyces roseosporus NRRL 15998
atgtacgtctcccgcgtgtacgtcgagaacatcaaatcgttccacggcccacgtgtcgtcgatctgactctgacccgcccggacggaacgcacgcaggctggacggtcctcgcgggacggaacggctcgggaaagaccacactgctccgggcgctggcactggccctcagcggacgccacacctgctcaacgcggcccctgggcggacaatccggtgggctggttctgcgccgcctacggacctttccggcgcatggccggggatcgggcgaggtccaacggctgatgctggcctccggtccggtggcccggcaggcgagcctgttccatgaggacgcctctctcgccgaaggcgtcgcctggctgatcgagcagcacctacgggcactcgaaggccgggagggggccgcagaactcaaacgggcggcactctcggtgctgggccacggactgctcccggacggctaccgggtggaggacgtcgactccgaaggtctgtgggtgacccgcgacggccaccgctacccgctacgggagatgagcgacggattccgcacggtggccgcactcgtcgtggacctgctcaagcagattcacgacgcgttcggcgacgacgcgttcagcggggacgacggcgaggccggtcgcagcatcctctcggtccccggtgtcgtgatcatcgacgagatcgacgcacacctccacgtctcctggcagcgccgcatcggcccctggctgaccgaacacttccccaacatccagttcatcgtgacgacccacagcccctatatctgccaggcggccgaccccggcggcctgatccgcctgcccggcgtggaggaggacgcggcacccgaggtggtgtccgaggacctgtacgagcgcgtggtctacgggagcggggacgacgcggtcctctccgagctcttcgggctcgatacgccgtactccgaacaggccgagcgccgtcgcgccgagttcgtggcgctggagtcccgggtgtacgagggcgacacctcaccggagacggtcgagcgctacaagcagctgaaagaactgctcaccagttcaccggccgcgcgggtccacgagatgtccgcccgcctccaccgcctctcggagggaatcggggacggagagggcggcgaggcggagtga

SEQ ID NO: 86143 - DNA, 648 bp, Streptomyces roseosporus NRRL 15998
atggcgcccgggcatcagcgctgcatgtactgcggtgacagccagggtacggacatcgaccatttcgagccgaagagccgtgccccgctgcgtactttcgagtggctcaaccacctactggcctgcgcgtactgcaacagcaaccagaagcggaacagattcccgcgctcggagacggacggaagccccctccttctcgaccccacgctccaggaaccgctggagcacctgcgactggtcctgccggtgggcacgtacaaaggactgacgccccagggcgacgcctgcatagccgtgttcgggctcaacaaccgtggcgctctcgtcgacggacgcagaaccgcatacgtcaccgccaagcactcggtcgagctgtggcgcatcgccaccgaccggggccggcacgataagggagcggagatcgtccgggcagcctggaaccggccgagcggtgccgacggggcctcaccgggcgtggggtgcgatcaggcggagaggcgtccgcccttgagcgcggtgacgaacgaggaccagccgtcggcggagaagacgacggccgggccgtcggcggccttgctgtcgcggacggggacggcggcgtggccacgggcgacctcaaggcactcgccctggttcccgccgctgtag

SEQ ID NO: 86144 - DNA, 1248 bp, Blautia hansenii DSM 20583
atggaacaaacttttttgacggatatagaaataaaaaaagttcgtcatttagagaatatttcaattcctttagataaaaataaaagaaaacatttgattttaacggggaaaaatgggagtggaaaaacaagtgtgttggaagagatagtacagcattttaattatattctttcagatcaatttgatagttatgatgaactgacggaaaaacagagattctacatagataggattgaagaggcagagaaaatatctgatttggaaaaaagaacaaaatccatacaagaagaaaaaagaatgctagagtggatagaagataaaatgaaaaattggttggaaggagttgtttcaaactttacttcctatatggtattgcgtgaaaaatatcaaaggggggattttatttttgcatattataaagctgaaagagaatttcaagtggaagaatacaaaaatattgaaaaaatagaatttcaggacaaatatagtatttccgaaaatccaggtataaaattcacaaaatatcttgtagatttgaaagctacccaagcttttacaaaagataaggaaaaatacgaaaagataaataaatggtttcatgcattcgaggatattttaaagaaaatttttgaagataaaaatctccagttgaatttcaatgatgaaacgtttcagttttctatttgtgagacagatagagaaccctttgattttaatacaatgtccagtggttatgcagcaatatttgagattattaacgatctgattataagaatggaggcaaagtcaggactgcgaacagaatttaatatggaaggtgtcgttttagtagatgaaattgaaacccatttgcatttagaattacagaaaatgatacttcctattctaacaactctttttcctaatattcaatttattattacaacacactctccatttattttaagttccttagataatgcggttatttatgatttacagaacagaactcttgtagaaaatggtttggaaaaattaccctatgagggaattgtagaaggatattttaaggctgatacattatcagcagagttaagaggaaaatttgaaagatataaagatttagtttctaaggaaaagttatcagatgaagaatatgaagaaatagataaactggaattttatttagatgaaattccagattatcttgcaaaagaattgacatcagaatatagccgattgaaattagaattttcaaatagggggtaa

SEQ ID NO: 86145 - DNA, 657 bp, Blautia hansenii DSM 20583
gtgattaagatagacagaaatcctgttccgcctctatcactggctgttgaagaacaaaaggcgaaaggggtttataataagccagatgtcatacagaggttaaaggaagattcacatgataagtgctatatttgtgaattgggaggattatctgatccggaagtagaacatttaaagcctcatcatggacggacgataccagagagaatttttgattggaataatttattttatgtgtgtcctcattgtaacaatattaaaaaagaatcaaaatatgacgataaaatcatagattgttgtaaagaagatccagaaaagatgttagaacagttctatgaagagggacatgtaaatgtacataatattgtggatgaagagcgtgcatttatgactgcagaccttatacaggaatgttttgaaaaacgcaatacagggattcgggaagcagcttgtcaacacaggatcgatcgcttggcagatgagatgaatattttatataaaacattggaaaaatataagaaaaatccagaattattgcgttataaaagaagtttaagatctacattgagtagaaatagtatatttgcggcatttaaaagaaattatgtgagaaagcatattttagattatccggatttagaggaattcttaatgtaa

SEQ ID NO: 86146 - DNA, 1158 bp, Streptomyces roseosporus NRRL 11379; identical to SEQ ID NO: 86142

SEQ ID NO: 86147 - DNA, 648 bp, Streptomyces roseosporus NRRL 11379; identical to SEQ ID NO: 86143

SEQ ID NO: 86148 - DNA, 1350 bp, Bacteroides sp. D1
atgagaattaatactattaaaataaagaatttcagaggatttgaagataaatcttttgaatttgacagtagaatgaatgttgtattaggtaataatacaaccggtaaaacaactttgcttcatgctgtccagattgccttaggggcatatttacaagctctaactttgattcctggaggtaaatatttcagcagaaattttctcaaaggagatcaagttcgcaaatatagtgaatcaacgaaaagttttttgcttgatgaacagaaaccgagcattgaggttaatgcagactattatgtaggaagaattgctttgggaacaaaagattattcagagcaaataaaaaatataacttggcttagagaaggttctaaaaactcaagaaagaataatggagaactgatggatgaagtttactacatggaacagcaaagacgcaatgctgatgctacaaaagtgaactccatatttcctttgatgttgtcatttggtgcaacacgtcttcagaacaattataacggtgccgagaagaccaaggccagagcatcacgcgaagaaaaagcatataaatgtgctcttgatgaacaggttgatttcaaatctgcctttgattggatatattcttatgaaaagaatattttgaaagaattggaatttgaaggcactgatgaagcctttattcaagctataaaagaggcaatacctgccatcaagcagattttcattgataaaaagaatgatgagttcaccgcccagatccaaatgacaggagatttaacacctagatggcttacatacgatatgatgagtgacggtttcaagtcaatgataaatattgttgctgaaattgcttatcgttgtattgaattaaacggttttttggggaaagatgctgtaaaaaagactccaggcattgttatgatagatgaagtagacctatatctacatcctcattggcaacaacacattcttgaagacttacagaaagcattccctatgtttcaatttattgtcaccactcactctccatttattgtacagagtgttgacactaataatattattactcttgatgctaaagtatcacctatttctccaagcaatagagggattgaagaaatcatggttgcagaaatgggacttgatattgatataagtaaccgcagtgaaaaatatcgcaaaaaatatgatttagcacataggtattatcaattggtgaaaaatggacgagaaggaaccgaagaggccaactatgtaaaaagtgaattaaataaacttgaagcggagtcaaaaatgttccatgatcctgcttttgaagctgcattaagacttaaaagaggagatttatga

SEQ ID NO: 86149 - DNA, 750 bp, Bacteroides sp. D1
atgagaccggtaacgaaaaaaactattggggaaagtattatgctgggaaatggaaccacgcatgtaatacaagaagaatataagccttatggtaatgctagacctattctcctgaccaatcttggtcgttactgctcatattgtgagcaggcgtttctgtgtggttcaaatctacaaactgaacacattcaaccaaaaggtttagatgttaatggtataaaaccatatgcagaattatcaaccaaatgggagaattttttattaggatgcgcaacttgcaatggtaaaggtaataaaggtgataaaaatgtggtatttgaagatattcatcttccacatagaaataatacatatttaagtctcgtatacaaggaggcaggtgtagttattcctaatccgaaattagaaggaaaatctttggcaaatgctgaagcattaattagtctcgtaggattggataaagaagatttagatacagatgggcgatgtggaatgagacgtgaggtttgggagaaagcaatcatgtatctaaatgattatgaaaacggagaaataaaactccggcatttaatagattacataaaggtgtcaggttgctggtctatatggtttactgttttcagtggtcatgatgaagttagaaaagcactcatagaggaatttccaggaacagctaaagaatgttttgatgcaaacaatcattatgaaccagtaaatcgtaatcccaaaaatgcaatagatcctgtttaa

SEQ ID NO: 86150 - DNA, 1335 bp, Bacteroides coprophilus DSM 18228 = JCM 13818
atgcacgatattacaataaaaaatttccgatgctacgaagaaaaaagtatggaatttcgtagaggagtaaatttgttgataggagacaactctgtcggtaaaacttcgttattacatgcctgcaatttggtaatgagtgctttcttttccggctatagcgatgaaaatacggtatggattagtgcagatgaaaatgattttagaaataccggtattaccgagcagcctgttgaaattctatttcatccgggagaatgggattttaatacaatttcgacacctataggcgaatcatattctctggttagagatgtggatttaaagattgaaaagaagtcgaagaagaactcacggaaccttctttctggcttgatacctttaaggaactacgcaagtaatctgaaactttggtcgcatattgtattgaaagataaaggaatcaaacagattaatcctttaccagtttatgcctgttttaccacagaagatattcattcaactgtcaagttggaaaaaaacaagtttaagacatatgtacaaaaaccttctttcggatattacggatgtagtgattgtagaggtttgcttgaatgctggataaaacgcctgcttgtattgaaagaagctcaaagaggtgaggaggaaattaattccgtaagaaatgccattatcgatgcattaggcactgatgggtgtaatatcatcaatgatatggatatacgtcataatgaaggcaaggtatatttcaagtttgttgacggacgcgaatcagaatccgctttgttgtccgacggttaccgtcgtttggtgaatattgtgatggatattgctttccgttgtgctttgctcaacaaatctatgtttggcgatcagtgttacaaacatacgcatggcactgtcattattgatgagatagatgaacatctgcatccggctttgcaagttcgtgtactaaaagcattgcaagatacatttccaaagattcagtttatagtaagtacacatgctccgctggtgatgtcatcggttgaaccgagaaaagatgaaaacggaaatgatatcaatgttgtgtataaactggaatatattgatggggaatacatgcataaggaattgaatatctacggaatggatgcttcaacaattattgaaacatacatggggcagccttcgcgagacttgaaagtaaataatgatattaaatctatactggaattaatagataaaggtgatattcaaacagcgaggaaattgttggaagagttagagaagaatattgctaatggtgatccggaattgacaagaatggaagcattaatctcatttatggaataa

SEQ ID NO: 86151 - DNA, 690 bp, Bacteroides coprophilus DSM 18228 = JCM 13818
atgattctgattacaaaaaataaagagccgaaagagtggactgagtatagaaacactccaggagtagattatcaggctattccagagttagtccaatcgcttttgaaggaacagggatatatatgcgcctattgtatgcgaaggataccaacgaaagacaaaatatataaaaaagatggagtaaactttgtctataccaatgaggaccatcgcgttgagcacatcaaaagcagagaacaacatgacgacttaaaattggattacacgaatatggtggtttgttgtcccggtcatattggaatgcaagatcactgtgatagattaaaaggaccaaaggatatttcgtttagtccaattgataaacaatttattgagatgatcagatacagttccaatggagaaatatcttcaacaaatgatgtgtataataatgaaatgaaagatgttcttaatctgaatacagaactgctgcgtaggaataggtttttaatgctgacagaggttatcattcaaatcaattcaacttgtaaaaaagggaaaaactgggataagagaactttggagctgtttttaaagaaatacagtgaaaagcattcagaaaaagatgaagaaggaacaaaggaaaagtattatccatattgcggtattattatttggtatttacaaaagaaactacgaactttagattaa

SEQ ID NO: 86152 - DNA, 1305 bp, Clostridium asparagiforme DSM 15981
atgagaataaacgccttgtatttgaatgatttcagaggaattcatgaacttaagctgagtttagatggaaaaagcatgattttgtttggcatcaatggagtgggcaagtctacaattttgtccgctgttaatctgctgtatgcgaatattatcaatcggattgttaaattacgatttaagcagacggtgaatttggaactgtcagatataaaatatcgaaaagcatcggctaagattgcagctgatttcatttttgagcaggaaaaagaagtttatcattacggccgcgagatcacctatgataataaaaggtcacagaacacagcagaattggaccggctggttgaccactatgaaaaattatatgtcggagaagttaagatagatgaggagaacaatctaatcgaagaaaatgaacattttaatttgccgatcttcgttaactacggtgtgaaccgtctggttttaaaaacaccacttcgaatcagaagaggtgaatcttatggccagtactctgcctttgagcattcaatcgaaaatcaaatcgcattcagtaaattgtttgaatggtttttagagcaggagttatttgaaacacaaatgcaaaaacaggagccctcctatcgggatatcgccctgcaggccgtaaaaaaggcaatgttagcgatgcttgacggatattcggatatccacattgtagcgaagccatactccatgcgggtaacaaaaggaaaagaagtgctggatgttttacagctttccgatggtgaaaaatgcacgctggcgttatttggcgatattgccagacgattggccgttgcaaatccgtctctggaaaacccattgcttggaacaggtgtcgttttgatcgatgagcttgaactgcatatgcatacatcatggcagcgaaaagtgattcgtgttttgaaaaaaacatttccgaatttacaatttatcattacaacacattcgccacagattttaggggaggtcgatcaggcatttaacattatttccctatcccatgaagcggatacaataaaatgcacttcgatttcatcgctgtacggtttagactccaatacggttctggaggatgtattaaatacagattccctgaatcatgaggtcaaattgaaaattgataaaatgtatgggtgcatcgaggagaaaaaatttgatgaggcggaaatgctggcggactttatcgacgagattacgataaaacgaaacgccgatacggtgaaagcgcggctgttaattaaagtgggtagaaagcgatatgcacagaatcagaaaaaatag

SEQ ID NO: 86153 - DNA, 666 bp, Clostridium asparagiforme DSM 15981
atgccacgtcattttactgcgtggaaaaaagcgtttataagaagaaatggcagggagccgtcctacaatgatttatatggcacggaagaatattataaaatcaaacaagatctgctgcaggagcagggatgtgtttgctgctattgtgaaaaaagaatcaatctaaatgattgcaatattgaacactttatgccgagaaatccggatcggaacgttttgacagaggaagaatgcgatatttgccggaatgctcaactggactatgaaaacctgtttgcctcgtgcctgggcgagaaatccggtatttcagaccactgcaattcccataaaggaaactggtatgatttccggtattgcatctcacctctgtccgatcaaatcgaaggaatattcggttttcggttaaacggaaaaatttttgcagtggataataattcaagcgcagagcagatgaaaaatcatttgcatttggattcgtatgttttacgggaacagagaaaacagtcctactatacggttttagaactcgaatttgcggatgttgaattgctcgatcaagacgactatatagcggacacaatcggatactacagtgaaaaagatgagaatgggaagtatacaccattttgctcgatgattacatattgtctggagcattatttgtaa

SEQ ID NO: 86154 - DNA, 1752 bp, Vibrio sp. 16
ttgctctgcatattgagccaaccttcattgaaaggctcaaagttaaatacggcgaacgcgtactttataatatttctagaggcacaagtaatggaaattaagattgaccatagtaagagcattaggaagttagaatctaatgccaaaaaaggtaatttttattcagcttttcaactctacgagtactatagtgaaggcaaatttgtaaaaaaagatagcgtgaaagcagattattttctcgaaatgtcaaatagtttatttgaacagcaagaagtgaaaataaaagaaattaatattgaaaattttcgcaattttgattcgctatttttaagcgacttcgaccctaacattaacgtaattgttggaaccaatggagctggtaaaacgacgttgcttgatgcaatcgacacctcattgagttggctacgtaatagtatattaaaaactggcggtagcggtaattatatatctgaaaaagatattaatttgtatagcgatattccttacgccactatctcttcggtaatcgaagttaatcataaaatagacgtgcctctggaaatttccaaatctcgagaaggaacagcaaagcgaagaaatcagttattagctcatcggacgataggtgaattttataagatagctaatgagaaaaacccgaccttcaatttccctcttttggcttactataatgtaatgaggtcgtatgacgtaaatcctcgtgatatatctggtcatgatgaggtcattggcttcgataaattcgaaggatatcgtaattctttaaatgggaaaaccgatttccagagtttctttaactggtataaaagattagacgatattctagctcgaagagaaagtaacgtatccaaagccaccgttctaaaggaactaggacttactccttcactatttgaaaagcttgaaatattagcggagcatgacgaagagacacgagaaagtttagaagtaataaggtcgaaatttcctgatgaggtcgatgatatcttagatgaggattatgcgaaacaagctaagctaatggttaatcaagcaattagctcatttatgactggttactccaacctagaagttcaacttgaacctttcgttgatttgcttattgagaaaaatggaagaaaaataagcgtattaagcctatcacaaggtgaaaaaacgctattaacgcttattgctgatttaacaaaacgtctcattcaattgaacccctcgcttgaaaacccattacagggtcaaggggtaattttaattgatgaagttgacttacacttgcatcctaaatggcaacgtaagatagctaacaaccttaaaaaaacgttccccaattgccaattttttctaacaactcactctccattagttttgggtgaagtcaatcctagtcaaatcacattactctcactagatgaaaattgtagtgtaaccatcagaaaaccatctcagtcattcggcttaacgtcaaatgatatacttaacgagcttatgtcagatggtgcttctgaatatacgcaattaggtcgttctgagttagtagaaagtatgttgcgtcaaattaataagctcattgcaattgaaagtgaagattcgctagctgaggccagggaaaaaattatcgagttggaggagctaacatttggagagattccagaattgctcggcgcaaaaatggagttagaaatactgtcaaatcatgatgaattaaccggagaggataatgaaacagatcattaa

SEQ ID NO: 86155 - DNA, 648 bp, Vibrio sp. 16
atgaaacagatcattaaaaaagctgaaccggtgaaattaactcaataccgtttacaatctgacgcggtttacgatggtccaaattttacagttgtgaaaaatgatattagaactagccttttagaagaacaaggctacttatgtgcttattgtatgaaacgcatatctttccataatatgaaagtagagcactgggccccccaagaaacacatcccgacaaacaactgaactatagaaacttgcttgggtgctgtaaaggtaacgaaggttttccacctagcgagcagacttgcgatactaaaaaggctaatcttaatttgtcgttttctcctgcagatagttcgtgcagtatagagtcgaaagtaatcttcgcaaacgatggcctcgtgttctctacagaccaaaagtttgatcgagaacttaatgatattctaaaccttaattactaccgactaaaacgaaacagggaagaaaagctagaaggtttaaaaagagttttaaatcgagatgctggaagaagaactaaatctcagctccaagctttaatttctcgctatagctccttagatacaaatggtatgtatcgagagtatgcggctgttatattgggagatttaaaaaagcgatatgctcgagcacctcggtag

SEQ ID NO: 86156 - DNA, 1242 bp, Fusobacterium necrophorum D12
atgaagataaaaaaaatagaaataaaaaaacttaaaggaatcaaaaatctttctctttcttttgaaaatgaaggaaaacctttggatattattgtattagccggttcgaatggaacaggaaaaacaacgattttagaagctataaaaaatatttttgttggagattactcagattatgggaatgaaaatttcccagtaagaatggaaatattctttgagagtttagaagaggtagctatttctaaatccaaaatgtcttctaaggaaaccaatataaaacaatggaaaatacttaatgctttcagaaactattcgtcactaaaagaggagttagagcaagaattttttgactatcaattagcaaagaatctgaagattttacctaagataatttatttgcctaccagaacaaactttcaaaatgtaaatacaaaaacgactgcattaaaagctagcaatcattttgtcaatattgtagataatgaaatatttaaagacattccttcttatattgcgactagagtttactatgttgcaaatacacaagagaatttaactttaaaagaggctaaggaaaaagtagcagaggaaattaatagtgtatttaaaattttagatttggatattaaatttataggtttgtctaaagatgaagaaagcaatcctattttttcaaattctgctggggaagagtttgatattaacgaactttcttctggagaaaaacaactttttttaaggactctatccatacagatgttaaatcctaaaaattcgattattttaatagatgagccggaagtatctttacatccggaatggcagcaaaaaattatagaagtatatagaaaaattggaagtaacaatcaaatcattgttgccacacattctccacatattttaggaagtgtcagaaaggagaatatatttgttctagtaaaagatacagaagggaatatcacagtcaaaacgggagaagaactgtatgcttcctatggacaacctactgataaaatacttgaaggtatcatgaatttatcttttgccagagttcctgaggttgcgagtaaattagaaaatctcaggcaacttgtagataacaataaatataatactgaagaatttaaggagaaatccgaagagcttcacgaaatccttggagaaaaggatattgatttaatgctcattgacatggatgtggaattaaaacaaaaggagaatttaaatgctcaaagtgaataa

SEQ ID NO: 86157 - DNA, 483 bp, Fusobacterium necrophorum D12
atgacaataaaagaaaatctaaaaaaatctctgttaaaagagcaagaaggaaattgttgcccatactgtgaagtcaagattcatttagagagaagtcatatagaacacattaagccaaaagacaaatttccgaaatttctacatgaatatgataatatgattgcctgctgtgttagcaataaaaattgtggtgcgacaaaggcaaatcaatgggataatttgtttataaatcctgttttggataatccggaggagtattttaaatatgatattaaaactgggagaatacttcctatagacgaagtaggatataaatttgacagagcagaaactacgataagatttctaaatttgaatgaaaaaaatttatgtgacaaaagaaaagtgtatatccttaaatttagagatactcaaaaagaatataggaaattttttcaagaattcccttctttaaaaagatatttgcaaaatattctgacataa

SEQ ID NO: 86158 - DNA, 1173 bp, Fusobacterium ulcerans ATCC 49185
atgaaaataaaaagtattgaaatagaaaataataaagcattaaaaaatataaaaattaattttgaaaaagagaatgaaattttaaatactgttgttatagctggaagtaatggaagtggaaaaacaacactcttggaaagtatttgggattattttaaaaatgaaatgggtataagaagatatggtataggaataaaagcagaattgtttttagaaaatgatgaacaaaaaataaaggagtctttgcttagtagtttaaattatttaatgtattataaagaaaatgattttaagagatatcaaaacattgtagaaaatataaaagtaattcctaagttaatatatattcctactgaaataaattttaatgaagtaaaaacaaaaactactactttacatagagattatgaattttttaatattgttaattcaaaaatgatagaggatattccttcatacattgccagcagaatcacatatctggcaaatacagaagagaatttaactatgaaagaagttaaagaaaaagtaaattcagaaattaatggaatatttgagattcttgaactagatgttaaattaacaggattatcaaaagatgaaaaaagtatgcctgtatttactaattcatcaggagatgaatttgatataaatcaactttcatcaggggaaaaacaattatttctaagaactttagctataaaaatgctagaacctgaaaactccattattttaattgatgagccagagctttctttacatccaaaatggcagcaaagaattatagaaatatatcaaagaataggaaaaaacaatcaaatcatagttgcaactcattctcctcatatattaggaagtgttccaagagagaatataatattactttctaaaaatgaaaatggagaagttatttcaacaacaggagaagaactatacacatcttatggacagcctgtagatagaatattagaagatatcatggggttagaaactacaagaaatcctaaagtttttgatttattaaatgaagttagaaaattggttgatgaaaatcaatatgaaacaaataattttaaagaaaaatattctgaattaaaatctattttaggtgaaacagacaaagatttattccttatagatatggatattcaaagaaaaagaagaaaggaataa

SEQ ID NO: 86159 - DNA, 567 bp, Fusobacterium ulcerans ATCC 49185
atgtttaagattaataaaaaagaagagcctggattttttaaaaagtttaaaactaaaaaaggactttataattggcgtgtttatgattacaaaataaagagagaattgaaaaactatatgcttgaatatgagcaaaattattattgtccttactgtgaattaaaaataaatgtagaagaaagtcaagttgaacatataaaacctaaagaaaaatttcctgaattaatgcatgaatattctaattacctgacaggttgtaaaagtccaaaaacttgtgggcaatttaaggcaaatcaatggtcagaaaaatttattgatcctacagtggaagatccagaagaatattttacttatgatataaaaacaggaaaaattattccaaaagaaaaagaaagattaaaagttgaaaaagctgattatacaattaaagtattgaatttaaatgataaaagattatgtgagatcagaaaaacatttattgaacaaaatttaaaaaatatggagtgtttagattatattgataaatttccaagtttaaaagaatatttaaaagaaaattttaattaa

SEQ ID NO: 86160 - DNA, 1398 bp, Escherichia coli 83972; identical to SEQ ID NO: 86108

SEQ ID NO: 86161 - DNA, 732 bp, Escherichia coli 83972; identical to SEQ ID NO: 86109

SEQ ID NO: 86162 - DNA, 1359 bp, Pseudomonas amygdali pv. tabaci str. ATCC 11528; identical to SEQ ID NO: 86098

SEQ ID NO: 86163 - DNA, 651 bp, Pseudomonas amygdali pv. tabaci str. ATCC 11528
gtgagaaagattgaaaagggaagtctcgcggtgctggaaaaatggaagcgcgcgaacaagggaaagaaatacggcgacctggtggggcatgaagatataaaggatgccattcgccacgcctgtgtcactgagcagcatggcttgtgcgcctattgctgctgcaggatcaccgcagagaaaggcagtgcctgcaatgaacatgttgaagcgcagcatctagcaccgcatcgcactttggatttcggcaatattgtcgcgagctgcactaacgccaagcggtgtgacaaggctcatggccgtcagcttttgccgcttacgccgctgatgatcgaatgtgaaaaagagttgcagtttgagctttcgggcctggtggcaggcaccacgcttcgggcgtgcgcaagtatcaacgtgctcaatttaggcgatacccatgagtcgaaccggggtcttgtgggagagcgcaagcagatgattgatgcgctgctgttttcttgcagcattgaccctgctgagctgtttattgaggaagatgatgttctcgatctgttaaaaaatgacctgcttgaggtagatgctcagcagtttcttcagcccttttctccggttttggtgaatgtaattatcggcatccaacgcgctcgtcagcgttga

SEQ ID NO: 86164 - DNA, 1368 bp, Ruminococcus sp. 5_1_39BFAA
atgtgtgaatttaatatccaggaaatagaactttttaattacaggcagtttgaagataagaaatttgtgttaaattcaagaatgaatgtttttgcaggaaagaatggctctggtaaaacaacagtactggaagcggctaatgtcgtgctgggggcatatcttgcagcgtttaagacatatgtaccttccaggtttgtgtttaatatcaaatcaactgatgcaagacgaaagactcagatttcagatgatagcagaattcttactgctggtgcaatcccacagtatccttgcaaggttagttgtaaggctgcatggaatattgattatgagtctattggttttcagcgtgttcttttgaaacaggatggcagaactaagtttggtggaaaaaatccaatgcagcagactgtaattgaatgggaaagcaaaatcgcaaatgcagatcactctgatgaagatgttattctgccactggtattataccttagttcagcacgactttggaaagatggaaataaaagaacagtaaagacaggcgtattgagcagaacagacgcatatagccactgccttgatgcgcagcatggattggatattgcatttcgatatatagatacgcttaaagctgttgcagttgaagaaaatgatggaaaaattttcccggcttatgaggtcattttgtgggcggttaatgaggcgtttagagatgagttaaaatcaggtgaaaaaattatattttctacaaaatatgaggatgatattattgcacttagaacatctgaaggaaccgttcttccatttcagatgttgagtgacggttatagaaacgttatcaagataatcttggatattgcagcaagaatgtgtatattaaatccatatttgaaggagaaagccttacaggaaacaccgggtattgttcttattgatgaaattgatttaagtttgcatccaacctggcagaaaagaattattgggattttaaaacaactgtttcctaaaattcagtttatctgtgcaacacattcgccttttattattcaatcacttgaagagggtgagctgatcacattagaccagcctctggaatctgaatattcaggagagagtattgaagatatttcggaggatattatgggggttgtgttacctcaatatagtgaaaaaaagagaaaaatatatgaagcttcaaagctgtattttgaagcacttacacaggcaaaatcgcaggaagacatagacaggctgggaaaaagactggcggaactggaggctgaatacagcgaaaatcctgcttatatggcgtgggtacatcagcagtatctggaacagaaatggaaagtgaaaaagaatgagaccaataaataa

SEQ ID NO: 86165 - DNA, 696 bp, Ruminococcus sp. 5_1_39BFAA
atgagaccaataaataagggggagtctccatataaaaaaataaatgaatataaggacgcattgccatatttagagagacggataggaatgtattgttcttattgtgaattttctataccacatgttcctgaggtagaacatgtggtttcaaaatccaaaggtggagatttaacagactggaataatcttaacctgggatgtaaatattgtaatacacgaaaaaaggcacagacaatgccggaaaataaaaaaaactatttgtggccagatgaagataatactgctatcgcatattcgtacattaatggtatcccaaaggtgaatgaagagttattgataaaactggattcaacaggggattacctgaaaagagcacgtaatacatataaccttgtaggtttaggcaatcttcctatgggaaaagatagagatagacgatttggacaaagaaatacagcttatcaaaaagcattaaactcgctggaacactggaatcatatgaaagacctgtcaaaagaatatcagaatgatatgaaaaatcagattattatgacggcattgggagatggatttttttcgatatggatggaagtgttttgcgacgaaccggaaatacgactagcactcatagaggcttttccaggaaccaatctgaattattatgatgagaaaggatgcgttaaagaaattatatga

SEQ ID NO: 86166 - DNA, 1290 bp, Selenomonas sputigena ATCC 35185
gtgtatatcaaaagactccagctggaaaactttcgctgctttgagcagttgacgatagactttccgaaagattatacagtgctcattggcgggaatggggcagggaaatcatcgattttggacgccgttgctattgcgatggcaagttttctcgccggctgcggcattcaggcagcaaatttccataaaactgatgtaagattcttgacatacacctatgaaaaaggaggctttaacagagaagcgcaatatcctgtgcgcatttcagcacaagcagagacggaaaaccaggaatgcatagcatggactcgggcgttgaactccgaacgtgggcgtacgactgtgggagaagcgcgtcctataatgaaccatgcagatgctctttgccaaagagtcaaaaagaatctcccggtgacgttgccgtttcttgcctactatgggacgggacgtctatggctgccaaaacggacaaaaaaagatgccgtgatgcgaggcgtgccttcgcgcctgcatggctatgttgatgcgctggatgcagcgacgaatgaaaagctgatgctgcaatggtttcagaggacggcactcatggaggtgcaaaaaggagtatctcttccgatatttcaggcagtgaagcgtacaatggagaagctgtatgctgaaatggatgatactgctgaggtggtgcaggtgtcctacgacttcaacgagttggagattgagattcgtgtaacggataaagccgggacgaacgtatccctgccgcttcggtattttagcgatggaatcaaggctatgctgtccatgactgcggatattgcctatcgcatggtgacattgaatccgcagttgggtggggaagcgatagcggaaacaccggggattgtccttattgatgaaatcgatatgcacctgcatccatcgtggcaaaggaaaatcctgacggctctgcggaaatcattcccgaaaattcaattcatcgtcacgacacatgcacccgctgtacttgccaatgcggaaaacgagcatatcatgattttttcacatggaaaggtcgtttcatcggaaaaatatatctatggtcgcgatgttactgtcattttgcgcgatgtcatgcacactgaggtgcgtccgaaggaagtcgtggaaaagaaagccctgttttatgaggtcctggaaaagggagagttttcaagggcagaagaattgttggctgatttagagaaagttctgggagcacaggatgaagatatccttcgcatgcaggtcatgctggatatggaacgattgtga

SEQ ID NO: 86167 - DNA, 639 bp, Selenomonas sputigena ATCC 35185
atgatctacataaagaaaaatgagccgccgggtgagttcattcggtatgccaaaagtagcggagcttgctttgatgggatggattctgccgtcaaggcaactttacgaacagcgttgttgcaggagcaaaaatatctctgtgcctactgcatgacttcactggaagactcatataaatatgtaaaaatagaacattatgtaccgcgtgatgccgataatgagcttgcgtataaaaatttattggccgtttgctgcggcaatgcgggaaagccgaaaacggtacagacttgtgatacgagaaaaggaaatacgatacttcagatcgatccgcaaaaccagcatcatatggcagatattttctatgatggaaatgggaaaatctacataaagaataaagagtggcaggcagatttggacgatgtattgaatcttaattgccccgaacttcaagccggaagaaaagctgcattggatggtttgtgcgcagtcttgtataaagagaacaaggcgaaatctgcgtccaaagcttatctggaaaaaagactgaaattctaccaggaaggtaaagatgggcggctgcgttcttattgtggaatattgcggtattatcttcaaaagcggattcggcagtgccggtga

SEQ ID NO: 86168 - DNA, 981 bp, Bacillus cereus Rock4-2
atgggaaggagattttgtatgactgatatatttataacggaattgaaaattaacaaagttaggcacttaaaagatattcatattccaatttctgaaaaaactagaaaacatttaattttaactggcaaaaatgggtctggaaaaacttcgttacttgaagggattttagaatatttcgcaatattagactacactactttatcaatgcttgatcgtcatcgagattttatcaacgttcataaaaatgaactaactcgctatgaagatcgcttaaaggaagatcctgataattctgcttttctgatgcaaattaatgaagctaaaagaaatattcaatcaaatgtagaaatcatagctaaatatgaaggtaaaataaaaccatcatttaatacacttttaaattttgatgaatatcatgaaaatgggaagtatataattgtatattttgatgcaaatagaacttctcatatggatattccaaatgggattgaaaaaacgagactcttaccaacaaaagaaattagagcaaatgcaaatgctgtttttctaaaatatttagtagatttaaaagcacaacaaatgtttgcacagcaagatggagataaacagacagctaatgatattgatttgtggttcaaaaatttagaacaatgttttaaaacgctatttgaaaatgataaactagtcttaaagtttgattataaggattataattttataattgaagaacctggaaaagaatcatatacacttaatacattatcgagtggttattcagctatattacatattataacagagcttattatgagaatgcttgctgctaaagcgcctctttatgatatacaaggcatagtaatgattgatgaaatagatgtccatttacatattagtcttacaaaaaaaaatattaaagtttttaacagagttatttccaaacattcaatttatcattacaacgcattctccgtttgttattaa

SEQ ID NO: 86169 - DNA, 537 bp, Bacillus cereus Rock4-2
gtgaatgtagaacattttataccacataaaggaaataaagggttagaattttcatggaataatctattttggtcatgtgcacactgtaataatacaaagttagctaagtatgataacattttaaattgtacagatcctgaagataatattgaaaataggattaaatttatgatagaacctgtcccttttgctagagtaaatatagaagccttggatcaagaggaaaaaacgattcaaactgtcgaactgctaaacaaagtatataatgggagtactcatttaaaagtgatagaggcagattatattagagaggcattagtcgatgaaatgttagagttctataagttgttacagagttatgccaagagtacaaatgagcagttgaaaaatatattctttttacaaataattgatgaattggattcaagttctgccttttcagcatttaagcgacaattgataaaaaaacacagtaatctgatgaagatatttggtgaaagttttgatactccatcagaagaatttaatgctagttga

SEQ ID NO: 86170 - DNA, 1314 bp, Bacillus mycoides Rock3-17
atgattattcatgatctaaagctggaaaattcccatggttttgaagagagatatatcacattttcagataaatttactgtattagttggagataacggaactggaaaaacagcagtgttagatggtttggctgttgcgctaggagcctttttaagtgggttagatggcgtacattcaagacatattagacgtgatgaaatacatagggaaatatttaaacttggtggtttatccgatatccaaatgcaatttccagtaaaaattagctgtacaggaactgtggcagggaaccagttagagtggtcaagagcagtcaacagtaaaaaaggatccactacgagtaaagaggctagatctattatagagtatgcttcttatttacaaaaagatgtaatgaatggtgaagagattacactccctgtcatttcctattatggtacgggacgattatgggtacaaaagaaggaacaaaataatataagaagaaaaagtgacaggttagaaggctatgaggattgtttagacccagcttccaatgaaaagcatttctttagctggatggagaaaatgacatatattgagttgcaaagaggagaaacaccgcctgttttaaaagctgtgcgaaaagcaatttcagattgtatgcggacatggaagaccattgagtttgatgttgattctcaagaattgcacgcaattaaaaatgatgatacagcaatatcctttcatttattaagtgatggggtacggaacatgctaggactagttgcagatctagcgcatcgaatggctcagttaaatcctgcattaggcgacgctgtcataagagaaacaccaggagttgtattaattgatgaacttgatttgcatttacatccaagctggcagcgtagagttgtcgaggatttaaaacgaacgtttccgaaagtgcagtttattacgactacacattcgccatttattattcagtctcttgaagaaggggaattacgccgccttcatgaagaagacgacgatgaagtggtacgggatgaggagtttgtcaataagagtattgaagatatcagcgaaaacgtaatggagattgaaaatgtgcaaagaagtgaaaagtataagaaaatgtatgaggcagcacaaaaatactattcgcttcttcaagaaggaaagcaagcatctgatgctgaagttgagagattaaaaaatgagttagacgagatagagtccctttatagtgatgatgtggcatattacgcatttctgcaaatggaaagaagagcagccggattagcgagtgatacaaatgagaccgattga

SEQ ID NO: 86171 - DNA, 339 bp, Bacillus mycoides Rock3-17
gtggcagttgaacatatgcagcctaaaagtttacatgatgacttagcgttaacgtgggacaactttttactagcttgtgtaaattgtaattctatcaaaggtcataaccctataaatctagaggaatatctatggccggataaggataacacactattagcgtttcactatatggaaggtggcttaataagtgtttcctctactttaacaccagaggtaaaacagctggcagaaagaagtataaagttaacaggactagatcgttatcctagcatggatccaaatacgaacccagaaagaacagatacacgttggaggtataagacgtacagcatatga

SEQ ID NO: 86172 - DNA, 1233 bp, Acinetobacter calcoaceticus RUH2202
ttgtgtaagcccaatcaattaaagccatttcaaaatgtattcacaattattactggaaacaatgctactggtaaaagccgattacttaattcaatcattagcacaacacttgattcacccgcttatgactttaaaaaagtcattggaatttcaaatactctcaataataagtttccagatttcaaaaaccccaaatatatcaaactaacaaatatagaattttctgatcttcataaaattaaaaaaaatgttacagaaactgatccagattactttaaatctgaactatatcgaattttcattaattatggtttacctgttaatctaactcaaccttatactttaaatttagaaaaaatattaccttttgtagcaattaaatccatagaatctcctagtattctacaaaaaataaaaatactttttgattttttagaaatcaaaggaaatgttaagattacttttgaaataaaaaataggaacaaattattaaaaacattagatgaaataattgaaaaaaaagaagcatctgacaaaacactaaagcaaattaaaaagatctttaatgacattcagggattccaaaataaaacaatttatttagatgagctaattgactatccagcatgttatgaattaataagatgtggaataataaatattgctaagattagatttgctcttaaagatcattcatatgatttattatatagagatttaagttcaggacaaatttctatactatctttaggtctatctttaatttactcattagaagataactccttagtatgtattgatgaaccagaaattaatctccatcccgaatggcaaaaacaaataataaaacttattcaaaaactttcggatgaatataaaggatgtcatttttttatagccactcactcaccattacttatatcaaacttaaataatcaaagtttcattttagacctatctaacaataaactcctacaatcaattgatataattaatcgctcatctgacttccaattaacagaagtctttaactttcctggtaataataatgagtatttaattagaaaattaattattatattaaacaaaataaattcagatgaaaattttacttttgatttagatagcttaaaattgttaaatcatataaaaactttagttaatgaagaaaaatttgataaagaagataaagtcaatattttattcaaccttatagaaagctatagaggttga

SEQ ID NO: 86173 - DNA, 657 bp, Acinetobacter calcoaceticus RUH2202
atgttagtatttaaaatacctactgaacttaaaagtcttattgatagctatgataagaaaaatcatcaaatttggaatgatgaaaataatcaagatgtcaaaagttttaggtcattaattcgaaatcattatttatccagtcaaaaacttacatgtttttactgcagacagtatattttttcaacaaatggcttacactggcaagttgagcatattttgcccaaatctaaatttcctcaatttctttttgagcctaaaaatttaattgttatttgtcctgattgtaatcgcgaaaaaagtgatcaaaatccccatgtcgatggagagaaagcttgtacacgccccagttatccaagtacgagtggtagatttaaaattattcaccctttatttgataactatgaagagcatattgaacgtgtgccagcaaatcattgtgactatcccaatcactattttcttaaagcacacacaccgaaaggaaaagcaacagtacgaatgtgttatttagatcgctttacacaagagttcgctggatataaagatatgagaggaaaacaagtggaacgcttagatgattttttagaaagagatttaaatactcttactaaagaacaaaaaaaagctttagtccaaagaattatggattctatgtag

SEQ ID NO: 86174 - DNA, 1326 bp, Acinetobacter junii SH205
atgccaatcatatatcaattagaacaaaataaaaatattcttaaatttatagacaatgattttgaattacaaaataccaatatatttacttttttagtgggtaaaaactctgttggtaaaagtcgacttttaagaagtcttataattcatgcattagaagaagataaatttgataaagttttagctctttctaacactcaatatcataaattcccttcctaccgtgatcttccaaataaagagcagatatcaaacaacaaatataccagactagcttttgaagctagaacacctatttactctggtggctatgattacagaaaaaaaataaataatttttcaaaaaaaaactatcattatctttttaatttttttgacgaaaataatattaaatttcataagaacctaaatacgaaccttaacttcgctcaatcctttgaatcatttttaactcaattctcttttaaagaaaaaccatattataatctattgacaattttagacttcttaaaactagatcactatgtgaaatgtacaattctaccaaccaatagctttaaaacagaagatttaaatattaaaattaataattactttaataattctaaaaacattacaagtgaagagtatgaaatatttagacgtttaaaagatagcttatatgatttaaaaaatttaagaagctttgacttacttcacttatctttatacgagcttgaaagtatatcattcttaatagaatcaggactcgttagaatttataaagtatccttttctaaagataaaaaaatatttaattatacagatttaagctctggagaacttgctgttttaagtttagttttaggattgacagctacaatcactgataattcattagtatgcatagatgagccagaaataaatttacacccacagtggcaagaaaaaattattgaacttattgagttagtatctgaaaactattatggatgtcatttttttattgcaactcactctccacaactcatatccggaatatcagaaaaaaatagctttattcttgatttaactaataattcattaaaaacgattgaaagttttaaaaatagatcatctgattttcaactatcagaggtttttaatttccctggaaaaaataatgaatatttaattagaaaacttattcttctattgaataaactaaacaatgaagaggactttatactaaacaccgaatcaaataattttcttaaacatataaataaattattaaaagaagaaaaaatagaccaagaggataaagttagaattcttttcaatctcgtaaatagctatagggattaa

SEQ ID NO: 86175 - DNA, 657 bp, Acinetobacter junii SH205
atggaaatttttcaaattcctactgagctacaagattttattaatagatatgataagaaaagttatcaactatggaatgacgagaagaataaagatgttaataattttcgtagattaattaggaatcactatgtttctgatcagaaatttacttgtttttactgtaaacaatatattttttctacaaatggtttacattggcaagtcgaacatattttacctaaatccatatttccccaatttctttttgaacctagaaatttaattattatttgccctgattgtaatcatgagaaaggagaccaaaatccccatactgaaggagtgagggcttgtaatcgtccaaattacccaagtacaagtagtagatttaagattattcatcctttatttgataagtatgaagaacatattgaacgtgtacctgcgaatcattgtgaatatcctgatcattattttctcaaagcccatacaccgaaaggaaaagcaactgccaaaatgtgtgatttaaaccgtttttatcaagaatttgcgggttacaaagatatgaaaggtaaacaagtttcgagcttagataattttatagaaaaagatttgaatgatcttacaaaagaacaaaaaatagagttagttcagagaattatggcatccatgtaa

SEQ ID NO: 86176 - DNA, 1350 bp, Bacteroides sp. 2_1_22; identical to SEQ ID NO: 86148

SEQ ID NO: 86177 - DNA, 708 bp, Bacteroides sp. 2_1_22
ctgggaaatggaaccacgcatgtaatacaagaagaatataagccttatggtaatgctagacctattctcctgaccaatcttggtcgttactgctcatattgtgagcaggcgtttctgtgtggttcaaatctacaaactgaacacattcaaccaaaaggtttagatgttaatggtataaaaccatatgcagaattatcaaccaaatgggagaattttttattaggatgcgcaacttgcaatggtaaaggtaataaaggtgataaaaatgtggtatttgaagatattcatcttccacatagaaataatacatatttaagtctcgtatacaaggaggcaggtgtagttattcctaatccgaaattagaaggaaaatctttggcaaatgctgaagcattaattagtctcgtaggattggataaagaagatttagatacagatgggcgatgtggaatgagacgtgaggtttgggagaaagcaatcatgtatctaaatgattatgaaaacggagaaataaaactccggcatttaatagattacataaaggtgtcaggttgctggtctatatggtttactgttttcagtggtcatgatgaagttagaaaagcactcatagaggaatttccaggaacagctaaagaatgttttgatgcaaacaatcattatgaaccagtaaatcgtaatcccaaaaatgcaatagatcctgtttaa

SEQ ID NO: 86178 - DNA, 1299 bp, Bacteroides sp. 2_1_33B
atgaaagagattagattagagaattttcggtgttatacagagctatccatccccttgaaaagtagagtcaatttgcttgtaggtgataacgctaccgggaagacatccgtgttgcgagcttgtaagtttgtgttgagcgcattcttcagcgggtttagcgatgataataccaaatgggttaatcccggcaatgaggatttcatgcaaatggagaccggtggaatcttattgcaggagcgtcctattcatatttcttttgatgtggctgatgtgatggggaaggaggcggattccacgggtggagattcgttttatactttgataaagaaaagcaagaaaaatagccgttccttgacttcgggacttaaggagtataaggattgggcagctttgttgatgcataactatattagtaaggagggacagagaatcgctttacctcttttcgcgaatttctcgacagaagatattcatgctattcgaaagatcgattttggaaagttcaaggagtataaccataagccttcttttggctattatgaatgtttggagggggatggctttttcccttattggattaagcgattgctggtcttacaggaaggtagggaaaaccatttggagatagatatagttcgcaaggctatacagaaggctcttggagcgggtggttgtgcgattattcaagacatggaggttcggcccatccggaaaaaagtatattatatcttgatggatgggcgagaggtagaagctgatttcttgtcagatggatatcgaaggctggtttatatagtaacggatctagcttttcgttgcgcattgctaaaccggggtatttatggtgaggagacttgtgcgaaaacccggggtaccgtcttgattgatgaggtggatttgcatttacatccaacgttgcaatcggtggtgctgaaaggattgtgcgaggcatttcctggattgcagtttatcgtcagttcccatgctccgatggttatgtcgggggtggaaagtaatgaggagaatattgtttataagttgagttactcggaggaacagggctatcgtataatgccgactgtcacttatggtatggatatgtcgacgttgacctatgtcgtgcttggtcaaacgcctcgtgcggttgaagtagataggcagttgaacgaattgtttgagttgatagatgtggatcgcttgaaagaggctggagatttgttacggaagttgagagggaaatatggagattctttacccgaacttgcccgggcggaagcgatgttgaactgcttgatttaa

SEQ ID NO: 86179 - DNA, 630 bp, Bacteroides sp. 2_1_33B
atgagaaaggtagacaaacgaccggaaccaaaggagtgggtggaatatcggcagacccccggtgctaagtatgaagcgatatctgaactgcgaagttcgttgcttgaggagcaaggatatgtttgtgcttattgtatgcgtaggattcctgtgaaagaccggaatagtaatgaaaccagccggatagaacatgtgctgagccgagaaaagcatccggatagggaattggattatcataacatggtgatatgctgtcctggggcaatctcttctgactttcattgcgataagttgaaaggtaatgaggatctaacatttaacctttttgatgatgagctttttacaagcctttcttataaaagtaaatctgggaagattgtctcggcgaatgaagattatgataggcagatcaatcagttgcttaatttgaacaaccgctggttgatggctaatcgtttgcaggctttgctgggagtgattgattatttgaatcgtaaaggctggacagcttctaatttaaaccagcaaataagtaagtggagtaatatggatgcggaaggacgttataaggagtataatagtattgtcgtttggtatttgaaaaaaaagcagaggcaatgtgatttataa

SEQ ID NO: 86180 - DNA, 1245 bp, Fusobacterium nucleatum subsp. animalis 3_1_33
atgaaaattgaaaaagtccatataaagaatgtaaaagggataaaagatttagaactttcatttaaaaaagatgataaaattttagatttaattgttttagctggggtaaatggaagtggtaaaactactattttagaagcaataaaagatttttttgataataaaaatgttaattatgatgaactagaaaaatcaaatatcaatttagatatattttttgaagattttgaaaaaaataagattgaagaagctcaaaaaaattgtaaagataggtatgaacataaattaaaggagtttttttatgctttgaaaagttgtgaatataatagaaaaaataatggagagtattatagtgatttaatagcaaacttttttgaaaatccacctaaaataatttatgtcccagcagaaaataaatttgaagaaattcaaacttattctacaactttatcaaaaaaatatgaatttataaatactataaattctaatgtaataagggatattccatcatatatagcaactagaagaaattatcttgctactattgaagaagatttaactatgaaagaaatcactaataaagtagtaaatgaaataaatggtatttttaatattttagaactagatgttaaattaaaaggtttttcaaaagatgaaaaaactatgccaatttttgaaaattctgttggggaagaatttgatataaataatttatcttctggtgaaaaacaattgtttttaagaacattatctataaaaatgttagaacctaaaaattctataattttaattgatgagccagaattatcattacacccaaaatggcaacaaagaataatagaagtatataagaagattggagaaaataatcaaataatagttgcaactcattctccacatatattgggaagtgtttctaatgaaaatattttcattttgtatagaaatgaaaatggaaaaatagaagctaaaacaggagatgaactttattcttcttatggacagcctgttgatagagttcttaaagatataatgggattgaaatctgttagaactccaaaaatagacagagatatacaagaactaagaaaacttgtagatgaagataagtatgatacagaagaatttaagaaaaagtataacaatcttcttgaaatattaggaaatacagatgaagatttattccttatagatatggatataaaaatgaaacaaaaggtgaattctaatgttgaaagtaaataa

SEQ ID NO: 86181 - DNA, 567 bp, Fusobacterium nucleatum subsp. animalis 3_1_33
atgttgaaagtaaataagaaaaaaattgaaccagaagaatttactaaatacaaaagtaaacataaaataataaattgggatagttttacacctgaaattaaacaagttttaaagcaatatctattagaagaacaagaaaatagttgttgtccctattgtgaaatagaaattaatttggaaaatagccatatagaacacattaaacctaaaaatatatttcctaatcttttagcagattacaataattttattgcttgttgtcttacaaagaaaagatgtggtaattcaaaagcaagtaaatggagtgaactttttataaatcctgttatagaagatccagaagattattttgaatatgatataaaaactgggagaatggttccgatttttaaagagggagaaaaatatgaaaaagctaaatatacaatagaattattgaatcttaatgaggatagattatgtaaaattagaaaagttttcataatcaattacacaaaaaatattgaaacaagaaagtatttatcaaatttcccatctttaagaagatacttagaagacaggttataa

SEQ ID NO: 86182 - DNA, 1263 bp, Leptotrichia hofstadii F0254
atgaaaataaaaaatcttcatataaaagaatacaacggacttgaaaatttagatataaattttgagtcagaaggaaaagttttggatttgatagttctggctgggattaatgggagtggaaaaactagagttttggaaagtattcgttattggtttgaaatgtttagaagcaaagctgttaatgtggaattattttatgaagagaatgaaagagaagttttggaaagtcttatgaatagtgaaggattgacagaagttgaaaaagaagcacaaaaagatattgaatttacagattgcttgagaaatataaaattttataactatgattacagacacaataaaacagaaaatcaaaattataattcaaaaataataagcagaagttttgaaaaattaaaaatatttcccaaaataatttatgttccaactgaaattaattttgaagaaataaaaaaagctcaaacaaatttgaaaaaagaatatagttttattaatatcgtagattcatacgaaattaaggatattccatcctatattgcgactcggatttctaaagttgcgaatgaagaggaagatttgacaatgggacaagtcagaaaaaaagtttttgcagaaattaatgggatttttgaaattttggagttagatgtgaaactttcagaaatatcgaaagatgagaatagtatgccgatttttacagattctagtggaaaaaaatttgggataaatgaactttcttcgggggaaaagcagttgtttttacggactttggcgataaaaatgctggagcctgaaaattcgataattatgattgatgaaccagaactttcattacatccaaaatggcaacaaaaaattattgatgtttataaaaaaattgggaagaataatcaaataattttagcaacacattctccgcatattttagggagcgttgagaaagaaagtataattttgctagtaaaaaataagaatggtgttgtggaagttagaactggagaaaattttggaaattcgtatggacagactatggaaagaattttggaagatataatggggcttgaaacagatagaaatcctagtgtgtatgaactgcttaatcaagtaaaagaaatggttaaaaatgataattatgaaagttttgaatttgaaagaaaatacagtaaaataaaagatattctaggagaagatgatagagatttatttttagtggatatggatttgcaaataaaaaaggggagaaaaaatgctgaaagtagataa

SEQ ID NO: 86183 - DNA, 618 bp, Leptotrichia hofstadii F0254
atgctgaaagtagataaaaacgatgagccagagttttttacggaatttaaaaagaaaagtaatccgaaaagctggaaagattttgattttgaaataaaggataaactaaaagagtatatgcttgaaaatgagcagaaaatagatggaaattatttttgtccttattgtgaaagactgatttctgttgagaaaagtcaaattgagcatataaaacctaaagacaaatttccaaagttgtttcataattacagtaattttttgactggttgtcttgaaaatcaaacttgtggttcaacaaaagggaacaaatgggatgataaatttgtgaatccagttgaatataatcctagagattattttgaatatagtattagtacaggcgaaataattccaaaatatgaaaatggaatagagtatgaaatggcaatgaaaacaatagaaattttaaatttgaatcaaaaaaaattatgtgaaagcagaaaaagttttatttatcaaaattcttcaaggaaagaagggaaaatagtaattgatattgaaaatttaaaatatataacaaaatttcctacgctaaaagaatttcttttaaaaaatttaaaatctgcaactgaaaaataa

SEQ ID NO: 86184 - DNA, 1137 bp, Leptotrichia hofstadii F0254
atgaaaataaaaaacttatacatagaaaatgaaaaaagactgaaaaatttaaatattaattttgaaaataatggaaaaatattagatgttgtggttctggctggaataaatggaatgggtaagacaacagttttggaagttatatcagattattttgaaaatattgaacgaaatttaaagaataaaaataagatagatataaaatttgaatcaggagaaaagaatctggataatttagttgcaaatcgagaaactaaagtgatttatgtcccggcaacagtagaattttcaaataatttatggaatgatgattcttttttagaattatctaaagagaaactttcatacactattggaacatataaatttcgtagtattcctgattacataagatctaaaattatgaataaggtaactgaaggaattgataaaagttcacaacaaataatggaagaagtattttctgagataaatgaaatatttcaagttcttgatgaaaacatcgatattaaattagtcggaatgtcaaaagctagcagtttagaagaaatacttcctatttttaaaaattcatcaggagatacatttgatataaatagtttatcatcaggagaaaaacaattatttttgcgaacactagcaataaaaacaatggaacctcaaaattctattattctgattgatgagccagaactttcgttgcatccgagatggcagcagagaattgtcgatgtttatagaaaaattgggaaaaataatcagattattattgcgacacattcgccacatattttgggaagtgtgagaaaagaaaatattatgttgctggataaggatgatgaagggcaaattgtggttagaactggggatgaattgtatgattcttacggacagccgacagatagagtgttgaaggatattatgggcttggaaactactagaaatcctaaagtgtttaagttgctggaagaggctggggagttagtggataaaaatgaatatgagagtgaagaatttaaaactaaatatacaaaattacgagaaatattaggtaataaggatgaggatttgcttttaatggatatggatattcaaattagaaaaaaacgaggtttgaaaaatgttgaaagtagataa

SEQ ID NO: 86185 - DNA, 315 bp, Leptotrichia hofstadii F0254
atgttgaaagtagataaaaaggatgaaccagaatttttttcagagtttaaaagaaagaaaaatcctaaacactgggatgttcttaataaaccagagaatcttcatataaaaccagagttaaaatcttatatgttgaaaaatgaacagaaaataggagataaaagttactgtccttattgtgaaatgatactctcttctgaaaataatgatttgaaagaagataaagaatgccatatagaacatataaaaccaaaaagtaaattttccaatctcacttttgattacagaaatttttttaacatcttgttcagatga

SEQ ID NO: 86186 - DNA, 1278 bp, Erysipelotrichaceae bacterium 5_2_54FAA
atgtttacaagaattaaaattgaagattggcgccaattttccaacattgatattacttttcatgaacatttaactgtcttaacaggagcaaatggtgccggaaaaacaaccgtattaaatctactatcaaagagcactgggtggaatcctcagtttgtcagttcttatgaaaaagatgagaatggaattgtaaaataccttaatagtttaaaaaattttggtcataagctctttataaaattagtctcaacagaaaatactcagccaatcaataacaagttgggagaattagaattttctgatggaacaataacagatctaatacttcctgataatattacaaatggtacatacagtattgatattcaaggaggaaaaacagaaaaaggtgtatttgtaaattcacataggccaaattttccgtacaaagcagtaaaatctgttccaacgtcagttgcaactcgtcagcaaatatatagcaaatacaatgaatttaataagacttttgtgtttgatacatatcgtaatgcaaatgaagtctcagcaacatcactaatcaaggagaccctagcgtctttggcgatttttggatatggaaaccaatccgttgtaccaaatgaaactgcccgcaatttgtttgaagggtatgttaatatactaaaaatagtattgccgccaaaattagggtttgaaaggatagcagtaaatatccctgaagtgattctatgcacaaaaacgggagatttccctatagatgctgtttcaggtggaatatcttctataatcgatattacttggcaactatatatgtttgctgatacatcagaatcctttgtagcattaatcgatgaaccagagaaccatttacacccggaattgcaaaaaagttttttaggaaacctcatcaaagcatttcctaatgtgcaatttatagtagcaactcacaatccttttatgattacatcccaaaaggattcaaatgtatatgtacttaactataacgaacaaaacaaagtatattctttgaaactggactatgtcaatcgagcaggcacatctaatgcgattcttagagatgttcttggcattgattcaacaataccaacatgggcagctgaagagcttgataacattatcgataagtatagccattgcgatttgtctcaaaagaatttggcgtctctacgtaaggaattatcttcaattggtttggcagattatatccctgaatcaattgtgcagattgcagggaggatgaaatctgatgcggaagattaa

SEQ ID NO: 86187 - DNA, 663 bp, Erysipelotrichaceae bacterium 5_2_54FAA
atgcggaagattaaaaaacttgaaaagccacaaatcttagaaattaatgcagcaaaatgggctcaagaatactgtttatgtctggcttccggaaaaaagccaagcgatgaaatggtatcaagatataaggagcccacaatcaaagcaacattagaaaaagaaacccatgaaaagtgtgcttattgtgaaagtaaaatgaagcatattacttatggtgatattgagcatattctccccaaaaacaaagatgcgcgcccagatctatatgttgaatggactaatttgactttagcatgtgagcaatgtaatcgctctggcaaacgaacatattataatccacaattgctgttgattaacccatatactgacgatccagagcaacattttaacgatataggtcctttgatcatgcccgtacttggtgataaacgagcatatgttacaagaaatattttaaagctaaatcgtatggcattagtagaacgccggactgaacgtatagcgcttgttgagcctcttttgattttatgggtcaacgagcaaaatgatggtatgaaagaaattttagaacaacaactacatgatgaatattcagaagacaaggaatatagttccaccatcaaatcatatctcaaagcaaatggattccctgtgcgggagtaa

SEQ ID NO: 86188 - DNA, 1440 bp, Acinetobacter sp. SH024
atgaaatatataaatacaatcctacttaaaaatataaaaataccgttaaatggtaggaaccttgttcttacaggtaaaaatggcgtaggtaaaacgtattttttaactaaactttatgaacaactacaatttgagttcagagataaatatatatctacagatgatcagtttcattcttctaaaatatacgacacagtaaatattttttataatgaatttatagcctactcagacatacttgaaataaatagtaaatatgtaaattcaatttcaagcttagcaagcgaaaaaaataaaaaaaatagcaataaaattaaagaattaaaagaattacaacatatatataacgagcatttaaaaattttccttcaggaagtaaatatatttactaatagcaatgattccaactttaaaaacaaatctaaaaattattactccacaaaacctgaacatcttattagatcaaatgatttattaaaaaaagctttagatgaacttacatcctttcagaaattctttaaaataaactttaatgaaagagaaaccaataatagtactatttttagttttttcgatgtaaatagtagattgcaagttccagaaaaatatatacatatgggaaacatgtatgatgtgaaggaccttacttactatttagaggaactaaaattaaattttgactcagatattgaaggagcattagaaagatatctcttggaaaaacgagaagaactacgaaatagtgaggacaatatttgcgaggaaatctataagatatttagtgatatagaaaatgacttaaaactaatttttgatgatgaaactacagtactttcatttgatgacttcaataatcgcgttttaataattcaaaaaaatgaaaatatctcttttggatttgatgagctaccttctggttttaaatcaatttttaaaatatactctaatcttttaattaaatctaaattaataaaaacaagaaaaaacaaactgaatggaattgtcttaattgatgaaatagactcccatctacatatttcacttcagcaaaaagtcttacctttcttcacaaaggcatttcctaatcttcaatttatagttagtacacattcaccttttgtaatcacttctacaaatgataacactgtagtctttgacctttctaataatgagtttttcgaagataatttaagtcactattcgcatgaatctataataaaagaactctttcatgtaaaggaagaaaatgaaaatattaaaatactatcagatcagcttttacaattcattgaatcaagaaacttaactcaagacctaaatgcaattcaagaattattaaatgaaattaataaagattttgaaaagctatcagtagaactacaactccagtatatgattgctaaaaataaacttaccaaattaaaacatgaggcaaaataa

SEQ ID NO: 86189 - DNA, 672 bp, Acinetobacter sp. SH024
atgttttcagttattagacctgatacttttcctaaaagcttaacaaaatctactaaagactaccgtgctactgatgttgttgaagtacttcaagatatatttttttctaaatgttatctatgcgaaagaaaaggattctctgacgtaaatattgagcaccgtgatccacacgaaggcgaccttattaaaaaatatgattggaataatcttttctacgcatgtgttcgatgtaatggtattaaagccaatatatataagaatattatagattgttgccagactttagatgtagctcaagctattgagttacactgcccaatagtcaataacgatgaccataaagtaattgtaacagttggtaatttagcaagtactatcgaaattgaatctacaattaaacttcttgaccaatgttttaatgatacgaatacagctttaaaaggtataagtaggcacactttaataaagcagatacagaaatatcaaactaaactcttaattattaaggatgagcttttggatgattcattgatactaacttcttctgaaaaaaatctgagaatagaaaagttaaaggttatgtgtgaccctgaattccctttctctgcattttggaaatggtatatcactcgtgatgtcgatttatcaaaaattgttggaaatgttttttga

SEQ ID NO: 86190 - DNA, 1236 bp, Bacteroides sp. D22
atgggtaattttattacgagtatcaaggttaatcatatttttcatttggagaacttttgtataccaatctctgaaaatgaaaaaaaacatctgattattacgggaaagaacggaagtggtaagactattttgttgaatgcaattgtggagcatttaagtcaggtttgtaatgataaggcgttgagattcttagatttaaagaaaaatttagagtctaatcaagcatggttgcagcaagctgagaccactggtgattcaaaaagtattgcttccggccagaataacgttgaatattataaaaatagagttgaagaattttatggaaaagtagaactttcattccatgatatatactccatctctaaggatttttttagtcagaactttattatagcctactatgctgatgaacgtaagtctctttttgtagaacctaagaatcctgttaagccggatttgaagatgaagactgatctgaaacataataaagtagatcagttcttgaattttatggttgactgtaaagtgcaagaggccttagctcgtaatgaaggaaaaacagaggatgctgattatattcgtcaatggtttgtcggcttccgaaatattcttcgtcagatatttgatgatacaaccttagaacttgatttcaattataaagattactctttcctcattcaaacacgcggaaagtcgtttaaattcaccgaactatcagcagggtattcggctgcattagacattgtagccgatttaattttaaaaatgcaatcacagaataatgtggtccgtgcatacgagaaagaaggaattgtgttgattgatgaaatagaaacgcatcttcatttggaactacaacgagtgattttgccgatattgactactatttttcctaatatacagtttgttgtcactactcattccccttttattcttaattctttagagaatgctgttgcttttgatttggagcatcgtgaaccaattgaagatttaacggattattcttatgaagcattagcagaaggttactttggtgttcgtacagactccagtgagattcaaatgcgtttacaacggatggaagaattgattcgttccgatcggctttctatttcggataaaagtgagttggaaatgtatctgcaggattttgataagattccggaagcagttgctcctgctattaaagctaaatattatgatctgaaaagagagtggcaaaataagaattaa

SEQ ID NO: 86191 - DNA, 642 bp, Bacteroides sp. D22
atgattagaatttgtaaaaatgcagataagccacaaactttagataagagttataatacggacgaggtctgcaaacaattactgatggatcagaatgataaatgttatctatgcgaacggcgtttgacaactgattatcaagtagagcattttaaatcgcaagccaataatggagacttgaaacaaacatgggaaaacttatttgtagcttgtggatactgtaacaataaaaagtcgaataagtatgatgatatcttagatccgactcaatatgatatcgaaactataatagaacattcaaatgattttgttaatcagaaagcaatatttgatagtgataatagaacttctgaagtactttcaacgataaagttattgaatttattatttaatggaaaactatcttataggaattgtcgtgagcaacgattttatgatgaatttattcaaaaaatgaatttcttttcttatgttgttgatgaatatatgtcaggtaagaaagaatattattatccggttataaaagaacagttggatattcgtagtgaatatttgggatttaaatatgcaattattcatagtaacgatttgctgaaacatgattttggagatatgacgatttggaataaaaaaggagaatga

SEQ ID NO: 86192 - DNA, 1377 bp, Simonsiella muelleri ATCC 29453
atgcaagttaaatccattacattacacaatattggtcaatttaaagagttgacgattccactcgcgccatttaatgacaatgcgccaaaagttactgtttttattggaaataatggctctggtaaaacgactgtgctgaaatcgctggttacggcattaaattggctgtctgcacgtattcgtagcgaacgtgggcgcggtttggatattcccgaagaagtgattatgaatgggcaatcttcgggtatggtagtactgaatgtgaatgttaaaaatgcagaacaatcatttacatggcagattagcaaatctaaacaaggtcggaaaaatcagttttctactgatttgaaagcaatcaattcgttggcggatatttaccgcaccaatttaacggaaaatgcacaagctgatttgccgatattggctttttatcctgttgaacgcagcgtattagatattccattaaaaattagagaaaaacattcttttgaacagattaatggttatgataatgctttaaatatgggtgtggattttcggcgattttttgaatggtttagaaatgaagaagatgctgaaaatgaaatatataaagatataccaaaattaccgcctgaattggtcaatatattaaggcaacataatatagatagagcagttgtggaaaaagtgaaagataatttacaccaagcagaaaatagattaaaaaacgaaacaaaattagcttatgtaaaacaagctattcaagaatttacaggttttgaagagattcatattcagcgtaaacctaagcaaaaaatgctggttcgtaaaaataatcaggaatttgatgttattcaactttcacaaggcgaaaaatccctaatggcattggtcggtgatattgcgcgccgtttggcaatgcttaacccaagtttggaaaatcccttgaatagtcaaggtattgtgatgattgacgaagcagatttgcacttgcacccacaatggcaacgccaattgattgcgcgtttaaccaaaacgttccccaattgccaatttgtgttgagtacccattcgccacttgtgattagtgatagcaaagatattgttgtttattcattggaaaatggcgaaatgcagcaaatcccatcacaatacgggcaagatgcaaacacggttttgttgaatgctatggaaacggcgattcgcaacgaagaagttactcaaaaattgaataatttattagatttaattcagtataatcaattagatgatgccaaagtaaaattaactgaattgcaccaagagctgcctgaaaataatttggaattagccaaagcacaacttttactcaaaaaacaggaaatccgtcatgagaaaaattcaaaaaactcatga

SEQ ID NO: 86193 - DNA, 621 bp, Simonsiella muelleri ATCC 29453
atgagaaaaattcaaaaaactcatgaacctaatagtttgactcaatacaaacgaaataaccctactcatcaatataaagatttaaaagatgaaaatgtccgccaagatattcgtcaaacatgcacagaagaacaatattatttatgcgcttattgctgcaaagaaatttcaggaacaaatgtggatacgatgaatgagcatattcagccacgccatcatttcccaaatttatctatggatttcaataatattgtagcgagttgcaatgcaaaagggcattgcgatggttcaaaagattcgcacattcttttacttacgcctttgatggacgaatgtgaaaccgaatttaaatttaaaatcaatggagagatggttggaaaaacagaacgagcaaaacaatcaattgatattttgcaattaaatcagcgaaaattatgcgaatcaagaaagcaagccattgcgaatatgctgtatgtgcaaggtttaggcaatccaattgatgtggaagatgatgagttattacaatccgtttgtgatgatattatgatgcctgaaaatgggaaattacctgcttttgcgccagctattgtcaatgcaatcaaaaattggataaattcataa

SEQ ID NO: 86194 - DNA, 1242 bp, Fusobacterium periodonticum 1_1_41FAA
atgaaaattgaaaaagtccacataaaaaatataaaaggaataaaagatttagaactttcattaaaaaaagataataaaattttagatgtaattgtcttagctggagtaaatggaagtggtaaaacaactattttagaatctataaaagatttttttgacaatagaaatgtaaattataatgagccagaaaaatcaaacattaatttgaatatattttttgaagattttgaaaaaaataatattgaagaagctgaaaaatcttctaataactataaacaaccactatggaatttttttaatgctcttcagtcatatcaatatgagaaatacaataataatggattatatcaaaatttaatagcaaaaagatttgaaaatccacctaaaataatttatgttccagcaaataatagttttggactggttgaaacagcaagtacaactttatcaagagagtatcaatttataaattatgtagattctgttctgatgagagatatcccatcatatatagcaacaagaagaaattatttagctactattgaagaagacttaactatgaaagaagttacaaataaagttataaatgaaataaatgttatttttgatattttagaattagatgttaaattgaaaggtttttcaaaagatgaaaaaattatgcctatttttgaaaattctgctggtgaagaatttaatataaatgatttatcttctggtgaaaaacaactatttttaagaacattgtctataaagatgttagagcctaaaaattctataattttaattgatgagccagaattatcattacatccaaaatggcaacaaagaataatagaagtatataagaaaattggagaaaataatcaaataataatagcaactcactctccacacatattaggaagtgtttctaatgaaaatatttttattctttatagagatgaaaaaggcaaaatagaagctaaaacaggagatgaattatattcttcatatggacaacctgttgacagagtccttaaagatataatgggcttagaatcagttagaactccaaagatagagaaagatttagaagaactaagaaaacttgtagatgaagataagtatgacacaaaagaatttaaagaaaaatacaatgagcttctagaaatattaggaaatacagatgaagatttattccttatagatatggatgcaaaattaaaacaaaaggtgaattctaatgttgaaagtaaataa

SEQ ID NO: 86195 - DNA, 579 bp, Fusobacterium periodonticum 1_1_41FAA
atgttgaaagtaaataagaaaagcgaaccagaagaatttacaaaatacaaaagtaaaaataaaataataaattgggatagtttttcaacagaaattaaacaagttttaaaacaatatctattagaagaacaagaaaatagatgctgtccttattgtgaaatagaaattaatttagataaaagtcatattgaacatataaaacctaaaaatacatttcctaaacttttgtcagattataataatttaattgcttgttgtcttactaagaaaaggtgtgaagattcaaaggcaagtgagtgggatgaactttttattaatcctgttatagaaaatccagaagattattttaagtatgatataaaaacgggaaaaataattccaatatttaaagatggtgagaaaaataaaaaagctagttatacaatagacttgttgaacttgaatgataatagattatgtgatataagaagaaaatatatatttgaatttttaaattatagtaagtataataaaaatagtttaagtaattatccaataaaatttctatctctaagaagatatttagaaggtaggctttaa

SEQ ID NO: 86196 - DNA, 915 bp, Edwardsiella tarda ATCC 23685
ttgagtgatgttaaaactagatacaaactacctcccttagttatcggtgcacagagaaaaattacttataaaactataaacggtgttaccagagagaaagacacccaaggaagcatcaacgaatattgtgataatgcattaagctctctttacaataattcttcgcgagacataaagcaatggcttattaaccgatactttgtcatagataaatcttgggcagaagaggaaaaagcaaactgggaacatttgatcaaatcgctaccaataattgggccgttcaacagtgaatttcagtatttagacaccgggcgtgatcttgaatctgtattttcaatatatggaaaaaaatgcttccttgaggaactttcatcgggatttcaggccgttttatatattattattgcgatatttgaatggattgaggcttgcttgccagttggtgaaagagatgtaacaacagctcgtggaacagtgcttatcgatgagctggataaccaccttcatcctgaatggcagttaacagtaaggcaaggaattgcggcaatattccctaatatacaattcattgttacaactcactctccccatcttctagcctcggcaaaagaaaatgaaatcatcatgcttccgtcatcatatactgatgaagtatatgaatttcagccttcgaagaaagcatattcaggttggagtacggatttaatcttgaccgagctaatgggggtaagaagtctcgataacaaagattatgaaaaattagtgaaagcttgctatgaaaatatcaaggaaaataatcttaaagcccttaaagaaaactattttcgtcttgaatccatctgccatcctggcgacacggtgttaataatacttaagactcgcatagcaggcatggaggcgaaagcgaatgattaa

SEQ ID NO: 86197 - DNA, 687 bp, Edwardsiella tarda ATCC 23685
atggcactggtcgccaaatataatgagtacaaaaaaatacctcctaatgaaaaggaggcagcattaaaacattatcgtcatgatgatatacgtaatgcattgaaagaaagctcttttcataaatgtgctttctgtgaaggtattcctgaggaaactggctttgcggaggttgaacactttcatccgaaatccatatatacagataaagcttttgagtggacaaatcttctttatagttgcaaggcctgcaataataacaaacttaatcatgatactcaaaaacaaccaataataaatccttatgatttcgatcctagtgattgttttacgtatacagatataattattgagcctaaagcgggggctaaccacgatattgctgaaaaaactattgaagtgtgtgggctctcagacaaaagacttttttcggcaagaggtgatattttagtaagctttcgtatttttgaggctgacatccgtgaggcaatggaagaatttgacctagcacgtacttcaccaaataagcagaaacgagcaggaaggataaacgatgcgctacgcacgattgaagagctgtcgaagcctagtgcgagactctcaaacttttgtacctatctgctcgctaattctgaaatatatcaggaagccaagcaacgtctgcaggaatacactagcgaaaacttgtga

SEQ ID NO: 86198 - DNA, 1266 bp, Pseudomonas savastanoi pv. savastanoi NCPPB 3335
atgcgcctcgaccacctccatctgcagaattttcgttgttacgaagatgctcattttgatttccagccggggttcaatttggtggtgggggttaatggcagtgggaagacgtcgctgttgctgggtgtcgcgggatgcttcgggaatttacttggaagcattggcgtccatcagccatcgatagctgagtccgatgttcggttcgcgttagtaaagttcgaagacaggattcgtttcgaacgcagctatcctcttgtattgactgcccaaggtggcgcgtttgagcgtcaggaatggcacgtatcgctggaacgcagcagtcttcagacaaatttcagcgcgctgaacagtctcgtattttcggaaaatctgattagcatcgatgtaagtacccacggggatttgcctgtattcgccgtctatcaagccaatcgacgctggctgacgatgagtgtaaccgctgagcttgctgcacagagcaagccatcaagactggatgcatacacctcttggttcgatgccgcctccaatttgaaaaacttcgagacctggttcatcggcaaaacactggagcgctttcaaagactatcccgagcaggttcttccagcgttttcaacgacgaactgacctggataaactcagccatccaatgcgcactacccgacgccaagggaatagagtacgacatggagctacgtgcgttggtagtcgatatgtatgatcgaaaaatcccgttcaacgacctgagcgacggacaacgcggaatggtcgcactcttcgccgatatcgctcgccgtatctgcttgctcaacccgcacatggggaaggatgttctaagcaagacaaacggcatcatcgtcatcgatgagctcgatatccatcttcaccccggctggcaacgcaccattgctccagcactgaaaaaagcatttcccagcatccagttcatcgccgccagccactcgccacaggtcatcggcagcctgcaaccgggcgaggtcatcctgctgaataaccatgacggctctcatccaagagcaacctatggcctggactccagcactattctggaagaagtcatgggcgtactgcagcgcgagcctgaaattgaagaactgctcgacgagctattcagcacactggaaaacgacgagcttgaaaaagccagactgcagcttgatgcgttaaaacagaaagcgcccgatctgcccgagttcgcaggtgccgaagcgttgctcaaacgcaaggagctcattggacgatga

SEQ ID NO: 86199 - DNA, 684 bp, Pseudomonas savastanoi pv. savastanoi NCPPB 3335
atgagacgcgttatcaagggaactgagcctgcgtcactcaccgaatggaaagccagcgcaaacgaagactggacgcccacctatccaaccctgcagaacccgcaaaaacgcgacttgcataattgcttgctgcaagagcagaacttctcatgctgctattgcggcagggaaatagagcttgatagcagccacatcgaacatttcagaccgcaggatcattatctgccattggcactggaatacagcaatcttcatgcgtcttgcctgcgcgagaccacaccaggaaacccgttgcactgcggccactataaaggcaactggttcgatgaggacctgcacatttccccgacagaggacgattgcgaacagcgcttccgttatctgctaacagggaaaatccaaagcacgtcccacacagatcttcccgccacgacgatgatcgaaaagctcgcactcgatatcgcgtacctgacaaaaagacgccaagaggcaatcacgcgcgtgtttgatgagcaaatcttagccagcatcagcgacacagagttgacacttttggtacaaggcctccgctctggggatgccaacaaacagctcgcctttagccacgttgtcgcccgctatgcggagcagtttctggcgtctttaaaccctcctcccgaaaaaagctcggtcaagaatacgtga

SEQ ID NO: 86200 - DNA, 1548 bp, Acinetobacter haemolyticus ATCC 19194
atggaaaatacattaacccacttagtcgcgaatgcgcacgatgaacaatttgattcggcatatcaactttttattaactattataatggtttaaataaatttgataaaaataaaagtgaggctgaaaaatatttcagattggctactgatttattccaaagagaatgttttttagaaaaaatagaaatatgtaattataaaaaaattagaaaattaagaataaattttgaaaaagaattaacagttataattggcgataatggcgttggtaaaactacaattttagatgctattagaaaaaatatgatgtggatttcagcgagtattcgtaaggataatgcgtctggaggaactatatcacctgaagaagttaataaccaatcacttacagatatagctggaacatatattgactgtaattttaatttaggaagtaaaaatcaggttagaggactaattgctagagcactagatacctcagtaattcctttgaaaagtgaattgactaattatagagatataggtcaaaaaattagggaactgaatgattataaagctattaattttccattatttgctttatatggagttgatcggttatctgagagaaaattttccagttcggatctagtatttaataaaattgatgggtatgaggaatcattaaataaaggtagtaattttaatgtttttttagaatgggtaatccaaattttaaaaatatctaaaggtactctttctgaagatcaagaattattattgcaagacattcgagcgttagaattaggaggtgctagcgatagtttgagtcctttaaattctatgtatttaaaattaaaaaaagcttttgaagagaaagctatacaacaatctaataatgaagcgaataaaatattaaataatatcaatttagtatatcaagagatttatgaagatttcattggattagagttggttaataatgatgatggaaaagataaagtccaactgattcttaaagaagacagcttttttttacatcaattgtcggatggtcaaagagtgtttttggggcttataggagatatagctcgtagattgatattactaaatgataattcagatcatcccctcatgggacaggggatagtgcttatcgatgaaattgaacttcatttgcacccaaaatggcaaaagaaaattatacaagttttaagaaaatgctttccaaaaattcaatttatagtttcaacacactccccacaaatactaggagaagttcagggtaagcagctaagaattcttgaacttcaagagtctagagaaattgatgttattatccccgaccaatcatacggattgacttcaatcgaaatattagaggaattaatgggaggagaaggtcgtaactcaaatgttaaagaaaaaatagaaaaaatatttaagttaattgatcgagaagaatttttactggctgaacaggaaataagtaaactcgaattagaggtaaatggagaaattccggagctagtagaagcaaaaaatttaatttttatgatgaaagaatag

SEQ ID NO: 86201 - DNA, 642 bp, Acinetobacter haemolyticus ATCC 19194
atgttaaatattactagacttccagaaccaccaagcttgattgcttatcgccaacaacctaaggctgaatatgatgggccccaatttacgccagttaaaaaagatataagaacacaattattaatttcgcaaggttatctttgtgcatattgtatggaacgtattattgatgatcagtttcaaactaaagtagagcattggaaatgccaagacaattatcctgaagctcaacttgattacaccaatatgttcgtagtttgccttggtaaaactcaaaataaccaacattgtgattcatcaaaagggaatcaggatttaactattaatccagctaatagcataaaaaaagttgaatcatttattaaatatacacgtataggggaaatatatgttgatgatgatgacgacatatccaaagatttaaatgctaccttgaatttaaataatgatcgattaaagcgtaatagaaaggctgtctatgatgctattaatactagattgtctaaaataaaagggactgccacaaaaaaagacttagatgatttactgcagaaatacagtcaatcaaatgccgattttcataggattccacactgtggaatagcaatatattttcttaaaaagagactttcaaaaatttga

SEQ ID NO: 86202 - DNA, 1398 bp, Escherichia coli MS 45-1
atgagaatcgacaaactgtcactgcttaactttcgttgcttcaaacagctcgatatcacttttgatgagcacattacgattctggttgcaccgaatggcgcgggcaagacgacagtgctggatgcggtacgcctggcgctgttcccctttattcgtggttttgatgccagcctctacgtgaaagataaatcactagcgatccgtaccgaagacttacgtctgatttaccgccaggaggcactgaacatggaaatgtcgtctccagccaagattacagctaccggagaatgggcaagcggaaaaacggcaacctggatgctcgataaacgaggagaacagccgccacatgaagataagatggcggcgcagcttacccgctggggtgagcaactccagaaacgagtacgtgaagagcatagcttgcaacaagttgaacttcccctaatgctttatttggggactgctcgcttatggtatcaagaacgttatgaaaaacagcctactgagcagcgcctggataatagtgccttttcacgtttgtccggctatgacgattgcctctcagccacatctaactataaacagtttgagcagtggtatagctggctatggcttagctaccgtgaacatcaaatcacacaacttgaatcaccttcagcaaagttaaaagaaggtgttcgtgttcaacggatgaaagaagccattcaggctatccagcaggccattaactgtctgacccagcaggtgacaggctggcacgatctggaatacagcgccagccataaccagcaactggtaatgagccatccgcaatacggcaagatccccttatcccagctcagcgatggcttgcgaaatgccgtcgcaatggtggcagatatcgcatttcgctgtgtcaaactcaatcctcatttacaaaatgatgcagccttaaaaacgcagggaattgtgctgatcgatgaagttgatatgttcctgcaccctgcctggcagcagcaaattatccagtctttacgcagcgcatttccgcagatccagtttattgttacgacccatagcccgcaggtgctcagtacggtaaaacgcgagtccattcgtctgcttgagcaggatgagaatggcaacgggaaagcgttgatgccgctcggagcaacctacggcgagccgagtaacgacgtgctgcaaagtgtaatgggcgtcgatccacagcctgcggtgaaggagaaggcagacctgcaaaaactgacaggatgggtggatcaggggaaatacgacgagccgaaaacgcagcaactgatggtcgcattggaagttgcgttgggtgagaagcatccacagcttcaacgcttacagcgcagtattgcccggcagagactgctgaaagggaaagcgcaatga

SEQ ID NO: 86203 - DNA, 732 bp, Escherichia coli MS 45-1; identical to SEQ ID NO: 86109

SEQ ID NO: 86204 - DNA, 1359 bp, Escherichia coli MS 21-1
atgatgaatatccgcacgcttaagctcactaatctggggcggtttgaagaacttgacgttcatctggctccagtggaggagttcaagagcaatgtgaccgtttttattggtaataatggtgcaggtaaaacatcaatattaaaatcgttggcaaccagcctgagttggttcgttgcccgagttcgtactgaaaagggtaacggtagccctattcctgaagacgctattctgaacggtaggagttcggcgacaattgaacttcaggtactgaatacgcatccagcgacggaggccgctacgccctaccgttggttgcttgccagaacggccagtgggaaaaaatcgaccaccgcctccagcctgcaagaggccagccaattggctgcgttttatcgagatcaatacacccagaatagcggggcatccttcccgcttatcgccttctatcccgtagaacgtgtcgtgctggacgtgccgttgaaaataaaagaacgtcataattttttgcaactggatggctacgataacgccctgaatcagggtattgatttccgccgtttctttgaatggtttcgcaatcgcgaagatgcagaaaatgaatcaggcttaccgcaagacgttctggataagctcagtaccaggatagatctcgataacaccgtcttaaatgcattaacggcaatcatggcctcgtcccgggatcgccagttgaccgccgtcagaacggccattagtcgctttatgccagggttcagcaacttacgcgtcaggcgtaaacctcgcctgcatatgtcgattgataaaaatggccagacactgaatgtgctgcaattatcgcagggtgaaaaatcactgatggcgttagtcggcgatattgctcgccgcctggcaatgatgaacccgatgttagaaaacccgctaaacggcgagggaattgtattaattgatgaagtggacatgcacctgcatccaacatggcagcgtacaatcatccagcgtctgacgacaacattcccacattgccagtttgtcttaacaacccactctcctttagtgatcagtgattgcaaagatgtgctggtttattctctggatgatggcgaattaacgcagctcccgtctctgtatgggcaagatgcgaatactgtgcttttgaatgtgatggatacggatattcgcaatgcgacagtggcagaaaaacttaacgatcttttggatctgattcagaaaaacgactttatcaacgctaacgctcttctgaatacgctaagcctggaacttcctgaaaaccatcttgaactggtgaaagccagaatgcttctgcgcaaacaggaaattaaacatgcgcgaaataactaa

SEQ ID NO: 86205 - DNA, 660 bp, Escherichia coli MS 21-1
atgcgcgaaataactaaagggcaaccgccggccagtttgcaacagtgggtgagagcaaaaccacgggataaaaatgccaatcagtggtttcaggaactttatgcgcaaaaaaaatgggatatcgttggcgatctcagccagcagtgcgctcaggaacaattttatctctgtgcttattgctgcgatcgcgtgacaggtacaaaccgcgataccgttaatgaacatgtcgaagccagggatttagctcctgctcgcagtctggaattcacgaatatcgttgcaagctgcaaaacaaaaggccagtgtgacgactcgcataagaaccagccattgctgttaacgccgcttatgccggaatgtgaaaccgagtttatcttcaagatcagtggtcgaattgaagggacgacgccgagagctatcgatgcgattaaggtactcaaccttggcgatagtgaacgtaataatcgggcattaattgaaaaacgtaagcagctttccgacagccttctgtgggctaatggcattgacccttcagaggggcttgaggatgacgatctgctgcaagtggttatcgacgaattactcacccccgtcgacggttatctggcacctttcgctcccgtggtggcgaatattctaaaaaactggatgaccgcatga

SEQ ID NO: 86206 - DNA, 1398 bp, Escherichia coli MS 153-1
atgagaatcgacaaactgtcactgcttaactttcgttgcttcaaacagctcgatatcacttttgatgagcacattacgattctggttgccccgaatggcgcgggcaagacgacagtgctggatgcggtacgcctggcgctgttcccctttattcgtggttttgatgccagcctctacgtgaaagataaatcactagcgatccgtaccgaagacttacgtctgatttaccgccaggaggcactgaacatggaaatgtcgtctccagccaagattacagctaccggagaatgggcaagcggaaaaacggcaacctggatgctcgataaacgaggagaacagccgccacatgaagataagatggcggcgcagcttacccgctggggtgagcaactccagaaacgagtacgtgaagagcatagcttgcaacaagttgaacttcccctaatgctttatttggggactgctcgcttatggtatcaagaacgttatgaaaaacagcctactgagcagcgcctggataatagtgccttttcacgtttgtccggctatgacgattgcctctcagccacatctaactataaacagtttgagcagtggtatagctggctatggcttagctaccgtgaacatcaaatcacacaacttgaatcaccttcagcaaagttaaaagaaggtgttcgtgttcaacggatgaaagaagccattcaggctatccagcaggccattaactgtctgacccagcaggtgacaggctggcacgatctggaatacagcgccagccataaccagcaactggtaatgagccatccgcaatacggcaagatccccttatcccagctcagcgatggcttgcgaaatgccgtcgcaatggtggcagatatcgcatttcgctgtgtcaaactcaatcctcatttacaaaatgatgcagccttaaaaacgcagggaattgtgctgatcgatgaagttgatatgttcctgcaccctgcctggcagcagcaaattatccagtctttacgcagcgcatttccgcagatccagtttattgttacgacccatagcccgcaggtgctcagtacggtaaaacgcgagtccattcgtctgcttgagcaggatgagaatggcaacgggaaagcgttgatgccgctcggagcaacctacggcgagccgagtaacgacgtgctgcaaagtgtaatgggcgtcgatccacagcctgcggtgaaggagaaggcagacctgcaaaaactgacaggatgggtggatcaggggaaatacgacgagccgaaaacgcagcaactgatggtcgcattggaagttgcgttgggtgagaagcatccacagcttcaacgcttacagcgcagtattgcccggcagagactgctgaaagggaaagcgcaatga

SEQ ID NO: 86207 - DNA, 732 bp, Escherichia coli MS 153-1; identical to SEQ ID NO: 86109

SEQ ID NO: 86208 - DNA, 1251 bp, Escherichia coli MS 57-2
atgctcaataaaagcaatgtaataaaacatatacatgtgttacttcctgatacaaataagaacataaatataaatgttgatggtaaaaatgtcataattacaggggggaatggatgtggaaaaactaggtttttaaaactactatatgagcaggtgtctgctcaaatagaacagtatgaatataaaacatatgatcaaataaaacaagaaatatcaaacagacaaaattggatgcaacatacacctccgacggatagaaattatttcagttggaaacaggaaatagctgattatgaaaaacagttaaaaaaaatgagagatatacgcattgaactagctgatttaaataaatactgtatcgatttcaatgagagaaagtctttattacgctatttcggcgctgtaagagaaaataacatatctcattcaggaactattgacagtttaaaaactttaaaggatgaggagatttcagttagtttatctcaggatacaagcaataaatttgaacgttatttggtttcgttttataactatgggagtcatttaattgctagagagaatgataaagttaaaggggataaggtagattcttggttttattttttacaaaaacaatttcggtatttatttgaggatgattcattaaagcttaattatgatgcggaggagcaaacattttatattttgcaggataacaaatctccttatagatttaatcaactttcatcaggctatcagtctattttaagtatatatgctgacttattgatgaaagttgaacttaaaggtatcacatctgatgagttatcgggggttgtatttattgatgaaattgatgctcatttgcatgtttctttacaacggaaaattttctcattttttgtaagtgccttccccaatatccaattcattgtcacaactcattctccttttgttgttcaatctgtgaatgatgcgataatttatgatctaagcacgaatgaacaacttgaagatctatcaatgtattcctatgaggcaattgtcaaaggtttacttggtgtcgatactcaatcagacctgcttaataagcaattagataaattagcattgttaataaatgatgatattattgatacggataaattacaagaggttgtaaatagcattcaaccatatgaaaatcaattagatatgagatcaagaacatttttattaatgggtaggaatgctcttttagatgcgaaagatgcaactgaaggagaatga

SEQ ID NO: 86209 - DNA, 666 bp, Escherichia coli MS 57-2
atgttcaatgttgcgagaacttatccagccccggactgtatttcccggaatcgttataatgatgcagaagttactgaaattctgaaaccattatttcacgaaaaatgttatttgtgtgagcgaaatgaagttcaagatgctgaagtggagcatctcatcccacatgaaggtaatgacaatttaaagtacagttgggataatttattttattcatgcagtagatgcaatgggataaaaggtaatagacataaaaatattctagattgtaccgacttatctattaatatcttcaaccagataatttgtaagatgccgtcaatgcccgatgatgatgtcgttattcttccaaatgtaaatccaccaactttaagcatagtcagcactgtgggtctattaaatgagtgctataacttgaagaatactggtcttagaaaaataagtagagaaagtctcatcgaacagatgtttttttattattcaagatttattgaggctaggatgacactcaaagatcccagtaaaggtaactctagaaagagagatgccgaggaaatgctggaggcaatgttgaagactgaacatccattttcaattttctggcgttggcattacttgggggatggtttcctaacagcaaattatcccgatttaagagttggtttttaa

SEQ ID NO: 86210 - DNA, 1407 bp, Bifidobacterium bifidum S17
atgacgaactatcggaagtttgggggccgattcagtgccgatgccaacagcaacggcgggcattcagatagcatggttccagggctgaccgttgacttcgacaggcaaatgaccgtattggtcggcgaaaacggtgccggaaagaccgcggtgctggatgccgccgccgtggcgttgggcacgttcctgaaagcgtttccagaggtttccggattgcggattcaagggagcgatgcgcgccgcaaatattattcacaatacggggaaaccgatatccaagagcagtttcccgtcagtatctatgcgcaagcggacatcgcgcagccggtgcagtggagaacagtgcaggaacgagggaatccgattgctgttcctatcgaatggcgacgggaactgaacagtgcgaacgggagcaccacattttccaaggcgtctcagatatgcagtttgtcagagatgtatcagaagctggttcaaatggatccagatgcggtgcttccgctactggcctactatggcacggatcgattgggactgcacggcagaatgacgggaaaggcaagagcatccgctttcaaaaatcgttttcgcggatatgatagatgtcttcaatccagtctgaattacaggcagatggatgcttggtggcgcaagcaatatgaccggtctctgagagggtatgacgtacctacctaccgcgcagtatgcaagaccgttgaacggtgcttggagacgcttctgcgcgagaatgggcatgcgactgaggcccggctcgaatatgatttcgatgatggtttgcgactgagctacacggattccgatggagtgcgcttggagagcatgccgctgtggaccttgagcgacggataccgcggcgtggtgggactcgtgtccgacatcgcatggcggattgcggcgctgaacccgttcatgggcgattccgtgattgattggacgcccggcgtggtgcttatcgatgaggtcgacttgcatcttcacccgaaatggcagtcctgcattcttggcgtgctgatgaagtcgttcccgcaaatccaatttatcgtcaccacgcatgcgccgatggtgatctcctccgtggcatcggacaggttgcgcgtcatcacgttggatgacaagaacgatggaatctatcaggcggtttccccaagaaacgagacatatggcagcagtgcgagcctggttctgcgccatgtgatgggatctctggacaagccgcggaaagtacaggatctgttcgaccgattctcccggcagatggatgccgatgagttccccgaggcgaaacagacattgggggagctggagcgaacgataggcgctgacaatcctgatctcagcggtgcccgttcctcgtatttcttctatgccggggaggtgagggactga

SEQ ID NO: 86211 - DNA, 840 bp, Bifidobacterium bifidum S17
ctgatgctgtacgtggacaaagacaatgcgcatccgccgagcattgagattgccaaggcgaagcgtgtgctgaaaaacactgatggcgtggaggtttgctatgactctctgggacagcttcaagaggcatctcagttaatcccccacttgtgggatagtttgggcgccgatcagggatggctgtgcgtttactgcatgcggtgtatagcggtgcagccggtgagtggcgtctcgcggaagatgcataacgagcactatattcctcgtcatcaggactacgagggatacgaagaggcaagacgacatggcaaggaggcggagctgccttaccctcaatatacgcaggctgatcttgaccgtcactctctggattatcgcaatctgtttgccgtatgcgatggaaaatatcagaaagacgaaaaggcgtcagcccgagacggacatcgtgccccgcatcgtaaggaggatgaggaaagcagcggccccaaggtgacatgtgatacgttgcgaggcaacagcaagctgaccgttgatcccaggaggaaagaccacatcgattcgttgagttacggcaaatttgacgctacactgagttcatccattccggaagtcaacgatgatatcaatgtgcggttgaatcttaactatcactggttgaaagaagaacgtgcgatggcgctggttggcctttaccaatggtttgaaaaaaatgcgtcggcgcgggatttcccacgcaagtgcagggagagactgcaggaacttcaacaaggcaaggacggcaagttgcagccgttcgcgcccatgttgatatgggcgttgacaaaacgaatgcgacggtaa

SEQ ID NO: 86212 - DNA, 1167 bp, Faecalibacterium cf. prausnitzii KLE1255
atggaacattttattacaagcatccacatcaatgaagtccggcatctgaaaaacattgagatcaagttgagccctgaaaagcgccagcatcttatcctgaccggtaaaaatggctccggtaaaacttcggtattgcaggcgatgaaagattatctgcaggcaatcgatgatggggtctatcagaaattgtgtattcggagatcctataaatcgaatgataagttttctgaacttgaaaaaattgttgccgaaacatttgcaaagtataattctggagtagaagtagacgtttcaaatgtagtaggcttagaccgtttatatagtcagggagaatttgtaactgcttactttccggcagacagaaagacagtgattcatcgcgcaaagggagttcaagatgtaaaactagaaaatcaatacagtttggatgatacaccagaaaatattttgctgaaatatatggttcatctcaaaactcaacaggcatatgcaaagaatgaaaatgatttaagtgtcgagaagaaaatcgcggaatggttttcccgcttcgaaaatgcgctaaaagtattgttgagcgatgacagcatccgattgatatatgactataaaaactataattttctaattgaacagaaaggtcgaaatccatatagtttggatgaactttctgatggctattctgcaatcatcggtattgtcgcagacctaatcctccgtatggaccgcaactggttgctgaaaggcgaactgagccagtacgatgtggaaggcattgtgctgattgatgagctggaaacgcatcttcatgtggaacttcagaggaaaatcctgcccttcctgacagagttcttcccacgcatccagtttatcattacaacacattccgcctatatcctgaactccatcagcaatgcctgcatttatgatttagaaaagcaggttcgttttacagatttttcttcctattccgttgatgatattgcagaaggctatctggatgcaacagctttttctgatgagttacaaaagaaagcaaagcgatatcaggagctttatgggcggacggacctttccgatgacgaacgcgcagaacgcgcagacttacgaatggaattgaaagatgcggaagatgtcctttccaagattgaggggaagaaggtgctttaa

SEQ ID NO: 86213 - DNA, 462 bp, Faecalibacterium cf. prausnitzii KLE1255
atgttcgattgggaaaatctgtttttatcttgcaatcattgcaacaatataaaaaacgataagttcacaccgattctggattgtacaaaagttgcagttgataagaaaattgcatttcgtcggcatagtgaaccgtttatgccagataaattagaaattactgcattagaagacgacgttgaaacccgaaacacggtggcactccttaacgaagtatattatggctcgactgcacagaaaatcgaagaggccaaaatcatccgaaagcagctgtcaaaagaactgaatgcattcgaagaatgtgtaacggattacaatgcagctgacggggaagacaaaaaagatttagagctgtccattatgatgaaattaaagtggaatgctccctttgctgcatttaagcgctggatgattcgtgatgccagtgataaatttccagaattactgaaatactgccaataa

SEQ ID NO: 86214 - DNA, 1869 bp, Mucilaginibacter paludis DSM 18603
atgattatgaagttagaaagaattgagataaaaaatttccgcggcattgaagatgctactattgagttaaatgatcaattaaatctttttgtcggtatcaacggttctggtaaatctactattcttgatagtattgtaatctcactttcttggttggttgcgagaatccagcgacagaatgctccaggaaaaccaataacgctacaaagtattaaaaacgatacgccattttcgtcaataaccgcgaagcttatagaagcaggtaataagtttaattggcggatagcacgagtacaaagtggatcattgctgcatgaaaagtcagatttgggagaggtgtcatcacttgcatcattttatattcaagaacatgatttacagcaatcgtatcctgttattgcctactatccggtaaaccgtattgtcggtaatgctactgtggatattagcggccgtgaaagtattgcttcattagatgtttatgaaaatgcgttaggagggcaaacaaattatcatgctttctttgaatggtttcgtttgcaggatgatattgcaaatgaacgagcaaattcgcgttcgaagtggatggtcagtaacagttcttggataaacaaaaggatagataaattattaggctatcttgataaattgataccgccggaaaatgtagacgaagctgaatatatgaaaagaaggctcaaagatcgctttcgaagacttgaacccatgtatgaagacgcaaggtacttccttcatgaactaagtgaccttttccattttgcaatataccgaagcaagaatgaagaaggcttgggttctgcgttccgtgaaattgattttatgctgcatactatgtccaaattgtctgattctggtaaagacgatttgatcgaatttaacgactatcctatcggaattatagaggaagtgctgcaacaattattcaaactacatgaggagaacgaaatatcaaaatatcgaacacaaataactcattttatatgggaggcacttttgttctccagccaattaagcctatggtggctaagtgataaagccagaaatgaaatcgaaacattgtttgtaaaaaacaatcctgcaagactacgtagcggtatcgtaaaaaataatacaagtgaattcatggaaaacctcgaacggataataaaaaacgatgttgagagggtgcagaatgcctatcgtaaccaaggacgggaactgttttttgttactcgtaccattgagaattttgtacctggttacagtaatctacgagttcgtcgagttcctcgaccgcatcttttgattgataaagacaacgaatccattagccttgatcaattatctgacggcgagaaaaatttgattgcgatggttggcgatatagctcgtaggctttccatggccaatccctatagcgaaaatcccatggcgggtaaaggtatcattctgatcgacgaaattgacttgcacttgcatcctggctggcaacggctaatgattccaaaactaactgaactttttcccaactgtcaatttatagtcaccacgcattcgccacaggtcataagccacactaaagcagagtctatgtttattttacgtgtggaacataataaggtaaaattttcaaaagctatcgaatcctatggactgaatactgacaggattttggaagatattttaggcgtggatgcccgaccgttgcacgaaaagaaaatgattcaatcagtctacttgaatatccagcaaggtcatattgatgaggcgcagtcaattataaaagacttacttaagctgattggagaagatcctgaattgctaaaggcccaaacgctcattaaacggcgcgcgataatagggaaatga

SEQ ID NO: 86215 - DNA, 645 bp, Mucilaginibacter paludis DSM 18603
atgaaacatattataaaatcgcctgaacctcaagcgttaaccgattggaaagcacaagacaaaaagtatattaaaggattaccgaatttcgagaggattaaaggtctctataggagacccattttaaatagtcttcgtgtagatcagggtaatatttgctgttattgcgaacgtactttgaaagacggagactgccatatcgaacatcttatgccacaggagtactatgaagaatattcatgtgaatatgataatatgctggcatgttgccagcttaatttggccccaaaagaacccaggcattgcggtgttagtaaaggcagttggtacgatgaccaacttatgattagccccctgcaagccgattgtgaaaccaaatttatgtacacagcggatggacgtatttatccgtcaattgatgatgacgaagctgcagatctaactattctgcattgccaattaaatatagaccgattggctgccgagcgagggaaaattgtcgaaacttttattgatccaacactttccgaagacgacttaattcagtatgtcaaaaattatctcgcagggaaggaagcaaataacggaagttataacccattttataccacaatacaatatctgttcggtggctttattatttga

SEQ ID NO: 86216 - DNA, 1332 bp, Mucilaginibacter paludis DSM 18603
atgtgggtagaagagatttctttggacaatattaagtgctttgaaaagcagaccattaaattaggcacaaaaaaagaaccatatccctggattaatctgttaggagaaaatggtaccggaaaaagcaccatattacaagcgttgtctttgctattagctggccctgagggagctgcacagcttctaaaacctgatggatggctaaaagataattttaaaccaggaaaaatgaccattgtattacatcagggactaaatgatcctggacagtatggcaatgagaaaaaagagcggaaaatgtttagatacactttttatgttacaggaagtgaaaaactgacaataaataacaaaacatttacagagcctataattacagaggataccaatagcagagttataccttggttgagggaaaatgctctgttgccaaaagggaaagggtggtttggtgcaggatatggagcttttaggcgactcactcgtgctaataggatattagtaccttccctgcaaaccccattgcgctatacaaactttttcacgcagtttagagaggaccaagcgttagaagcgtttgaaacttggatggtatatctggattatagaatatcaaaatctgatgattcaatagcaaaaaaacaaaaagagtggggtattaaggcaattaataaattactaccagagggaaattcatttgattctatcgacggtaacggacggatttggtttaaagtacaaggttcaaaagtttccaccgtagcattgtctgatggttttagaagcgtattagcacttgcaggagatttaatttggagattaattgaagcatttccattgagtgatgatccgttaaatgaagagggggttgttctgatcgatgagttagatatacacctgcacccgacatggcaaagaacaattgcaggtttgttgagacaaacttttcctggaatgcagtttattatggctacgcacagtccactaattgctgccggatctggtgaagatgccgttacataccgtttttatcgtaaagataataacactattgtagaggagataaaaaacattcatgcattaagtgtcgacaaaattctacaaagtgaggcatttggactgatttctcctttttctcctgagacgcaaaataaattagacaggtactttcaattgaaaaaaaagaaaacacttaataattccgaacaaacagaattggatcttgcgatcccattagtgagagaggctttaggtgagctgcctaatgagaactcattagattttaaagttcaggaatttcttatggataaattaaatgataaaaataaatag

SEQ ID NO: 86217 - DNA, 672 bp, Mucilaginibacter paludis DSM 18603
atgataaaaataaatagaacaggaaaaccatctgttttacaaaagaaggaaactatttgggtagaaaaaatcaaaaatgcctcatctgcggatgaacgacataaagctattagcaaataccgccatcctgagataaaagcatttttaagcgaaatgtttaatggaaaatgcgctttttgtgagtcttatattgaaaatgtcgactatggtgatatcgaacattttaaacctaaagcaaaatttccttacgaagcagtaatttgggagaatttgctattgtcttgcaaaaagtgtaatggtgccgggcagaaaggagacgagtggccattagaaagtgagggaggattgttaattaacccttgtgaagaggatcctaatgattttttttcgtttgagtttgatgcagaaacccttgtttcgattgttaaacctaaaaataaacgtggagagacatccgaaagaatttatggactaaataagcaaacactaattaaggacaggaatcaaaaagtaagaatattcgtcttcttagcgagctattataatattgatccgagagcaagaacttttttagatgaatttatagaaacttcaggggaatattcggcctttgcaaaaatgattaaagaaaaatacgttgataacgcttctgagaataatcaacagcgctga

SEQ ID NO: 86218 - DNA, 1623 bp, Vibrio cholerae O1 str. 2010EL-1786; identical to SEQ ID NO: 85886

SEQ ID NO: 86219 - DNA, 618 bp, Vibrio cholerae O1 str. 2010EL-1786; identical to SEQ ID NO: 85887

SEQ ID NO: 86220 - DNA, 1398 bp, Escherichia coli B7A; identical to SEQ ID NO: 86108

SEQ ID NO: 86221 - DNA, 723 bp, Escherichia coli B7A
gtgatcaaaactcaacgtgggaccgttgccttactgaccgcacatgaaaacccaccacaagatgctgatcaatcaaccaggcgctggcgaaatttcagaagagataaagccgctgtaatggtccagctcattaacgagcagtatcacctttgttgctacagtgaaatacgctctgatcttcgtggtcttggttatcacattgagcacgttgagaataagagccagcatccagaacgtacttttgattatcagaatctcgctgccagtgcattagattcaggggagaacggcggtttatcttccctgaaaggaaaaaatgcttttggcggtcatgcccaaggaaaacaagatgttgtagatatggcaaaatttatccattgccatattcgcgattgttcccgttattttgcttacctttctgatggtcggatagttcctgctgatgagttaaatgcacaagaaacggagaacgcgcaatacactatcgatctactgaacctgaacagcggattccttcaaacggaacgtcgtaatcattgggaagagctggagcagctttttgatgaacacattgaaaaagattgggatttgcagcaattactccagcttgatttggttccaacaccagaccataaactgcatgaattcttcagcattacacgccagtttttccagcaagaagctgaacaggtattacagagccacgccccagcattaatttaa

SEQ ID NO: 86222 - DNA, 1182 bp, Yersinia intermedia ATCC 29909
atgaaaatacaaaaaattgatataaaagatattggtggtataaaaagagctattatagactttgatgaatacatgaatattatttgtggtccaaatggaatagggaaaactacaattttagactctgtggcacatagctttatttctacaaacagcaatgtcctcaaaagacatgcccaatctactaatggtcagataaatattgttttaaatgattgcgatagcatcaaagaaagcaatatttcttttgagaaatttgatcctgaggatcactcttatattaatggattgggtcaagcaggaaggaaagtaatttatttgaatatctctaggatgttcaagtatgtatctttatctaatatttctaaagatgaggaaagacaagaacatagcatatattcacttttgacaaatgggatttcggttgcggatatgaaaaattggttcgcaaaacgctgtcttttcgttaatactccagatgctttgagtgataataacaaaattaatttggagttggcaaaaaaatgtttttcattgctcaatgttgaatatagtttttctcgtgtggatgcgaaaaaattcgatgtcttcgtatgtactccaaatggagaaatttggtacgaatatctatcctcaggatttaaatcatgtctgagtattttattcggcattatcaaagagattgagctgagaatgtcagatgatgattgtttagcgcaagattttgatggcattgtgttaatcgatgaattagaaatgcatcttcatcctgaatggcaatccaaaattgtttctgttttgcgaaatacattccctgcaacacaattcatagttactactcatagtcctcatgttatacaaaatgcagagcctaatcaaataattgcattagggaccgatagtaatggatttacttatgtcagagaacttccaagtaatgaatttggttatactggatggacattagacgaggttcttaaagatgtaatgggaatggaagataccagaagccagaaattaaaaaatatgcttgctgaatttgacaaagccattgatgaagaaaataaaattgaagcagaaagtatttatagagaattagatatggcacttcatccatcaaatgtacttagaaaaatgcttagcattgacctttcctcaataagcgaggaggttgaaaagtaa

SEQ ID NO: 86223 - DNA, 747 bp, Yersinia intermedia ATCC 29909
atgattaagctggaaagaaactttacacctctattcttttctccgcagaatgttagtcgtttaactgaaagatttaagaataatggttcacatgtatggcatcatgatgatgtaaaaaattcgttgatggaaataagtgataaaaaatgtgcgtattgtgaggtaaaacttggtgaaaaaagtacttaccatgaggtagagcattttaaggataagaatgattaccccgatgatgtaatagagtggaataatctattaccctcatgtcgtcattgtaatagttcgaaagggactcatgatgttgtccatgaaccaataattaatcctttcaatgatatcccagcagaatatttttatattaaaaattttagagtaaaaggaaaaaatggaattggcactttgactatagatgttttaaatcttaatgatagagaacatttagtaaaaccacggtgtgaaacaggaactataatttcggaaaaactagaggattctgtggttttatttgaggagtatatttcaaatccaacaaatcagaagaagagaaaattaatcggtactgttagaggtatactgaatgaatgtcaaaaaagtgcaatattttcggcagtatcggcgacaatattacatacaagtgaagactatctaattatacgagatattatgaaggctaataatttatgggatgaagatatggagcaacttcatctcatgtcaagaagtataaaattaccgactaaagcctaa

SEQ ID NO: 86224 - DNA, 1287 bp, delta proteobacterium MLMS-1
ttgtcgattatgatgcatattactaaaataacacttaaagatgttcgttgttacgaagatgcagaaattgattttgggacatcaggaacaccgatagtaatctgtggtaataatggcagtggcaaaacaacattattaagaagcatagcattaggattatgcgatcacatcagtgccggtgctctcttaagagatctaccaggtgatttcataagaaaatcatctgatgatataacaacggataaaaaagctgtcattgttatcgaattggcatctgaatctggaagggacacttatgcgatcacaacaactttcaagacacgccgaggtgttggttttgaatgggtagagactaaaacgaaaattaatggggtatcgaagaaagaatacgaatttccatggcagaatatttttgtcaccgcatatggtgcaggacttagaacaatcggatcggaagattatgcccagtatttggccccagatgcagtttattcacttttcgactattcgtaccagctacacaaccccgagttggcatggaggcggcttgtcgaggtaggaaaaaacaaaaaaaggattgataaattaattaccgataccctaaaagatattctttcattggacaaggaatcgtctaagatcaccttagagaataatggaatatttatagatagttcctgggggaagcaagaattagatgctctaggtgatggataccgagcgcttgttacactaactctcgatattttagcatggcaactattagcaaaaaatcatgaattaataatcgagtcttatgactctaataataaatcaacaagaacaataaaaacttggaagtcgataacagatttcaaaagactcaaaggaattgttatcatcgatgagattgaaaaacatcttcacccaaggttgcaattacaggccttgaaaagtttgcgcgcacatttccccaatattcagtttatcgtttctacgcactccccccttgtgatttctagcgcggttgatgtccctacggttttcatagaccaagggcatattggggaaaagaaaaatttggatggttggcttgccgaaaatatctacctgcagatggggataggcggttctaggccggaagagactaagcatttgataagcgattatgaaaagctattcagaaaaaatttaaaaaaaccattgcagggaaatgagttgaaaaattttaacctcctaagaagaaaactaaaagcactcccaggcaccgacttgactcttttagatattgagacaaagcatttataa

SEQ ID NO: 86225 - DNA, 696 bp, delta proteobacterium MLMS-1
atgagaaatgtaaacagagtggttgcgccccaatcatttcgaaatgaagcaacaaaatgggcacaaaaattacgatctaaactcaaaacaggcaaagcaactgatcactatttcggtcaatacaatcaaaccagcaaaaagcacgtaagaagtgacatggaagacagcctgttggccatgtatactaatatgtgttgctattgcgaggctagaacagagaaaaaacaaggagaaattgagcacctcaggcccaagaaaagatacccggaaaaaacttatgactggggtaatttacactgggcatgtgctgactgtaatggaatcaaacttgagaaatttgatgatatcaatccgatcctggacccttctgagcctgagccaatcacgcagcacatcgaaacgcaaattgatgaagataatttgtggatctggctgtttgaaatcaattcctcatccagaggaaacacaaccatagaacacgctgatctaaacagagaacttcttaaacgcgcgcgcatgaaaatttatctaaaaacacttaaactgattgatgcgatcaagaaaaacaatactggcgcccagaaattaaaaatgaacaaaatatcattgaagaatctctataatggcgaatttggttttgccacaacagttaaagctgctttttccaacgctggatttacgtacaatgaaatttag

SEQ ID NO: 86226 - DNA, 1623 bp, Vibrio cholerae 2740-80; identical to SEQ ID NO: 86122

SEQ ID NO: 86227 - DNA, 618 bp, Vibrio cholerae 2740-80; identical to SEQ ID NO: 85887

SEQ ID NO: 86228 - DNA, 1560 bp, marine gamma proteobacterium HTCC2143
atggctctaatatttaagaagctagaatacaatgcaagtattcctagaaaatcacttaatacagcatatttgcaaccaaataattgggatgacttccattttaaaacgttatttaaactaacgatttttgatgaggcaggagaaaagtatgatgttggcaatgtcaaaataggatatgtcaaccaagtcgcaggatggacaagcaaaaatatagagcctgaatttaaatttttatcctctgatttcttttcactaggtcaagacgaggattactacaaaaatattacgaagctaaatggtgacgataggaagcaagttctcactgctcttagggatgttgtctatgatgaaggtattctgcaactctcacttgagcatgacgtaatgaaaacatctttgctaagagaggttagtttgtcactggtttctgggccgtttagaagggttttaggtggtggtgagttattaactgactttgattttgggtattccattgctcagggttctcgtactgctgggctggatataagctttagtgttgacccggattcaaaccctccgacaaatatacatgttctaataggccggaatggcgtaggaaaaacacatttacttaataatatggttaaggccctggtcgctgaagaggaaagcgaaaaaaatgtaggtgcattttattcgttggacagcaatgaacgatctccctttagtcagcgtcaattacaggagttgttttcaagtgtggtttccgtagcgttcagtgcgtttgacccctttgagccatatccagaacagaaagacaaaaccaaaggtgtaagatattcttatgttggattaaagcgtgctacaaatcatggaggtaaaaaaggaactccaatgagtagggatatgcttacaaaggagtttctagagagcttgtcatctcttattgataagggttacaaagatcagtggataacaacaattagcgggttagaagcagatgacttatttagtgatatagatttagctggtgttgtcaaaaaatcttcagctaatgatctagatcccgaagttaaaaaaatatttaacaagttaagttctggccattcaattgttttgttaacactgacaaaacttgtggaaaaagtaaggaatcaaacgcttgtattgctagatgagccggaaggtcatctccatccaccacttttgtctgcatttataagaacattgtctgatttgttgtcacatcgtaatggtattgcaattatagccacgcattcacccgttatcttgcaagaagtacctaagtcttgtgtatggaagttgcgccgaactgggcttgatgccagtgctgaacgccccgagatggagacttttggagagaatgtaggagttctcactcgggaggtttttaatttggaggcaacagaatcgggttatcaccaactccttaaaaaggaaatggccacaacaaaatcatataaaaaaatacttagaaatttcaatggccaacttggtgcagaggcccggggtgtattgagaggtttgttgctagtatcagaagcagaggaggagtga

SEQ ID NO: 86229 - DNA, 849 bp, marine gamma proteobacterium HTCC2143
ttggtgagaattcttcctaaacctaagcaatcgcctaaagccgtatatttaacgtgtattagcaaagtaaaaaaacctgctctgaaggcaagtttaacatctgttgcagatactattgatacagatgctactgactatgatgataaggcagaacgggctcttctgtacttaattgcagaaagtgatgatgttgatggcgtggtcactcaggagcagatggagaaagtatatactggccgaatggctgctaaaaaagcacctggtagagaaatctatgacaagttaaaagccgcagcgcctcatggtgtttgtcctttttgtgcccagcgctctgttaaaacgttagatcattatttgcctaaggccgaatttccttctctcgtagtggttccatttaacctaattccatcttgttccgactgtaataaggttaagtcctctaaagtggctgattctgcagacaaacaaatattgcatccatattatgacgatgttactgctcatcaatggcttattgccgcagtaaacgaaaccacaccagctgctttttcatttgatgtcatgaatgttcaggcctttgaccaaatgctaaattcaagaatagaacatcattttgatttgctggaattggctgagttatattcttcgaaggctggtgttttacttgaagatattagatatcggcttgaagagctctatagagtgggcggtaaggttgaagtacataattatctagctgaagaacaaagttcacgtcgccggaataatatcaattcatggcaaacggctacttatcaagctatggctgaaagtgactggttttgtgatggtggatttagggggatttaa

SEQ ID NO: 86230 - DNA, 1272 bp, Nodularia spumigena CCY9414; identical to SEQ ID NO: 72170

SEQ ID NO: 86231 - DNA, 651 bp, Nodularia spumigena CCY9414
atgaagtatatcaaaaaaaatcgggagccagaaaagttttctagttggaaagctttagaaaatgatgattggaagcctagctgggatgataattttcaagcaccagaaaaacagattgtacatgatgctttgctacaagaacagggttatatctgttgctattgcggaatgcgtatcactagaaaaaatagccatatagaacatcttcagcctcgcagtgcttatccacagttggcgctggagtacacaaattttattgcttcatgtcaaggagaaagtgaagaacctcctcctattccagtacattgtggacatcagaaaaaatattggtacgatgagcgtttaatggtttcgcctctggaaatcaactgtgctgatttttttcactaccctgcttctggggaaattttgccaacagatgattcaggtaaaaaagctgctgctgaaacaacaattgagaagcttgcacttaacattaacaagctgcaaaatatgcgaaaactagcaatcgatgctacattattaggtattgaagatttaactgatgcagaaatacagcaacttgctcaaggttatgaggaaatggattctaatgggcaatatacgccgttttctgcggcaattatctatttactcaagaattatttttaa

SEQ ID NO: 86232 - DNA, 1350 bp, Microscilla marina ATCC 23134
atgaaaatcaaagagttagagttaaataatttccgtggttttaaacacctcaaaatccagtttcctgacaacaacttagcggtatttattggtaccaatggttcgggtaagtcgtcagtgttggatgctttggggatggcgtccttgtggtttttgaggcttgcgaaatggaatgaatcagatcaatacttttttgatcggtttttattgaaaggctttaacttaataaatcaagatattcgaataaatagtgatgaggcattacaagtcaagctgacagggcaacaagctaatggaattagaataagtaaatttacaaatcaagagataagcattgggagttttaaccttaaaaaaacatccattgtaaacgccaatggttccttgcctatagttgcgtattatcaaacagaaaaacatcactttttacgaagaaccaatcaaaaacatgaaattgaagagggagaggtaaatgataacaatccaatcaagaaaattcttccccaacttgctacatatcaaaatgcttttagttctaaaatttctcatgccgaagacttttcagaatggttcaaacaaattgaggatgaggaagtacgacagataagaaataagagtgattttagttatagagactttcgcctcgaagtagtaagaaaagcattagatgtttttttttctgccttaggttcagacaagtataccaatttatctgtgaaagtgaatgactcacctgtttttgagtttaaggcaagcgattatagcctcgccattaacaaaaacgggcaagactttgatatcaaccaactatccgacggagagaaaaccctcattatgctcgtgtgcgacattgcccgccgcctcaccattgctaaccctgctttagagaataaactagagggcgaaggtgtggtaatgatagacgaaatagaactacacttgcatcctgcttggcaacgcaatgtattgcctgccctacagcaaactttccctaacattcaatttatcgtgactacgcactcgccgcatgtattgaataatgtggatgctcgaaatatatttttatttcgcaacgaaaacaatcaaatcacttgtgaacagcccgattctactctaggcagagatgtcaactggattttagaagaagtaatgggggtatctgctcgacctcgtgaatttgaacctaaattaaccaaagtacaaaaattaatagaagaaggtggtaaagaaaatttaagcaaggcacgagattatattgaacaattatttcaagattttaaccttactcatgaccgagagttaaatgcaaagttagctgtcattaaacgaaaggaggtcttaggtagatga

SEQ ID NO: 86233 - DNA, 816 bp, Microscilla marina ATCC 23134
atgaagtacatcaataagcaagcatcacctcaaaagtttgaagattggaaaaagaaaaataacccaacagcttggcaacctcctgggtttttgaagaaatatttgttggaagaacaggggtatatctgttgttattgtggcatgagaatatttgataatcattacaccccaattgaacatttgttgcctaaggataaagataaatatcctgaaaaaatgtacgagtatagtaacctatttgcttcttgtaatggtgatcaaaaaaatattacacatgtatgtgaagcagatgatacatgggaggttattatgcaaaagtatcatacaaataaggaagtcttgtatgcaatgaactttgcagaaaaaccacataagaaaattaacccatatacagatttgttacaaaaaggagatagtgttattgttcaggtggttagctctccgaaaaaactacattgtgatgcaaaaaaaagtaataaagaaatagcgattcatcctaagatgactaattgtgaaagttactttgtatacgattatggtggagcaattaaggcaaaggatgctaacaacaagaatgtgacagatacaatagaaatattaggtttggatgttgagaagttaaaaaaacttagaagagaagcaattgaagataggctgatagatattgatgcagaaggtttttctattcaggaacttgaactgcttattaaagggtttggtgaaaaaaatgataaaggagagtttgatgtgttttgccaagtaatagtagctatcctcgaagacgaaaaaaaatataaaaaagcattgggaaaatag

SEQ ID NO: 86234 - DNA, 1239 bp, Microscilla marina ATCC 23134
atgagaattgataaaattcgcctcaaaaactttagatgttatgaggaaaccgaaatcgagtttcaccctaacttcaacattgtcattggtatcaatggtaccggaaaaaccgctgtactggaagcattgacagtagctgcagggtcgttttttttgggcatcgattacgccgaaaaccgccacattcgtcccgaagatatcagagtattaagcaccgagtttgacattaacgaacagtttccggtagaagtagaaacctggggagtgattaatgggcaggaaatcagttggctcagagagttgactggccccaaaaacaagacaacttacgtaaaagcccttaaaataaaagaacttgccaaagagattcagagccgggtacgggcaggcgaaaacgtaaacttgccaatggttgcttactactctaccgaacgcctttggaaagaacgctctgatacgaccaaaatcagtggttcgcgcctcaaagatggctactacaatggcttgaaagcgacctcaaacaacaagttttttaccaagtggtttgaaaaagaggaaatggtggttttgcaacaacgcaaagaatcggtagggcttcaggtagtacgcaaaacagtaagtaattgtgtggatggctgcgaaaatgtatacttcgattttaaccgccgcgagttgattatggagtacaacgatgggcgaaaattgccatttaaatatttgagtgatggggtacgtaacacacttgctacagtggctgatattgcttttcgttgtgcaatgctaaaccctcacctgggcgaagatgcggctcaattgaccgaagggttggtattgattgacgaactggacttacacctgcacccctcctggcaaaaagaaattgtgaataacctgaaaacctcgttccctaaaattcaattcattgtcactacccactctcccttgattttgagtacggtacaagaccgtattgtaacaatggtagatggcaaagcttactatagtgtaaatacttatgggcgcactgccaatgatgtgttgcgtaatgtaatggctacccccgaacgcatagaagatgtacaagacaagctagacttatattttgagctgattgaagtgggcgaaggcttgagcgaaaatgcgatgaacctgcgtaaacaactcgaagaagccattggaaacgatgacccggagttggcaagagccgacgtattgctggcattttatgaagacgaataa

SEQ ID NO: 86235 - DNA, 684 bp, Microscilla marina ATCC 23134
atgagatacattcaaaaaggacctgaacctgagtcacttacaaacttcaaaggtttaaagcacaaaaactggaaaccttcttatgatgtattgccagacgaggtcatcaaagacatcatcaactctttgttatactatcagggtgggctttgttgctattgtcaggtagaaatcaaccaacaaacctcacgactggtgcattttcactctcaacaatactttaaaaaagaggaactcaattacgaaaacttgtttttatcatgcagtacatctgaaggcatgcctcctcaataccaacattgtgctgcgcataaagatgaagccatcattcctaaatttatggacgacactcgttgcaatgcttattttaagtataacactttgggcgaagtagtgccaataaacgcttacgggctacgcaccatcaaacaaattcagctcaatatgaacaagttgtcacccagcgaaaaaactgtgctcaatactatagaagtactcaacctaaacgccagtaaacttaaagaacaacgcaaagccattattactgaacttgccaaggtactgcgtaaggtaaaagacaaagaaaaaatcaaacacgcgatgacagtgtaccaaaaacgcgacaaaaacgggcgttacccacgctttgccggggtagttttgtcttacttgagtagtttataa

SEQ ID NO: 86236 - DNA, 1290 bp, Marinobacter sp. ELB17
atgaaccttaaagagattaagttaaagaactttcgctgttttgaagaacagtcttttcagttacatccagagttcaatttaattgtaggcatcaatggctctggcaaaaccgccctgcttgacgcgatctctgtggtaattgccacttggcttttaggcttcaggaacagaccggacaaaaagtcgctatccactggcgatgtaaggctgaaatatgtcgtcaagaacgacgaacctcagttcatcgagtcatggccggtaacggtaaaggctgagggaacgattaatgataaggatgtgcgctgggagagatctaagcactctgaatctggaaatacccgctacggcaatgcaagcgagctaatctcgcttgctcacgatctggatggaaagcttggtgaagacgtatctctgccactaataagctattacggcactatgcgactgtggcaggaccctcgtcaatccaaagtacggcccgacgttgtcatcaagaaaaagccctctccgttagatggatatcgccattgcgtcgacccacgcatagctacaagggagcttgtggcgtggtttgcttctcaagagtggagcgcctatcaacatcgcaaagagccccttatgctaagagtcgtgcgtgacgcaatcctgtcatgcatcgacaaagccgagcaccttagctatgacccaaagcgtaaggagctagtcctgacccgcgatagtagcgacccgcaaccgttcagcaccttgagtgacggtttaaggtgcgttttagctatggtcgcagacatcgcccaaaagatggtgaagctgaacccacacttgggagaaaaagtcctcagagaaacggcgggcgtcgtgttggtagacgagctggacctgcaccttcaccccaaatggcagaaacgaatcattgaagatctgaggacaactttcccgcgaattcagttcatttgtacgacccatagtccttttttgatccaggcccttaggtcaggagaggagttattggtgctggacggtcagccgatcgctcagcttgcaaacaaacctctcaaagaaattgctgagggcataatgggtgtagaaaactcagaaaccagccaccgctatcaaaaaatgaaagaatcaggtaagcggtatcttgagttgctggatgaggccgagctctctcccgacgataaacttgaggaatttaaacgacaattagcagactgcatcgctccctacgcggacaacccagcatatcaagcaattcttgagatggaacgaatcaagaaactaggaagttaa

SEQ ID NO: 86237 - DNA, 735 bp, Marinobacter sp. ELB17
atgcgtcccatcagaaagcagttatcgccagtaccgggagattttgatgaatattcggacgctaagcctgatttgatcagccgactaggcatgtactgtagctactgcgagagaccagtcagcaccaacctcgcagtcgaacatatcgaacccaaaaagggtcctcacggccagccgcacctaacaaaccgctgggagaacttcctcctcgcgtgcgtaaactgcaattcaaccaaaggtgataaaaaagtagatctgcaaaacctgctacttcctgaccgtgacaacacctcagcagccttcgtctaccgaaaagatggcaatatagatattcacaacgctctaactcaacaacaagctacgctcgcagagaataccttaaaactcgtgggtctggataaacctaaatcagtagcactagacgctaatggtaaagaagttgcacttgatagggtttctcaacgcatgcaagcgcacttgctcgcagaacgtgcaaaagacaatttgaccgcgtgcaacttggagccaatgagaaagcaaatcgtcgacacggcgtttataactggatatttcagcatttggatggcggtttttgacggagagatagacatgaagcttcgcttcgttaatgcttttaaaggcacgaaggacagcgagtgtttcaaccatgtaaatgccgacctgataatgccggcacccaatccggattcctggagtaacggtagcaaagtgtga

SEQ ID NO: 86238 - DNA, 1281 bp, Marinobacter sp. ELB17
atgcatatcaacaacctcactttgcaacgattccgcggtgcacaggatctatcgctcgacctgagcgaaaagttaaacgtctttgtcggaatgaatggcgcgggtaaatcgagcattctggatgcgtcggccattttgctttcctggctggccaatcgaattaagcactctggcgcctcgggtaggccaattgctgaagatgacatcaagaatggcgagtcttcagccaatctgaaagttcagctctgtgaacagggctcctactttgggtggaacctggccaaggttcgcaaggggtacagtaaaaaagatctggcttccgtgttgatttctgcctctgaagccgcgaaacggatacaaggggcaataaccgaaaatgtgggtgacgttaatatcccgctgtttgcttattaccctgttaaccgcgctgtactcgacattcctttgcgtatccgcgaaaagcaccaattcgaactgctgtcggcctatgaggagtcgctgaccagcggcgcaaacttccgcacgttctttgaatggtttcgagaaagagaagaccttgagaacgaacatcgtaaatacagggatgatctcataaagcctgacgatttccagtttccagaccctcagcttgcagctgtaaggcgggctttggaaatctttatgccggatttcacggagttgaccgttaggcgcaacccgctgcgaatggaagtcctcaagaaaggtcggcgactgaccgtgaatcagctctcagacggtgaaaagtgtctgatggcgatggtcggtgatttggctcggcgcctggccatcgctaacccgcgaagagcagatccgctccaaggggatggcatcgttatgatcgacgagattgacttgcacctgcatcccaagtggcagcggttagtggtgccgaggcttatggaggtgtttcaaaactgtcagtttctgatatccactcattcaccgcatgtgattacccatgtgcgtcctgagaacctgttcctgctcagtatgaccgatgagggcaagctggacgccgtccgccccgtggaatcttacggaaagactgttgaccgcgtgcttgaggatttgatggggcttcaaacaactcggcccaaccaggtggaaagtgacattcggggcatctatacacagattagcgagggtcatcttgaagccgccaagagctccattacaacgctggaacaagagatcggtgaagatcctgaattggtcaaagcgaaggtgctgatcaggcgcaaggagctgattggcagatga

SEQ ID NO: 86239 - DNA, 636 bp, Marinobacter sp. ELB17
atgaaatatgtgatcaaaaacgaagaaccggtgccatttgctgaatggaaggcgctggctaatgacgaatggcagccaacttacaacgatttgagtggcgaaaccaaggcgtctgtcaaaacctcattgatgcaagagcaaggttttctgtgctgctactgtgagcgacggttaacggcgagtgactctcacatcgagcatctccagccccaacgcgacccggcggttgatccgctggactacagcaatcttctctgctcctgtcagaaccagatcaagaagggaaaaccccgccattgcggcaatttgaagggtgactggtatgaccctgagttattggtttcgcctttaaatccagactgtgaaggtcgatttatatttgcgggcgacggttttattacgcccgccgaggcgcatgatgccgccgcgagagaaaccattgccaggcttggcctggatattccaaagctgaatgatctgcgcgccagcgctatcgagccgtttttggaagagagcttgactatggatcagttgagccagtttgttgatggttatttaagcacggggccagaggaccgtttaggcgagttctggactacgatcaagactctatttggagactttgtcatcgcatga

SEQ ID NO: 86240 - DNA, 1398 bp, Salmonella enterica
  subsp. enterica serovar Saintpaul str. SARA29
atgagaatcaacaaactttcactgcttaactttcgttgcttcagacagctcgatattacttttgatgagcacattacgattctggttgcaccgaatggcgcgggcaagacgacagtgctggatgcgatacgcctgacgctgtttccctttattcgtggttttgatgccagcctctacgtaaaagataaatcgctggcgatccgtacagaagatgtacgtctggttttccgccccgaagcgctgaacatggaaatgtcgtctccggccatgattacggctaccggggaatgggaaagtggaaaaacggcaacctggatgctcgacaagcgaggagaacagccgccgcatgaagataagacagcggcgcagcttacccgttggggtgaacaacttcagacgctggtgcgtgaagagcataatttgcagcaggttgagcttcccctaatgctttatctggggactgctcgcttgtggtatcaggaacgttatgaggcacagcctactgaacagcgtctggataacagcgccttttcacgtttgtctggttatgacgattgcctttctgccacatcaaattataagcaatttgaacaatggtatagctggttatggcttagctaccgtgaacatcaaatcacacaacttgaatcaccttcagcaaagttaaaagaaggtgttcgtgttcagcggatgaaagaagctattcaagccatccagcaagccattaactgtctgacgcaggaagtgactggctggcacgatctggaatacagctccagccataaccagcaattggtgatgaaccatccacagcacggtaagattcccttatcccagctcagcgacggcctgcgtaatgcggttgcgatggtagcggatatcgcgtttcgctgtgtcaaactcaacccccatttacgcgatgaagccgccttaaaaacacaggggattgtgctgatcgatgaagtcgatatgttcctgcacccagcctggcagcagcaaattatccagtctttgcgcagcgcatttccactaatccagtttattgtcactacccatagcccgcaggttatcagcacggtaaaacgtgaatccattcgtctgcttgagcaggatgagaatggcaacgggaaagcgttgatgccgctcggagcgacctacggcgagccgagtaacgacgtgctacaaagtgtgatgggtgtcgatccgcaacctccggttaaggagaaggctgacctacaaaagctgacggcttgggtagatcaagggaagtacgacgagccagaagcacagcaactgatggctgcattacaggcggcgctgggtgatcaacatccacaactccaacgcttacagcgcagcattgcccggcagaacatgctgaaagggaaagcgcaatga

SEQ ID NO: 86241 - DNA, 726 bp, Salmonella enterica
  subsp. enterica serovar Saintpaul str. SARA29
atgaggcatgtgataaaaacccgacgtggaacagatgccttactcactgcacatgagcaaccaccacaaaattcagatcaatcaactcgtcgctggcagcactttggtcgtgagaataaagcagccttaatgactctgcttctcaatgagcaatatcacctttgctgttacagcgaaatccgtgctgatttgcgtggcctcggctatcacattgaacacgtcgaaaataaaagtcagcagccagggcgaaccttcgattatcaaaatctcgccgccagcgcgttagactctgagaatggtttgcacctgtttggtatcaacgctttcggcggtcacgcaagaggaaaacaagaggccgtggatatggcaaagtttattcattgtcacctccctgactgttctcgttattttgcttacctttctgatggccgaatagtaccggctgatgagctaaatgcccaggaaatggagagggcagagtacaccattgatctactaaatctgaacagcggattccttcaaacggaacgtcgtaatcattgggaagagctggaacagctttttgaggaacatattgaaaaaggctgggatctgcaacaattacttcagcttgagctggtcccttcgctagatcataaactgcatgaattcttcagcattacacgccagtttttccagcaagaagctgaacaggtattacagaaccacgccccagcattaatttaa

SEQ ID NO: 86242 - DNA, 912 bp, Beggiatoa sp. PS
atgaaattaatcttgaattgcgaaacaaaaaaaccggtcaatcttccattagtcatttattattctgctctcaatgcgccagtaaacccggttgatttcaattatgcgagagatgattttgcgacagatatttttaccgcttatgatggtgctttggataaaacatctttcgattttatcaactttttcaattggtacaaatggcaagagaatattgaaaaacaactcggtgaaaacaaaatccttgatactgtgcgcaatgccatttgccaaatgctgagcgatgaacatcaccaatttagcatgctttctatcaactggctcaacaatcccagcggtgaaatgatgattcataaagatgatatgccgttaaatatcaatcaactttcatcgggagaaaagatgttgttagctttagtggctgatttggcgcgtcgtttagccattgccaatcctcaccgagaaaatccattactgggttatggcgttgtgttgattgatgaaattgacttgcatttgcatccacgtcgccaaagggcagttattcctcaattacaaaaaacttttcccagttgtcaatggattataacgacgcattcgccacaagtgttaactcaagtgcaacaacgttgtgttgtgatgttggaagattttaaagtcgtcaaaaatacaccgcatacttttggcagagataccaacagcattttgtatgaattaatgggattaacacaacgccctattgaaatgcagcaacgaattgatgaagtctacgaattgattgatgacggaaaattagaagaagcacaaaccttattggaggcattatctgaacatcttggtgaaaatgatgttgcgatagtcagagcgcgtgcccatttagattttatggatgatggctatgaagtacattaa

SEQ ID NO: 86243 - DNA, 654 bp, Beggiatoa sp. PS
atggctatgaagtacattaaaaagggcaaagaaccttcttcattgttagcgcatcgtaaaaaaagttatgccgactatgataattatgctgaaaaagatgagttgcgtgatgctttactcaatgaacaaggagatatttgttgttactgtatgcaacgcattagtaaagataacatgaaaattgaacattggaaaccacaaagtcaatatcctgaattacagttagattatgaaaatttacgagcatcttgcaaaggaaatgatggaaaatcaaaatttttgccacggcattgtgataccagtaaggctgaacaagaaattacccttaatccagtcgatgaagcgaaaaactgtgaaaaattaatagagtatcggagaaatggcaaaatatactctcatgatcccatcattgataaagaattaaatgacattttgaatttaaatacacaaacattggtcaacaatagaagtgaaatcattgatcaaatcatagaggaccttaccagaatcaaaggcaaaaaagcagaatggtccatttcagaggttaaaaaaaagattcaacagtatgaaagcaaagccaatggcaaatacaaaccctattgccaagtagttatttactttcttaaaaaacgttttgccaaggaactcaaataa

SEQ ID NO: 86244 - DNA, 987 bp, Beggiatoa sp. PS
atgaaaattaaacaaatcaaaatcaatagttataaagttttacaaaatttggaaatctcttttaccgatagagatggaaatatcttagatactgtggtcattgctggtgttaatgggagtggtaaaacaactcttttagaactgatagccaatagttttgatacccatttcaaatttgagagtcatagtgattatatagatttcatcgacaaagatgccaccaaattaatttatatgagcgtttttgaccatccaaaagaatttgtaactttgaaaatcaaagattttttagattatcttagagaacagaatgaagatttaacgataagagagtcaaataaaaaattaaccgatgagatcaacgctatttttgagggtttgaatttaaaaaccaaatttaaaggaatttccaaatctataaccagagaagtgatttttgagaacgatatcagagatgatatcaaattagatgaactgtcaaccggagaacaacaactttttattaaagcactcaatttgaaaatgatggagccaaaaaataacttgattttaatagatgaaccggaactctcactccatcccaattggcaaaatcaaatcttgagaatctatcaaaatattgccaacccaggtgacaatcagcttattgtagcaacacattctcctcaaattatctcttcaacgccaaatcagtctttaaggattttaattaaaaatggtaaaaatattgaagttaaacaaattgataaaacttatggtctcgaaattgaggaagttttacaagatttaatgggaactcaatatctcagaaccccaccaatagcaaaagaaattaatcaaatgtggcattatttaaatcgtggagatttgaaaaattttgaattcatctatgataatcttgaaaaacttttggatataaatgataaagaattactgttagccagatttaaaaaagctagattaatgagtcgaatggagaattcatga

SEQ ID NO: 86245 - DNA, 570 bp, Beggiatoa sp. PS
atgattaatgttaaaaatagccggttggaatattttgagatttttaaaaaaaataaaaaggcaaaaaattatcaacaagattgtaatgattttgaactaaaagaacaaattagagcagatttactacaaaaacaacataaccaatgtgcttattgtgaaagaaaaattgataagaaaaattcccatatagaacatatcagacaaagagataaatttcatcaattagaatgtgaatattccaatttagttctgtcttgtaatgatgaaaatagctgtggaaaatataaagatagtcagaaaaatcccattgctaaattttggcaagatgaatttatacatccagtatttgataatccagaagagtattttagttttaatgaggatggacaagtttttgcgacaaaagagaatgctaccaaaaccataaaatatctcaatctcaatagtccaaagctgataagaaatagaaaaagtttgcttttacaactgatgtatatgaaagatatagataatattttagaatattttaatgaatttgaaaacttgttaaaagaatatttaggcgagtaa

SEQ ID NO: 86246 - DNA, 1341 bp, Beggiatoa sp. PS
atgaaaattagtcatatcaccattgaaaattttcgggcgattaagaaattagatttacccctcgatcctcaattaacggttttagttggtaacaatgctgctggtaagacaactattttggatgccattgccgttggtttaggcgcgatattaactcatttacctagcgttagtgggatcaagtttcgtcaaagtgatattcgagaagaattggcaacagaattaaaggatgaacaagcacccagtcaagccccttatactcgtgtgacgcttgaaagtatcgaaggcattatttgggatatcactaaaaaacgcgatcaaactaaacggactcagcaagctattccgccagataaaaaattagatcagcttcatgactttttggaaaacatcatcaacgatgttcaagatggaaaaccaacccacttatcggttattgcctattatggtactgatcgtgctgtattgtcgtcttctctgcaacgtgattttaataaaaactttaatcgttttaaagcattagaagatgcgttagtggcaacgcaacgttttcaaacgatgatagaatggtttgcttttcaggaagatattgagcgaagagaacaaagcaaacggcatgattttgaatatcgtctgcccgtattagaatcagtgcgtcaagccatttgtaaaatgatgcccgattgttcaaacccacgtacactgattgatccgttacgcttaattgttacgtttgaataccaaagtgggcctcaagaaattttgtcactcaatcaactgagtgatggctatcgaattactttggcattagtcatggatttagcccgacgcatggcacaagcaaatccgcatttccatgaccaagctatccaacaatcagaagccattgtactcattgatgaagttgacttacatttgcatcctatttggcaacaacaggtattggttgatctcatggcaaccttccccaaagcccaatttattgtgactacccatagcgaaaaagtcctgacaacgatcaaaccggaacatattgttttactaactcggcaacaagataatatcattgctgaacgagcgacttcttcttatggggctgaaagtgggcggttgttggttgaaattatgggcgttaatgagcgtccaccggctgataaaaacaaatttaccgaattgctcggaaaatactatgatttgattgaaagcaatctaggcgaaagtcccgaagcgttaaagttgcgtcatgaacttaatcaagaatcgcctcatgatcctatcctaattaaagctgatatggaaattcgcagacaacgggtactttacgggaagcaaagcgcatga

SEQ ID NO: 86247 - DNA, 609 bp, Beggiatoa sp. PS
atgaaaaaggttaagcaatttgatatgttaccagaggacctgcaacagtttttaacaacatatccgcctgacaaacgaaataagcaagattggaatgcgtttaggaatcatgaaagtggaaaaacttacaataacctgattcaagctttgattgacattcaacgaggcttgtgtgcttattgtgaaatcaatctcatcgaaaatgattaccaaatagaacattttcatccgaagtcagatatttgttctgaaatggattggatgtttgagattacgaatttgtttgctgcatgtaagggaggaactcagacaaatctttttggtaccaaaacacgtcatcctgatctgaatcgttgtttacctcccattaagaaaaatcgtagttgtggagaagctaaagatgataatgtgatggatgatgagattctgaaacctagtgaattgcctatttcgccttcgttattttcaataacccgaaaaccatccgtaggaattgttaataagaataaggataaagaaggtgctttgaaagttaatgaaaatacttgtcttcaagctggtattgatcctaaaaaaagtgcaaacaacaatagaggcattcaatcttaa

SEQ ID NO: 86248 - DNA, 795 bp, Beggiatoa sp. PS
ttggaaaatacgctttgggctgcttatatatctgcttgtaaagaaagtgtttttgattttaatcgtttttttatttggtttacatggcaagaaaatattcaacgagaagttggtagtaataaaaaatatgaaatggttcgtcaaacaatatgcaaagtcatcagtgacgaacaaaatactttcgataacttacatgttacgtggcaacaaaatcctactggcgatttatgtattgaaaaaaatgggaccttactcaatatcaatcaactttcagcgggtgaaaaaatgctgatgatattggtagctgatttagcccgtcgattaattgtcgctaatcccaaaagtgataatcctctacatggagagggcgttgtattaattgatgaaattgatttacatcttcatccaagttggcaaagagcgattgttcctaacttaattgagatttttccaaattgtcagtttattattacaacacattcgtcactggtattaagcaacgtatcacacaaaaatgtgattattttggaagattttcaagccgtaaagataacaccacatacttatggtagagataacaattctatcttatatgacttaatgggggtaaaccaacgtcctgacgacatacaacaacagcttgataaagtttatgagttgattgaagaaggaaaagaaagcgaggcacgaactttattggagaaactctctaaggatttaggtgaaaacgatgttgctattgttcaagctcatgtcagtttaaattttatggatattgatgatgaaacaaattaa

SEQ ID NO: 86249 - DNA, 525 bp, Beggiatoa sp. PS
atgcagcgtattagtccaaatgcagaaaaaatgaaaattgaacatcataaacctcaaacaaaatatccaaaattgcagttagattatcaaaatttgttagcatcttgtaaggggaacgatggtggaccgaaacatttaccacgccattgcgataccagtaaagctgatcaagaaatcactcttaatccagtagataaattaaaaaattgtgaaccattgataaagtacagaacaaatggtcaaatatactctgatgatcttgtgattaatcacgaattaaatgacattctgaatttaaacacgccaacattgattaattgtagaaaagcaataagactccaagtcataaaagaactaactaagatcaagggtaaaaatgccgcttggcccccgaccaaaattaaaaaaataattgaaaaacataaagataaagatgaaaccggacaatatataccttactgtcaggtagtgatttattttctaaaaaaaaagactcaacatcaaataaaatcaaaccacgaataa

SEQ ID NO: 86250 - DNA, 597 bp, Beggiatoa sp. PS
gtggatatcaactcagagcaacctattttcaaatctttttgtggcccgctaatcttatctaatgagttatctggtggcgagaaacaactttattacaaagctattttatttgataaattacgtccacaaaacagcctgattttggttgatgaaccagaaacatctttacatccgacttggcaacaagaaattttaaagttatacaacaatatacccggaaataaccaagttatttttgtcactcattcgccacacattattgcctccattcaccccgataatttatttgttttaaatatgaatgaagcgaaaaaaacggtggaatgttttaatgcgaaagataaagggtttcatacaaaaggaaatgaacccaatgacatcttggatgaagtgatgggtacgccgctaagagattgggagactcagaacagaatagacgacttatcagaacatctacgtcttcatccagaagattataataaaccagaaatgcaaattattatcaacggtttaattgaagacttaggtcaaacagattcctttgttattagactcaagcatcaattgatgatgataaaaagaagaaaacaaggttaa

SEQ ID NO: 86251 - DNA, 666 bp, Beggiatoa sp. PS
atgagatacatagataaatctaatcgttgtgccgagtttgatgagtatgtgaacagtgattccccctctatttggaatgaattcaaaactgacatcaaacttaaactacatcaacacttatggcgtgagcaacaaggactttgtatttactgtcaacaagaagtacctgaaaaaacggagacggaatataaaattcgttcccatattgagcacattcgtcctcgtcgtggtcataatcgtgataaatatgcccatttaaccttttgctataagaatttatcggtttcttgtgaaggattcgactgtaaaagggatgatagttcaaatccgaaaaaagagttttgtgaacacaataagggtaacaaatacgatgaagacaaatttttaaatccagtggaatgtaaagatattgaagattatttttcttatgatataaatggtgagattcatccaaatgataataaaaatgatgaagatataagtaaagcaaaagagatgataaatattttgtatttaaatcatctaacattaacaaatatgcgaaaaaaacaatatcaattaattattcaagagcaagaaaatgggattgatattgaagagtttttaaatccagattatgatgatttgccaggattttacacgatgttaaaacaactatttctttag

SEQ ID NO: 86252 - DNA, 1122 bp, Beggiatoa sp. PS
atgtatatcaaagaaatatatatttcagactataaaattttgactgatctaaaaattcaattacagccaccaccacaatctcaaaacagtgttaatgtgattgctggtatcaatggtacgggaaaaaccagtttattaaaaggcattgcgttcagatttgctaatcggctttcttcggaagagttccagttgacctttgatgtggaaactgagaaaaagttttgtaaaaacggcgatttacaaatacaaaagttaaaagaatattttgagaggaaggcatcaaacacctcaccaaaggttatttatattgggagttaccttgtttatcaatttatgccagtgactcaacttgagacggcatatcaatttattaaccaacttaaacctgaaaatatattgggcaatgccgaatattatattcgtgaatatattttagctcatgaacgaaatagctatgaagccgatccacggaaaagaactcgtgaagccattgatcattttaatcactttttcaaagaagcgaatcttttaaccgaattatatgatttagatcagaagcattttaatcgccctgtttttaaacagaaaggctgtgataggctagtctctattgattgtctcagtgatggtgaaagacaactttatggactcatcatcgctttgatgattctagaaccttataattctattatattaattgatgaaccggaattggccatgcatccggcttggcaacaaatcatcctatctatctatgccaaaatagggcaaaataatcagtttattgtggctacacattctccccaaattattgccagaacgcccattaatcatttgatttttttgagaaagaatttaacttcccataaaatagaagtgatatatcccaaacatcctcctagtggcatagatgttaattctattctttccgaatttatgggtgttgagtttatcccaaaagaacaagttgagttgtaccaaaagtatagagaattggttgaaaaacatcaagaaaattccttagacgctcaaaaaatcaaacaacaaatattagaaagggaaagtaatacttcggaattcatgcaagaaatgcaattgatgattcagcttaggggagaataa

SEQ ID NO: 86253 - DNA, 708 bp, Beggiatoa sp. PS
atgcgttttatcaagaaaaatgagcaagcacctgattgcctaaatcaattggtaaaacagtataaacaaccaaagacttgctatgacaaattgactaaaaacaagaaaaacaaagaatgcaaaaatttaatccaacagcaaatgctagaagaacaacaatatctatgtgcttattgtgaaagaaaagttgaaaacaacaatgatgtcatacacatagaacatatcagaccacggttacattatttagaaaaagtatgtgattataaaaacttaattctatcttgtcatggaagtcagtgtcctgatgttaaccaagccgattatcaaggtgagattcattcttgtggacatcatccagcaaaaggtaattattttgatgaagccaaatttcttaatccagtagaattgactgatatttcagattatttttcatatcgtattgatgaaggtcgtattgattcctctgaaaaagacacaattaaggctgattatatgatttgcttattaaacttagataatccctatttgaataatggacgtatcaacgctagaaaagcgttattgaaaatggtacagaaatcttctcaaaacaaacaagaagctatcaaaatttttaagcaattactcaatttaaatcatcctccggcttttattagttatcttcgttactattttcatcattcatttaatatcagcgactcaaattaa

SEQ ID NO: 86254 - DNA, 1362 bp, Beggiatoa sp. PS
atgaaaattgaaaaacttcacttagaaaatattggcgtatttgaaaaccttgatttagaatttaaatcttgtgggcaacccgctaaaaaagcggaaatccatatttttacgggtgctaatgggagtggcaaaagtaccttgctatatgcgttggcaggagctttagcaggaccattgcaacaaccgatggatacaaaacttatcttccaaagatttcatcattcaaacccgaaggcttttattgaagctttatttgaaaatcaacaagtcatcaactataccatcacaaagcgtcaaaaaaagagctattttaccggttttcctttaataagcgatgatagtcctagttcttctgaaatctcccatgcttacgcgagttcaaatcaacaatcgcctaatgactttataaataactttatgcgaagtcaaaaagttccccatgatagaaacgaagggcgttcttttgctgcttttgcttattctggcaatcgaacattcaagtccctagacgaattaaccactgaagaaatgatggactgggatccttataacaacacactttcctttttggaaacaaattctgagcgaattatccaatctattgcaaaccaaaaaataaaacaagccatagaattgagccaaaataatcaagaagccgccaaacaatacaatcttgtagttcaatccattgaaaacgccattgaaaacattgtcggttggaatattaaattcaaattacaaaccaacccgcttaatctttttcttgaagttaatcaaaaagttttagattttaatgttcttccagatggcttaaagtcgattatgagtctgattgcagatctcatcagacgtttagataaaatcgtttgggttgataatggcaatgttttagaacatccttttattttgttgcttgatgaaattgatattcatctacatcccgcttggcaacgtaagatattacccgtcattcaaaaaatatttcccaatgcccaaatttttgtctcaacgcattcaccttttgtagttggttcggtaagtgatgcttatgtatattcatttaaattaactgaaaatatctcaatcctagataaagtggaaccatcgcaagctggaaatagttattcattgattttagaaactatttttggtgttgaagaatcctttgatgaagagactgaaactcaatttcggcaattttatcaatatcgagatgacattatgcaaggggatgacaataaaatagaacaatggttgcaactggctcgtgatatgatgacaaaaggcatagaagtcgctgatattgttggaatggaattacgtcaaatgtcacgaattttagacaaggatttatctttatga

SEQ ID NO: 86255 - DNA, 615 bp, Beggiatoa sp. PS
atgatgaaatttacgcgccccaaaagaccaggttatttagataattacaaaaaatggggtagagaatatgccaaaaagaaaaaagaatatacggagaaaaaaaggaaaacgccaccaaaatggaacaagaaaattaggcaatgggagcaactcaaaagcgatttagccaaattgacgatagatcattgttcattttgtgatagttatccattagttgcaaaaggtcaacaaactatcgaacattttagacctcgaagcagttatcccaaactcgcctatgtttggcataatctttttttaagctgtaaaatttgtcaggaaaaaggagataaatttagcaaaaaattactcaaacctgatgtgataggatacgacttttatcgttattttatggttgatttcaaaaccggtgaaattaaaattaataagcgggcttcaaaggaagatcaagaacgagctataataaccatgaatatatatggtttgaataatcataacagatcagaagcacgatctaattattacaatcggatcacacatcaggaaagaaaaaagaaaataaaaatcagtcgtgatatcgatactttatcttatcgctttatgtttgaaatttaa

SEQ ID NO: 86256 - DNA, 1389 bp, Pedobacter sp. BAL39
atgagaattaatacattagagctgaccaatgtgcgtggttttacacatgcaaagctggaatttcaacccggttttaatctcattgtgggaattaatggtgttggtaaaactactgttttggaagccttaagaatatctatgacccatattcttaaagaaataaaatcacccattatcgcaagtgaatcttttaagaaatctgacatcaacatcaatacagatcagttacatgtaaatacatcatttacgattgatgagcataattatgattttatttattctaaatcggcaaagagttcttatattaaggaagtagaaattattacatctcaaaacaaagcaataagacgagagcaagaagcaaaagaaagtgagaaggctaaacaaaagctagaagctgaaaaaagcggaatcgaagaagcgaaagaagaaaaatcagaaactaaaattccttttagagaagaaggcatcacattagaggatattattagttttaaacctgaaataaaaagaacacagaataccccggagttaggcttatttttttcaacaagaagatcattattagtcaatcaaagtcaaaaatctggcaacccgaaaattcctcattcagctgcgtatgtacatgctttgtctgaaactagggctttcaatgtaaagatgtttgcagaatggtttaaagttcgtaaagaattagccaattttacgccagaacaaataaatgttataaaactgatcgaacaaaccatttatacatttttacccggtttttctgacttggatttagtagaagatgaaatttcaaaagaactgatcttttgtattaccaaatccaaaaaggttctaaatttcaaccagctttctgatggtgagaggggcgtattagcattggtatttgatattgcaaggaggttaatcattgcttatatgcatagtgataatcctttagaaggagaagctgtcattttaattgatgaactcgatttgcacctgcatcccaaatggcaacgcaccattgtaagcgatttacaacgaacttttcctaattgccaatttattgctacaacgcattcgcctcagattatatcttcagtacttcctgaaaatattcaaatcatcaaaaactttgaaattgatcaaaccgtaaagagtttcggattggatattaactggattttaaaatttatcatggaagacagtgatcggttaaaggaatcggaagaagcgattacagcagttcaaaaattaatagatgaagtagaatttgaaaaagccagagccctaatcaatcaatacaaaaatcaagaaaatcttaaccttgacgaatggataatgtttgaagcccgaatgtctcactttgaaatgtttgacgatgaagaggataattaa

SEQ ID NO: 86257 - DNA, 735 bp, Pedobacter sp. BAL39
atgaagaggataattaaagggcatgaaccagcaagctttattcaatttaaacaagagaatgagaaggggggagtaaagttacgctatgatgaaagtttaggaagtgcacaaagaactcctattaaggaagctttactaaaagagcaaggttatatctgtgcatatacattgaagcgtatcgccttagaatcaagtcatattgaacatttaaagccagaagaattgtgcaggaagcaaatggaagaagaaatagttacagtatcggatttggattatggcaatatggtagcctgttttcccaaaaaaggactaaaaggaatccctaatgaaaagtattttggagccattaaaaaagatgcttggtgggaaaatgaaggagctgatttcataagtcctttaagagaagattgcgaaattcattttaaatacaataaagatggttctgtcgaagaggtaactcttaaaggcaaaaaaacaattgaagtgttaagcttaaatcatgacattttaaaacatgagagagctaatgcgattaatgaatttatctataagaatgataaacctctaaatacgttacagacgcttcatgctattgaaaatatatgcaaaaagaataaaggtagttttgttgaattttgtataccaataaaacattccttagataatcatttggaatatttggagaaggttaaacaaaaaaggaaaattatatcaaaagcaaaaaagaaacagtaa

SEQ ID NO: 86258 - DNA, 1365 bp, Vibrio sp. AND4
atgattattgaacgtgttacgcaagacaaagtctatcggttcatggatgaaaatgaattcgcagagggtaatgtatataccgcaattatcggtaaaaatggttctggaaaaagtagactgttgaatagcgtaattcaggatttactcaatctgcgtggttacccgtcaagttttgatagagaactacctttttcaagaaataaaagcttcagtggaaggttagagtgtagaggtataccaagaaagatcatagctgtatcgacaagcccctttgataagtttccactacctaagcgacatgaacctatcgggaattactcctatcttggattaagggacttgctaagtaataatcttggactagcctatatgtctaaaattattaactctctaattactactattttgcatgacccgagtagagctgcggtagtagggcatgtattacagtatctaggctacagcgacgaagtttgggctcgatttcaattgtcaccgactattggtcgaattgaaacattccttcgcagtgacgatccggtaggtcagtttacgaaatttctatcatccccttctatccgaaatgtagatagaagtttttactttgatgattatggtcaaatcgatgaaaataaagtacatgaaactttcagaatcttcgacaagataatggcatatacgtccaagccacgcttcgatttggttataaataaggggggcgttcatttgcttggtgggatgtatgaaatcaatgaagactttctgtttcttattcaatctggaatcgccaagttacgagatgttacgcttgaaaaaagagagtttcgccagagagtaaagattagtgatgcaagttcaggcgagcagtctgtagtcatggcaatgctgggcattgcaagccaaatagaagatcaaactttgatttgtatcgatgaaccagaggtatgtttacatcctgaatggcaagaaaaatatatcgatcttttagtcacggctttcagtaactacattggttgtcagtttattattgctacacattcgccacaaattgtatcaaatctaccagagcgtaattgcaacataatgagtatggaaactgggaattttgaaagatcgacagaatatcaacataggtcagcagactatcaactagctgcaattttcaaagctccagggcatcgaaacgaatacttgaataggatagccttgaatacgtttgttaaagttggaaaaaataaatttttcgatcgtgaggatatagatacatttcaacttctaaatgacagcatagataatatccgagctaacgatccactatataacttaattattgcgctaaaagagatgtacaatagatatggctaa

SEQ ID NO: 86259 - DNA, 663 bp, Vibrio sp. AND4
atggctaatattattagaaaccccgtcatttattgtgaagatttagagaacttaatggcttctataaaaaacagcgaaggttttagccatactagttggagcactgctgaccttcaagtacttagagttcatattcgaaatcattatagacttcagcaacaaggagtctgcgcgtactgccgtcaacctgtatcgttacaatcagcagctaactgccatgttgaacatattgctcctaaatcgaaatatcctgagtttatgtttgagcccaaaaatctttgtgtggcatgcgctgattgtaatgaaataaaaaaagagcaagaaacaatgggggaggagcctgacccaatatgtaatggaaacgatcgggctcggtatcctagggccgcatcatcgttctatatcgtgcatcctcactttgatgattatgacgagcatattgaaatattcaatggtcactatgtcgataaaaccgctaaagggcatttcactattggagcatgtaagctcaatcgccgattacgagcttttggttgggaagaaacgctgattagtgaacctgaactaaattgtcttatgacagactttcttggggctgatgacgccatcattaaaaatgaaaagttgcaaagcatcaagcgtgcactagtcaaggtaagataa

SEQ ID NO: 86260 - DNA, 1605 bp, Shewanella benthica KT99
atgaataaaaccacatctaaatcatcagtcattaagaagctggagagaaatgctgaaaatggtgttttttattcaatctatcaattatatgagtattacttgaatggtacatatgtcgacaaaaatgaagttaaatcagaacgttatttacttgatgctaacaatatattttcaacacaaaagttagaattaactcatataaagcttcaaaactttagagcttttagcgagattgatataaaaatccctgacaatagattgactgtcattataggtaataacggtggcggaaagagcactattttagatgctatttcccataacatgagttggttagttaacaggatgacaaagaaagggggaactggtgaatctattgatgatcttgatcttactcttggtactaaagctggtttctcttcaataatcactaaatttaaattaaacaataatatttatgttgatatggaattagtaaatgtacgagatggtttcgacacgagcaaaaaaagttatataaaagatataactaaaattggaaatatgtataagaaggctaaattatttaatgacaaagtaaatttaccaatactagcatattatacagttaatcgggcattagaagctaatagcaaggatatggctagttttgatgaaacctcttcaattaaagaagtggaccaatttgaaggttatatagattctttgaatggaaaaacagacttcaaatacttttttaggtggttcaaacgtttagatgatatagaaaaacatcgaaaaatcaaaaacgatgtttcctttttagatcaattaaatgagctagacaaatcagatctatctgatgaggaaattctaaagataataaaatctagaagtgctaactctaactctaactctaactctaataagattatttcagatattcaaaaaataaaagactcacttaacaatgttattcagttgtttatgccaggctatgggaatctagagatacagatggaaccatacctatctttaacacttgataaaaacaagcaaaagtttaatgtacttcaattgtctcaaggagaaaaaacgctattagcgttagttcttgatatttcaagaagacttataatcctaaacccttcattaccaaacccactagatgggaatggtatagttttaattgatgagtttgatctacatcttcacccagaatggcaaagaaatgtagtgaggagtttgtctaaagcatttaaaaattgtcaattcattttaacaacacattctcctcaaatcattggggaagttaaacataatcaattgatagtaatgaagcgtaatgataagaacgagattgattattatcagcctacacaatcatatggattgactagcaatgatatattaaatgaaataatgatggaaaatggagagaaagggcaactaacaagaacaccaatagttgaaaataaactgaaaaaaattcatgaattgattgcagacgataaaaacattgaagctttaagtgaaattgaacagttggaacaacagattaatggagaaattcctgagttggtaggtgcaaaggttgatatagagttagctggctgggatgaatag

SEQ ID NO: 86261 - DNA, 639 bp, Shewanella benthica KT99
atgcatgaaatatctaagaataaagaacctaacatattagccaaatacagaatggttttaggttcagtatttgatggtggtgactttactgtagtaaaagatgcaattaaaaaaagtttattagatgagcaaggatatacttgtgcttactgtatgaatgggataaaggcctccaacatgaaagttgaacattgggcatctcgtaaaactcatccaaatttacaactgacatatactaatttgcttggttgctgcaaaggaaatgaaggtgagccaaaagaaaaccagtgctgtgatactagaaagggaaatagtcctattaaatactcaccagcggaacctaatgatcatattaacaaaacaatcatctatttaggggatggaagaattaaatctaatgatattagttttaacgaggagataaatttaatattaaatcttaatttagatcggcaagtaaagaacagacttgaagcgataataagagttaagaggagtcttgcaattaaagatggtaatagaagccaagaaaatatagtaaagatgatttcaaaaataaataaaagaaatgggaataataaattcatcccatactatggcataatgcttcattatttatctaagaaacttagaggctaa

SEQ ID NO: 86262 - DNA, 1359 bp, Pseudomonas syringae pv. tomato T1
atggaaatcaaaagcttcaggctcatcaatgtggggcgtttcagtgatctggaggtcgcactggcgccgaccgaactgcatgcgtcgagggtaaccgtgctggtggggaataatggcgctgggaagacgacgctgctcaggtctgtcgccacatcactgagctggttggtagcgagggtcaaaacgcctaaaggtgttggtatcagaatcgacgaagatacgatccagaacggcgcggcgactgcttcaattcgtgttgacgcttacaatgcccagattatcgacccactgattcgtggagctgatttttactgggaggttgccggaaccctcaaggggcgtaaggctacttcgtctactgtgctgggcgagctgagtatgctggcagagggataccgctcagtgttgacggccaagagcgattcatctctacctcttctggctttttatcccgttgagcgttccgtgattgaaataccgctcaaagtccacgccaaacacacttttgatcagttggacggctacgatgacgcgctgggccgtggagtggactttcgccgtttttttgagtggtttcgagagcgcgaagacagcgagaacgaaacaggcatccctacggagctgcttactaaactgtcccaaactatctcaatcgatacagaactttggaaagtactgtccagagagcatgcctcgtcgcgtgaccgccagctgactgcggtcagaaatgcgatcgcagccttcctgcccggcttcacaaacctgcgcgtcaagcgcaagccgcgtctgcatatggccatcgataaaaatggtcagacgctgaatgtgtcccagttgtcccaaggtgaaaaatcgatgatggcgctggtcggcgatattgccagacgcctcgccatgatgaacccggcccttgaaaatcctctgcatggaaatggcattgtgctgatcgatgaagttgatctgcatttgcatcccaaatggcaacgcagcttgatcgcccaattcacgaagacatttccgaactgccagtttttgctgaccacgcattcgccgctggttatcagtgatagcaaggacattctggtgtacgtcatggacgatggtgagttgcgcgtgcaggacgggctttatgggctcgatgccaatcaggtgttgttgagtgtcatggataccgatattcggaatattgatgttcagaaacgtctcgacaggctccaggcgctgctcatggccggtgatctgggggaggttcgttccctttaccacaagctggccaatgacctgccatctggacacatagaattggccaaggcgtcgttgttgctccgcaagctggaattacgtcgtgcgaaagattga

SEQ ID NO: 86263 - DNA, 651 bp, Pseudomonas syringae pv. tomato T1
gtgcgaaagattgagaagggaagtctggcgatcctggagcagtggacgcgctcgaacaagggaaagaaatatgcggatctggccggtcgagaagatatcaaggatgccattcgacatgcctgtgtccgagagcagcatggtttatgtgcctattgctgtcgcagcattaccccttataaggacagcgctcacaatgaacacgttgaagcgcagcgtctggcgcccaaccgcacactcgactttcagaatatcgttgccagttgcaatcagccgggtcgatgtggaaacgcgcacggtcaccaattgttaccactgacgcctcttatggtcgaatgtgagaccgaactgcagttcgagctgtccggtttggtggaaggcaagactgatcgagcgcaggactgtatcaaggtgcttaatctaggcagtgatcaagcctccaacaggtggttgattggcgagcgcaaggcaatgatcaacgctctattgtttaagcatggcttggacgcgtcagagctgagtttagaggacgatgacatactcgacttgctgcatgatgaactgctacctgtggatgaataccaacagctccagcctttttctcccgttctggttaacgtgattcgtcgtatcaaggcgtcgcggatctgctga

SEQ ID NO: 86264 - DNA, 789 bp, Pseudomonas syringae pv. tomato T1
atgtccgtggaaggcgacatcaaagtcatcgaaccagcccccgacggcaaatcctgcttgatcgtgacagcgcccgccggcgttgtgaccaagacaccgctcaatgatgtgtcctcaggttaccggaccatcctggcaatggtgtgcgacatcatgcaacggttgatggatcggcgcataaaccccgacttcccgggtcttgagcatgcccaagctgtggtattgatcgacgaagtcgaagcgcacctgcacccacgctggaaaattcagattatgcaggtgttgcgccgggcattgcccaagatcacgtttatcgccaccagccatgatcccctgtgcctgcgcggcatgcaggacggagaaatcgtagtggttcatagccggtccagggccggcggggccaatacccagtacgcgacgtgtattgagcaactgcatgatctacccgactccacgcagttaacgattgagcagctgttgacatccgactttttcaatctgatgtccaccgaccagccggcaacggaaaaacaattggccaacgttgccgacgtgttgaataagttaaaaagaaaggagacgttgaccgacgaagatgagcaggtcatgcggtatttcgaaaaggagatcaaggaggctctccccattggcaccagcgaagcccagcgcgtcgttcaggaggctgtcgcccagtttcttcaggaacggcgggaaaagccatccatcgagtggggcgcgatacggacggacgccaagaccaaaatattgaacatcctcaggaactcttga

SEQ ID NO: 86265 - DNA, 717 bp, Pseudomonas syringae pv. tomato T1
atggagtgggaaaatctgctgcctagctgcattcattgcaaccggctaaataaacacgcaacgccgaagctttcgacccagctagttgaactgcgcgctgacggcacaggcttcagtgaccaatacaaggtcaccacgggcaagggcaaccactttccaatactggggccacgcgctacgccagcttcaagggattgttcaaccgaatacccgctgttgctcaacccttgcctggatgacccacaagagcatttggccttccatgtcgaccgcaaaaaactcatcgggctggtgttacccaaaccgcacaacggtgcggggctaccggcgcacgtttccaccacggacctgctgccagcgttcgcagacgaaatcgatcaggcgctaagggacaagctcagcctgcgcggcgccgtgtcgatccacacctatggactgaaccgattgggattggtccaggatcgcacgcgtgtgctgcgccaactcgcatttctggaggagtcggtgaaggatctttgcgccatgatccagagcctggaagcacgcataaacgaccccttcgcggttgaaaacatacgcatcatcaagcgcatggaggcattggtagaacgcacagcgcagcacatggcggatatggccaagcctcaagcgccctactcgaccatggttcgcgagtttttacagggctttgaggcgcgcctggttgccattccctag

SEQ ID NO: 86266 - DNA, 1188 bp, Pseudomonas syringae pv. tomato T1
atggacggtgaaaaagtcgactgcaaatatgacacaaagggcttgcacgttgacgtcgacggggaaccaatcaatcacaaggaaattccgctgccttctagggtaatcgcgattagcgcgagctggaatgacaaatttcctttttcggacacggacgaagacaacttttataaatattgtggcgtcagagagacctcaaatgcatcatggacggctacactgtctcgcagatcaatcgaaaacttgctgaacgtcccactccgccttcatcaagaatccattactgaattatttgaatatttgggagttgacacaaagctaaaaataacttttcgattcaggaatgccgaagaccttctagcccttataggcgatcctcacgaactagtaagctttgtgcagagttattcaaaaaacaattcacgaatgcaagtcgacttttttaaaaaatttagccttcaagacgctttaagagtcgaagctggctggaatcagattagcagaaagaaaaccttcgaactcgatgttaatcttcgccacacaaccgtggactactcagatgcttacttcgccataaatgttttcagacgaatcggcttaattacagatgtcgatttgagagtacagaaaattgacagcactgaagcctatccgttcgccagctcaagctctggggaggcgcagctcctatactgcttttcgagcatcataagacacgctaaagataattgcctcatcatcattgacgaaccggaaatcagcctacatccggcgtggcagattaaatatatcagcctactcaaacgggccctcagctcattccgaggctgtcacgtgctgattgcaacgcactctcactttatcgtttctgatttagcttccgaaagcagttcactgcatattttcaagaaaattgaaagcgttagtgacattagaaacgtcgagtactcgacttacgcatggagcgcagacaatatattgtatgatgttttcgatgtacgaaatgtaggaaatctagcatttgaacgggacctcgaattagctttaacacttatcgctcaaaaaaccacaaacttcacagagcttagagcgcttaagcaaaaattcgagaaggtactttttcaggacagcgaccccctaaaaaaagtcatcgacaccatttcggagtatgtcgatggcaatcactga

SEQ ID NO: 86267 - DNA, 507 bp, Pseudomonas syringae pv. tomato T1
atgaagatttataaaactgaactcctttcccaactactgagaattcaaaataacaggtgcgcgtactgtgggttagggcttgatagaaacctcattgacagggagcattttgtgcacaaggatcaaaatggaggctggccggaattcatgttcgtggctgaaaaccttattgccgcgtgtgcatactgcaacagagcccttaaggggtgcacaacgacagttgcccaatactctgcaaactatgctgactgcagatttaatcttgtccaccctattctagacgaccctagagcagaaattgcgtttatccctgacatgcacggagacgccattctcgcgaaaagccttactaagaaaggtctcgacacgttgactttctttgagttgatgactcctatcatgacagcaaaaagagccgcatatttgctggaaataaaaagaatggaagaaatggcactcgccgattacaacgagttgagggctatatctcattacaagcctagctaa

SEQ ID NO: 86268 - DNA, 1344 bp, Dethiosulfovibrio peptidovorans DSM 11002
atgttgatcaacttgaccctaaacaatttcagacgttacgaaaaggctcatttttgttttcaccccaagatgaccattcttgtaggggagaacggaaaaggaaagacgaccatcctggatgctatagccgtcatgttagggacctactttcagggctcaaaaataaaaaccggccaaagtaccgttaaaaaagacgacgcccgcctgttgtccgtagagctcggtgggcagttcaaccttgaaccacaggacgacgtgtttatacaggcccggtcgacgatccggaacgaaaccatagattggatcagagaaatgggagacagagggggaaaagccaaggatatcgtctccataggaactcaagaccgaaaaaaagcggttaagggggagcccatcgatctgcctctttatctgtattacggctcagggcgtctatgggatatacacaggaacgtgaagacgggaaaacctggatctcgattggacgcttacagattctgcctcgatcccaagtcggatcagaaggccttcgaagaatggttcaagaaactgacgctggcggagcttcagaaaaaaaacagcttcaaaggcctccagaccgttcgaaacaccgttctccggtgtattcctaattccagcgatttctaccacgacgtagaaagagacgagcttatcatcgtgacagacgagggccccatgcctttcgatcatctttccgacggttaccgtaacatggtggcgatggtggcagacatagcccatcgagcctccaggcttaacccccacctagaggaaaaagccgccacaaggacgaaaggcatcgtgttgatcgacgagatagacctgcacctacatcccaagtggcagaggcgggtcgtatccgaccttcaggaagcgttcccggagattcagttcatagccaccacccattcgccgtttataatacagtcccttgagccaggacaggtcatagatttggaagcaaccgaagaaaaagcagaaagaacctgcgacaccggggaacaggcctcacctggcacgaccgctccatactccaacaggtctatagaggacatagtcgaggatataatgggggtcgacattcctcaaagaagcgagagatatcagaagatgtacgatgttgcaaaagaatactataaaacattacgagaggcccgagacgccgatgaaacaaggaaaaaagagcttaaagaaaagctcgatcgcctagcagccccgttcagcgaaaacgtggcctactacgcctttctggaagcggaacggatagccgccggagtcacatccgaagaggaaaaacgggaagacaaaaaatgcgaccggtag

SEQ ID NO: 86269 - DNA, 735 bp, Dethiosulfovibrio peptidovorans DSM 11002
atgcgaccggtagttagaggaaagcgtccaaaagaaaagggcaaacctatcgagttaaaaaagtatggctatgccagaggacacctaatacagaggatcggagaatactgctcatactgcgagacaaaattaaacacctctctggctgtagaacacgtcttgcccaaaaaagcgacggagacatccgaagaggaaggtaaaaggcgggagcttgattgggataacctcttgctcgcctgcaccaactgcaactcgacgaaatcgaatcaggaagtttctagagagaaatgtctctggcctgaccgagacaacaccttcatggcgattgaatactctgaaggcggtttggtatctcccaaccaagacatgccattgaacataattgaaaaagcggaaaagctaattcaactggtaggactggataaaaccccgtcggatgaacctatatacaggtgggaggcttctgatcgtagatggctccacagaaaagaaacttgggatatggcgacaagaaaaagagatcagttaaagaaaatcgaaccaagcaatgacgaaacatttaggaacataatcgtcgacttagctaaatcaaatggacgctggagcatttggatgacggtatttcagaacgacgaggacatgtgtcgacgattgatcgacggttttaacggtacgtgtaagggctgtttcgacgataacatgaagcctatacaccgagaaggcggactatgctga

SEQ ID NO: 86270 - DNA, 1191 bp, Providencia alcalifaciens DSM 30120
atgaaaatagaaagtataaaaataatagatgttggtgggatttcaaatcttgtattgcaaaacttaaatcaacaaataaatataatttgtggagagaatggtgttggaaagacaaatgtattggactctatagcatcttgctttagtgagtttgacaaaaatatcattagcaagaaatctgggagtgaaaacggttttattgaaatggatgtcactcaaaatgtagcccctaaggctttcgccctcaatattcaaatacaaaaattcgaaccaagtgcaaatgatcaatacattgttaataattcatacgaaaaaaataagaataatcttttataccttagaaccaatagaaacattaattacaaaaaaattagctcaataaaatctgatcctgaaattcagcatcgttctcgttatagcagctcaggtattgacaatgaagatatcaaagactggtttttgaacagggtattacatagcaagcatgaaaatcacttatcagaaactcaattagaaaacctcgaactttcaaaaaaatgttttagtatattaaattcaacttactcatttaatcgccttgatacaagaaatgagatttttctgatgactcccactggagagatatatcttgaatatctctcatcaggatttaagtcaataatctttattcttttagggttaattaaggaaattgattatcgttttgagaaagataaaatatcagctgaatgttatgaagggataattttaattgacgaaattgaacttcatcttcaccctgaatggcaaggaaaaatctgtggtattttgaaatctgtctttcctaaagctcaattttttattacaacacatagccctcatgtagttcagactgctgcgtatggtgaggttatcgctcttgaaagaagtattgatggaattgttagtcaaagatctcttccaagctcaaaatatggttatcaagggtggacgattgaagagatacttgaagatatcatgggtatgccagatttaaggactataaaatataatcaggttaagagaaggtttgatattgcacttaatgaagaagataaaaaagaggcgctgtcggctttccaagaactagacaaaatgctacatcctcaatatccacttcgtcccgttttcaaaatgcaattagataaaatttcggatgatgaaaatgattaa

SEQ ID NO: 86271 - DNA, 729 bp, Providencia alcalifaciens DSM 30120
atgatgaaaatgattaagctgaaacgggtgttgaagcctatatatctcaccgatgctaaagttaaagaattaactgaagagtttaaaaaagataaatcaaaagctgtctggaaaacaaaatcaattggagatgctctattaaagagcagttcatataaatgtgcatattgtgaatgtgaattacaaaaagaagattcatatatgcaagttgaacatttcaaagataaagataaatatcctgatgatgtagtgaaatgggaaaatttgcttccttcctgtgctcgatgcaaccgtaaaaaatggactttagatgtcaatttaaatccaatagtaaatccttatgatgatgatcctagaatccatttaaagcagcaagcatttagactatatggtaaagatcttaagggagagaataccatagaaaaactttatcttaatgatgatgatcgtgttgtatattcaagatttttggcatcaaatgaaataagcaggcaattatctgaattgacaaaaatatcttctaatttagaccagttaagaaatagcatgactaaattattacaagcctgccaatctgataaaccctactcagcttttactgcgtatactttgcattcaaataaagattatggaaagttaaaggatttacttttaaagaataacatgtgggatgcagatcttatcgagttgcatgataattcatcttatcttcaattagatgccagataa

SEQ ID NO: 86272 - DNA, 1212 bp, Arthrospira maxima CS-328
atgcaaatcaaccatcttaaaatcactaattttcggggctttgaacaggcagaatttgaatttcagccaggaatgaacttgattgttggtattaatggagtcggcaaatctagtgtcttggatgccttgcggattgccttctcaagaatcctccctgaattgacagattgtcaagagagacggattaattttaatatcgatgatattatgattggcaaaactgaattaaaggttgaaataaatgtggatatatcaggaatcccttttcgatgtaaagttagccggggaaaacgccatgaacaggaacttaaacctgacggttaccaaattttaggacttataaaagatgatccaaatcaacccctcgttgtatattgtgcaacccggcgctcaatagttacagaacaagacttaaatcctaatcgaagtttaggtaatcaatctgcggcttttgttgacgcactcattcctagaatgctacgtcttcgggaatttatagattggtggttagtccaagaggaacttttagacgaaaaacctcagttaacccagggtcgcattgatgctttaaacgatgccgtcacctgctttttagattggtgtaataatgttcgtgctgttccagcctcggacacctacaaaaaaccaaccttgctacttgacaaaaacggggtaacactaaatattaatcagctttcagacggcgaacggggtattttagcattgatacttgacctagtacaacggctgttgcaggcaaatcccgaactcgaaaatcctgtacaggatggaaaagccgttgtcttaattgacgaattggacttgcatttacatccacagtggcaacgcatggttgtccataagctgacagaaatctttcccaactgccaatttattgccaccactcattcaccgcaaatgattggagaagtcaaaccagaaaatattattattttagaccaagataaacaaccctatattcccgaccaatccttgggtatggatagtaattggattttacgctttcttatggaaactcctgagcgtgatatggacacccagaaaaaattagaggacgttgaatcattgattgctgacaagaatttttcagaagcaactgaaaaaataaatagtctccgccaattaggagaatttcccgaattggtacgcctgcaaactcgcattgatcggatcagccgattaggtaaatag

SEQ ID NO: 86273 - DNA, 720 bp, Arthrospira maxima CS-328
atgaaatacatcaaaaaagaacaagaacctgaaaaattacgttcctggtttaacaatcaatatgatcaagaaggaaatcgcctgggttgcgactactataatgacgtgccaagcgatgtcaaaagggatttaaaagatcatctactgggagagcaaggctttctatgttgttatacaggtatcttgattgatacagatacttcccacattgaacacctcaagccttattctatatgtcgggacgagaaaaattatgaagatgtcaactatttgaatcttgtaacggcttatcccggtagaaattataagtctcaagatgatgaagttaatcaacctagcaaaaaaagcaagaagaatagcaagaaatgtccttttggagcgcacgctaaagacaattggtatgaactggacaattttgtaacaccgttagagtcggattgtgaagacagattcaagtttgataattctgggaaagtcgaagctacaaatcatcaagacacggcggcacaaataacgattgaaaaattagtgttaaatcatgagcgattgatagatttaagaagggcagctattgatgaagccatattccctcccgatactgaattagatgaatcagacatcaaggaaattgctaatggcttatattcccaaaagaatgcagagggaaaatttgctcagttttgcttcgtgattgaacaaattgccaaacaactggtataa

SEQ ID NO: 86274 - DNA, 1629 bp, Vibrio albensis VL426
atgatgcctagccacccaaatcggcagattaataaaatagtattgaaatcggagtctggcagttttgctgcttctgcgcagttagtgcagatatattctgagggcatgatgggggaacctgtcgatgtcgagaaggttcactactatcgcataaaatgtgccgagcagctaactagtgcaaacctaagattggcttcattaaaattaattggctacagagggtttgaatccttagatattactttcagtcaaaaatcaaatattactgtgcttgttggtaacaatggtagtggtaagtctagcatattagatgccattcaaaaatctcttacacactttgtttcgcgtttatctacaagatcttataatggtgatcagttagatgagctcgatatttccaatggtgcaacttttgtgacagtcattcctgagtttaaggttgcggaaactagttttagtttcgagctatctcagagtcgtccaatgatagagcctagaaaaaaaagtaagtttacggagttaaatgaaattggaaatttgtaccgccttgcgaatactgaaaagaaagagctttcactcccactgttagctagttataccgtagaaagggctaatgatgttacgaccaaggatattgaagaatctgacgaaatactaagtagtcagatttgggacaaatctaaagcttatagtaaaagtttaacagggaaggctgacttcaaactgttctttcgttggtttaaagagcaagttgagtctgagaatgatgaagttagtgatattaaagttattaaagcgcagatagaatcgaaagaaagtgaaattaacagttctttaatgaaggctattctgtctaatcctgaaactgccgaaactggtgaaattctgatcaagcagtacaaggatcagattaatgatcttcaagaacaactgaatgagaagtctaatgttggaaataaatcgttagatagtgtgagaaatgcaatttataaatttcttcctggtttttctgatctcaagctgaaaagagctccattggatatggtcgttaaaaaagatggacaagagtttagcgtattacaactgtctcaaggtgagaaaagcgttcttgcgctaatcgcagatatagcgagaagacttactatgttgaatccgtcattagcgaacccacttgaaggtagtggcttggtattgattgatgaagtagatcttcatctccatccgtcgtggcagcagaagattatgcaaagattagaaagcacttttcctaatttgcagttcatagttacaacccacagcccacaagtctgtcatacacttgacagtgacaatatatggttacttaaagacggtaagaagtttaatgcccctaaaggcgttagaggagcggtgtcctcgtgggtattgaaaaacctcttttatgttgaagagcgtccccctgaagatgaaattactaaacttttcaataagtacaaagagttggtatacgctgataaatatgatagcgaggaagctctaaatgcaagaaaagtactaatagataattttgggaaagactatgacgaaattgttgagttagacctgtatatcgaaaataaagagtgggagaaacagtttgaggaggattaa

SEQ ID NO: 86275 - DNA, 774 bp, Vibrio albensis VL426
ttgaggaggattaacaagtctaccgatagcaacgttctcacagagtacgctgcgaagttccctgactctaattgggatgattttaggctacataataatggagaatcttacgcaactataaaggctaagattttttctgagcagtatgatatttgcgcatattgtgaagtgggcttgaaagatgagcctaaccacaataagagaatagaacactttgtgtctaagtccgtcatttcctcatctcgcaatgtccacttagattggtttaatcttattggagtttgtttagggggaacagattataaaaatcgtgaaaaatatgagttacctgaaaacttaagttgcgattcacacaaagcgcatatagaggaattgagctcgatagctgataaagattggaatggtaaagttctatctcctctaagtattcttcaggatcatgggttgtttgattttgataaagttacaggtaatctgaaaccgaatttacaagcatgcaatgagcaagttatagaaggcaattctcatgagacgacactattgcttgttgaggaaacaataagagtttttaacttgaattgtgaaaggctaagcgcagctcgcttaaaattatttcgccagcttcaaaataaaataaaaacagctaggaaaactggcgatagggggattatcgagagatttgtcgctagctggaaacgagatttccctctcttttttcagactagtagagatgtaatactacgcgacaataaaatcacctctagttttttatga

SEQ ID NO: 86276 - DNA, 1308 bp, Actinobacillus minor NM305
atgattgattatttaaagctacagaatgtgggtataaaagatctcttagaattaaatattgcttctcgtttgaatgttttaactggagataatggcttaggtaaaagttttctgttagacattctttggtttgtgctttcggggcattttccccaagagataaatcgtagtattcagagtggttatgtggctaagccattaaatatttccgagcgtgcatttatttctgttcaagataccaaaggacaaactgaaatatattcatacaaatcagaagagtattggtctagacatttggatattgatgatatgtctagagctaaagcggaattttctgatattgcaatttatgtaatggcggatggtagctatgcattgtgggatagaaatttgaataatttcgctaaacataatggaatgcttcgttatgatggctcatttactcgtaatagacaattggcttttgtttatacccaagaagaaatttggcaaggagtaaatgacaaagaaaataatcagttttttaacgggctattacaagactggcaaatttggcaaacaggaaagacgaaagagtttgaacaattaaaatcagtattagccattctttcggctactaatgaagaattagaaataggggaattaaaaccttttagtttgggcgattctcgactttatccaactattaaaatgccgtatggcagagaaatacttttgccacactgttcatcagccataaaacgaatggttactttagcttatttccttgtgtatgcttggaaaaggcatagtgagagcagtgaattattagggaaaacgcctgctaagtctttaacctttttagtcgatgaagtagaagcacaccttcaccctaaatggcagagaaaagttgtcccctctctattaaatgttataaaaagtttgtctaaagagattgatgttcaattagttattgctacacattccccattggtaatggcttcattagagcctatttttaatgagaaacaagataaatggattgattttgatttgaacaatgaagggagtattgaagtctcagaaagagtgtttgataaacaaggtacggttgaaaattggttagaaagtgaggcttttaatttaccaagtagtcgagcccctgaatatgaagatttaattaatcaggcgaatacattaatgctaaatccaaaagccagtattgatgaaattaatcatttaagagttgagttagtacaagcgttagatgaacgagatgagttttggacaccttggctgatttattgtcaaaagagaggggtattatga

SEQ ID NO: 86277 - DNA, 588 bp, Actinobacillus minor NM305
atgatccctatatcattgcaacccgaacctgataacttcgataggaatgttcgtcaaaaaggcgctaaatggcttcaggaaaatactatattttcagaacttccttcttattggcaaaaatgcttagatgacttatatatcgcatacgatggtgtttgtgcttattatgcgataaaagtagatgaaattagtggataccgtacggtagatcattttaagcctaaggctaaatatcctcatttggcttatgaatgggataactatcgctttgcttgtggcagtgcaaatagtaaaaaacgtgattttgaagatgtgttagatccttttagtttgccagataatctcttttacattcattttggcacgggagaggtgctaattaatcctcagatggataatgaaatcactcaaaatgcggaaagaacaataaataggttatctttgaacgataataggcttaaaaacagacgaaaaaaggattttttacgttattatcaagaaaaaagtatatctttagatgaattaaagcaacaaaatccttttgtttgggctgaaattcttagacaggatttagtaagaaacgattaa

SEQ ID NO: 86278 - DNA, 1368 bp, Acidovorax delafieldii 2AN
atggcggtaattcactccgcacgatttcatacttgggacaagcaattcaggtcagttgacttgttgctcgagacagactcgcccagggcaaacacctttgcgacgacgtttattacaggccgcaacggctcacacaagagcacgctgctgaaggagatcgtctcaggattggcggtggtcggacgcattgatcgtcacgaagcttcgtctgtacagaacccgggccgtgatcaagttctttgtgtatcgggttctgtggccgaccggtttcctcagaaggaattgcctggtggcactcgtagtccattcgacgtccccaactacacctacgttgggcaacgagttatcagcaacctgcttagcaagaaggcacctctggagaccatgctcgcttttgcgctcgatcccacgaaagcagagcgttgcagatgggatttctttggcgccgcacatcggcacgcgggaattcgaccatctgggaagtacaccttagaggcccagcgtgaatcggcaaagaaggcgcgagccccgatgagtgacttgcttggcatcgtgcaaggtgtgcgacctgagtccgacggcaatcgtaagccagctgcagatcgcccgcatatttcctacgccacagctcagtggctcctgcaggaattcagctatgacgagtttttggcactgcaattcttcgtgaataaagggaagcgtcgtgtggcggtcacgctcgacgagacgggggctcactgccaaggcatcgagcccaacgtgctgcgcctgggattgctcaccgatctcgtgcgcttagtggatgtaaccgtgaaatcggcaggaggcgatgccgacttctcggcgatggagttgagttcgggcgagtaccacatgttctccaccatcctggcaatcggcttcggccttgaggacaaggccgtcctgctgatagacgagcccgagaacaacctccatccgcagtggcagcgggacctgatggcgacggtcttcgacgtgtgtgcgggggcgatgaagacggaaggacatctcatcgtatgcacgcactcgccgctcatcgttggagccgctccggaaggcagttctattgttgacatgagtagcgatgcgcctcagaccagcgtggcgtcctacggtgcttcctctgacgagctgcttctttctcagtttggcatcggctccagccggaacaaggtcgtcgtggacaccctacagcgagccgtgtcgttgatcgagcgaggagacttcgagaatgcagagttccaaggattgatgccggagcttaggtcgatccgtgacgcgctcactccgcacgacccaatggtcgatgtcattgatgcactcttggacgaaggtcctcagcggtga

SEQ ID NO: 86279 - DNA, 735 bp, Acidovorax delafieldii 2AN
gtgaacatcggattcgaaaaaatcgctccgacccccggctatcctgccggaacgacggccgctgcgttgataggccttacatgggagtccagagcaaacgtcgcgatcgcgttccgtggcgggctgaagcttgcgctcaggacggtgcagctaggacgctgctgcttctgccgacgtcatctctatgacgactacgcgactcaccttgagcatttcgtggacaaggcgacgtttcctcggttcgcgtacgagattaggaaccttgcgctgtcttgtgggacctgcaatatccggaagaatgcatatttctcgacttgggaccgcagatacaggttcatgacgagaaacttcgtcggtccagtgctgattcgttgtcctgtgctcagcgttgcgctcaactcttgcgatgccttcccggcgattccggctaatttcagctgggtcaatccccacttccacaattactcacagcacatattggttgcgcgtggttgggttttcgaaggtcagtctccggaaggcagacggacaattcgtagcctcaagctgaacgaagttggtcagatcgagcggcgggcgctggccgagcgccttgaagcgcgcggtggtgccttgtcaatgctcgtcggtgcgatctctgtgctggaccagcatcgagcaaatgatgtgaaggacgcgatcatcaaggtgattcgacgtcgtcgagaggcagccaaagccagcggtggaaactag

SEQ ID NO: 86280 - DNA, 1371 bp, Zymomonas mobilis subsp. mobilis ATCC 10988
atgaacgcatacggagaattttgtggaaataaaaaaataagtattaaaaatttcagaggcattcaaaatgccgattttgatttttgcaataaagttaatctaatagttggtattaatggcgcaggaaaaacgagtgttttagatagtatagctctattattatcatggcttattaacagaactcttaataaaaattcttcaggacaaccaattaatgatttgagtattcgtaatgggtgtcgggaggccgctctttcgataacagtaaattatgataatcaagattttaactggatgcttgtaaaaacagggagaggcttaaatgctagatctcagaaatcagaactttctctcttggcggctctttccaagagattccaaatagagttggataataaaaacgatgaggcttcactgcctttgtttgtctattatcctgtagatagggcaattgtaaaggtacctattcggcgtcgaagaagacaggcttttagtcaattatctgcatatgatgaggctcttaacccaaacgtaaattttaaaagtttttttgaatggtttcgatttgagcaagagaaacataattcttctttagctaatcttctgcattctatggatttgtcggatactgattccctgctttttaaagctacaaaatacagaaaaactataaaagaaattcttaaggaattatataatcctctatcttctaaagggttgaaggcggtatgccaagctatttatgaatttatgccaggattttctgaccttagagttttatacgagccattaagaatggtgatcgaaaaagaaggtgtgcatttaaatctccttcaactctctggaggagaaaaatgtatgttagcgttaattggagatatcgcccgacgacttgttctagcaaatcccagcatggacaatcccctaaaaggtaaagctatcatcttgatagatgaaatcgatcttcaccttcatccaaggtggcaaaaaaatattatagaacgattaaattctacatttcctaattgtcagtttattataacaacacactctcctcatattataactcacgttcattcaaattgtatatccatcatttctacaaatgaaaatggagcttttaatgtaagtaaggctcgaaattcttacggattttcttcagaagttcttttgtctgaaattatgggactggacacaacgcgtccccaaaagatccaagataaattggataaaatttttcaaaatatttcagacaatgaactggatgaggcagaaacaaagctacaatgtttaaaaacaataatgagagacgatcccgatgtcgtaaaagctgaggctcttatttttagaaaaaaaattatcaataaatga

SEQ ID NO: 86281 - DNA, 618 bp, Zymomonas mobilis subsp. mobilis ATCC 10988
atgaaacaaataaaaaaaacaaaagagcctcagtccttttctgaatggaaggctaaagcaaattctgattggaaacctgcatgggaaaatttacagaatcctgaaaaagtagatattttagaaaagttaattgaagatcaacatggaatatgttgttattgtgaagctagaatctctgtagaatctgcacatattgaacatatagttccaaggagtattgatattagaaaaaggttatctttttctaaccttttagcatcttgtcaaaaagaaactcaaaaaggggatcctctgacttgcggaaaatctcgtggcgattggtacgataaagatttttatttgaatccatgtgatgagaattctcgaaaagaaattatctacttattagatggaaatgttacggtacaaaataaaaattttaaaatttttatcgaaaaaatcaatttaaatattgagtcaaaaaaaagagcacgttctaacgttatagatatttttacagatttagatactagcgatgcccaaaaaatattggacgtttggctctctgaaaaagtatatcatccttatataagtgcagctctcactgctgctaaagagttatgtggaattgaatactga

SEQ ID NO: 86282 - DNA, 441 bp, Arthrospira platensis str. Paraca
gaaaatcctttacaggatggaaaagcgatcgtgctcattgatgaattggacttacacttacatccactctggcaacgcatggttgtccacaaactgaccgaaatctttccaaactgccaatttattgccaccactcattcaccgcaaatgattggagaagttgaaccagaaaatattattattctagaccaagataaacaaccctatattcctgaccaatccttgggtatggatagtaattggattttacgctttcttatggaaactcctgagcgtgatataaacacgcaaaaaaccctagaaaagatagaatcattgattaaacagaggaattttccagaagcgactgaacaaatcaacagtctccgtgaattaggaaactttcctgaattggtacgcctgcaaactcgcattgatcggatcagactattagggaaataa

SEQ ID NO: 86283 - DNA, 735 bp, Arthrospira platensis str. Paraca
atgaagtacatcaaaaaagaacaagaacctgaaaaattacgttcctggtttaacaaccaatatgatgaagaaggaaatcgccttggttgcgactactatgatgacgtgccaagcgatgttaaaagggatgtgaaagagcatctactaaaggagcaaggctttctatgttgttatacagggatcttgattgatactgaaaattcccacattgaacacctcaagccctattctatatgtcgaaatgagaaaaattatgaagatgtcaactattttaatcttgtaactgcttatcccggtagaaattataaatctcaagaggatgagaatgatgaatatgatgaacttaatcaacctagcaaaaaaaacaagaatagcaagaaatgtccttttggagcgcacgctaaagagaattggtatgaacgtgacaattttgtaacaccgttacaattagattgtgaagacagattcaagtttgatgattttgggaaagtccaagctacaaatcatcaagacactgcggcacaaataacgattgaaaaattagtgttaaatcatcagcgattgatagacttaagaaaggcagctattgatgaagcaatattccctatcgatattgaattagatgcctcagatatccagaaaattgctaatggcttatattcccaaaagaatgaagaggggaaatttcgtcaattttgcttggctattgaacaagttgcaagacaactaatataa

SEQ ID NO: 86284 - DNA, 1644 bp, Pantoea sp. At-9b
atgcaaggaaagaaaaggaaaccaaccagaactgtagctgaaaaaatcgaaggggcagataaaggacatttaggcgatatgtttgaggtcgcagaatggcttgaaacagggcgctattctcttgatattaatgaacagaaagcatctgaatattacagccgtatagatgaagcccttcgtgaaaaaaggccatttttttccactttagaattagtaaattacaaaggaataagaaaaaccgtcaagaagatcacttttgatccacatttaaatatttttgttggtgtaaatggcagcggcaaaacctccattattgagtctctagtaaaggcctcaacatggctagtaaatggtattaggaatagagccaacgggaagggaattgatctaatagaaataaataaagctgaagactctaaagattgtgccattacaacaacgttatctcttgatgaaaaatctacatttacactagagctatacaaaaataaaaatagcaaaggtaaaagtagaggatcattaagtgagtttaagaacttagctgaaatgtactactcacataatagcaatagtcaaggcttagcctgtcttcctcttttttgtcactattctgtcagtcgtgcattagaaatcaaatcagatgaccaaaaaaataatagcgagatttacgcttttagtaatttagatggctataactcttcatttgaagagtctaagaatttcgggcaattgctaaagtggatgttattttgtggcgctcaaaacaatggcgagctagatgatattaaaaacacacttagatcattggaagttaaatataacactacttttgatatatataattttttagcagaagaaacaaaagaaaactctcaaatagcagaaaaaatacgaaatgaactagattctcttcgttcagaaataaaagaacttcaaataacactgaaaactgccgatagtaatattgttactattgtcaaagaagctatttacaagtttatgaatattgacaatataaggatgaaagttgataaaaccagtgtttcaattttgctcgataaaaatggcataaccatttcagccacagatctttctcaaggtgaaaaggctctattttctttagtgagtgatattagtcggagattgatactgctcaatcccgataagggaattgatgctttgaatggttatggcgtggtgataattgatgaaattgatttacatctgcatcctaaatggcaacaagaaattgttggaaatttacgagatacatttcctaacgtccaatttatattaacaactcatagtccacaagtcttatcaactgttcccaatcattgtattaaaattctacgcaatgacgaaaatggaatgctgagtatagatgaggcagagttttcacttggttcagaatcagatatgattcttgaggatatatttcttgttaaatctcgtcccgaaaatattgaacaagtcaaaatgcttaatcgatatcaggaattggttgttaacgaattatgggatacagatgaagcgaaagaattaaaaacccaactggaggaatgggcaggtaagcatgatccagttatgaaaaaaatccagatggatgtaaggctccgcgaatttagaagagggaagaattaa

SEQ ID NO: 86285 - DNA, 777 bp, Pantoea sp. At-9b
atgaaaaaaataaagaaaggaagtgaacccagactcttatctgaatataaattagcgaatcccactagtagctggaaaacgggcttcagacagaacgctggacctgaagcaattaaatccgtcactgataaccttaaaaatcaacagtttggactttgcctttattgtgagatcgacctcaaagatgcggaagggattggattcgatgattttagggtagaacatttctttcctgaaaaccccaaaaaaaatgagtcaagaaatgatgggattaattatgctttgcattggccaaatttatttggttgctgcactggaggaaatacaccatatgtagtagacaaagaggaaaggtatagcaatccagaaactcattgtgacgtgccaaaatcgaacaatgactggacagcaatcattctagatccaactgttgatatacctgcttttccgtcactctttcagtacaccgaaggtggtactattttggtatcaagtcaatgtcctgtagaaaagatagatagagctaataataccattgaacatttgaaccttaattcgaataaaattaaacgctttagaagtgcaataataagtaagataagggatgaattacttttatttactgataataacttgcaagatggattaaaagaactatctaatgtttatcttttacccgataatgaacatagactatctccttttttctcagcgatacgatggtacttaggcccagcagcagaaggagttttacaagaaactgaatatgatggttga

SEQ ID NO: 86286 - DNA, 1329 bp, Mesorhizobium opportunistum WSM2075
atgtatgtcagaagcttgaaagtgtcgaacttacgatcggtcgccaaagggagactcgatctcgtttatcctggtcgagcgtgcgacggtccgtttcaaaagggctttcccaactggccgcccaagctgccaaacgtgaacgtgctgctggggatcaacggcgcaggcaagagcaccatgctcgacgcgatcgcgttggcggcaatgtctccagtcgtatccgaatcctcgggcttccgaccctatgccttgatacgtcgcgtagcgtcgggtgatgcgcccaagactgcctctattgatgcggagatcgtggtgcatccgcaggatattgtggacgctcccaagaagcggacggaggtcatccgggaaattggggcgaccgttgagcgccggggcgaccttgaggtcctgaaagcggttcagcatccggacccattgtgggaaggcatgttcaaggaccagtcgccagccttcctgatggtgggatatggagccactcgcagagtggagactaacgctcaagtcgatgaggcgcttcgatcgcgcactcgagtgctccgatacgagcgcatagcctcgctcttcgaggaccacttcacgttgcgccccctctcgagctggctcccggaatggcaatcaaagaacccggggcgctataagcaggtcgtgacgctcatcaacaagctctcgttgaagcacatcaagttcacgggccgaatcgagcgcggcgagtatctgttcaaggttggacggaacctcgttcccttcagcgccatgtcggacgggttcaaggccttcatcgggtggattggcgaccttttgtatcacgtgtgcatgggttgcccgagcggcaaacggctggtggacaatcagggcgtcgtgctggtcgacgagatcgatctgcacattcacccggaatggcagcagacgatgattccggtgctcgctctcgctctcccaaatctgcagttcattttcacatcgcatagcccattggtggttggatccctcgagcgcgccaacatcatccatgttgagacgggcgccaacggaacggcgaggatggcgcgaccggatgaggagatctacgggaagaccgcggatcagatcctaaggtccgacatattcggcctcaactcgactcgcgccccggaatttcgagctcagctggacaagctcgcggaggcggcgacggatggcgacagggaggctgcgctcgacttcatgcgcaaggcggcgcgaggcagcggcgcgacggaggcagctcgatctgacgaacagcgcgagatgccgagttggctgaagccctcttcaatggcgggggagtga

SEQ ID NO: 86287 - DNA, 900 bp, Mesorhizobium opportunistum WSM2075
atgatccgctacgccgatgcgacactggagaaagtcagcgccatggtcgacgccgaaaagcccacctggcgctcgaatgccgagactcgaaccgccgcgatcgtcgcagccggcgcctttagtaagggcgcgccttcctggagcgacatcaaggcaatcttcatgcgcttccagtccaacaagtgcgctttctgcgagttcccgctcgggggagagttcgctggcaaggcaactcaggacgtcgaacatttcaggcccaagaataaagtaaaggcttggcccaataaggccaagaaaccctcctacgcgtttagtaccggaggtaccggtagcggctactattggctcgcgtacgatctttctaactacgctgctgcctgcaaggcctgcaacacggcaaggaagtcaaactacttccctatcgctggcgcaagaggcgcagcagccagcactgcggccgaactcaacgctatcgagcggccctacctcgttttccctttaggggaaacggatgaagatcccgagtcgctgatcaccttcgcaggcctggtcgcgttgcccaagcaagacgcggatagccatgcacatcgtcgcggcaggatcaccatcgatttcttcgcgctcaatcagcgcgaggagctatgggaggatcgctttcgaacaatctatgccctcttcgatgccgtggagataatgaagacgagcgccaatggggaacgtctcgaaatcgcgagaagaagaattgaagacatgacctcgaccgcaggcgctcaggcatcatgcgcaaggtctttcctgcgactgctcgagaccgatccgcagaaggcctgggactactatgtggcggccgaggaattcatcaccgacaatcgaaagaagagggcgcccaaactgggctga

SEQ ID NO: 86288 - DNA, 1371 bp, Mesorhizobium opportunistum WSM2075
atgagcgccaacgacgcaaatttcgtctactactgcgagctgcggctttccaacgtcaaggccttcaccccaggaacggtgctcgatctgcgcctcgacggaaggccggcgccctggacgctgatcctaggtgagaacgggctgggcaagaccaccttgctacagtgccttgcattgatgcggccgattttgaatgtggaacagagcggaaagaccgacgcacgtcctccggatcgcgtcgaaccggctctgccaatttacgatgacaatctgctggtcgagctggcgcgaattggtgacgagctgcaggtggaacttgaggccgagttctcggttggtcgggagttgcgttccagtgagctgccgaaaaatcacagcaagccggttacgacaggcgccacgtttcgaaccaagcagagagacttgagtgaattcgaattcacgaatgtcaagcggcgtgacgttgtagccccgttgctggttgcatatagcgcggctcgccatccgccttaccggcgcagcgaggtggttgcggatcatgatgatcccgcagcctcgctgttcaatcccgagatcgaacttgcggatgcagtgcaagttttggagaatctcgaccatctcaccttgcgcaaggacaagcagtcgaaggccctctacgtcaacatcaagtctgcgcttgcggaaatcctgcccgagattggggatcccaagcgcattcacgtttacggcccgccatcgccgagccagcccgacaaaccatcgggtgtatggatcgaaacctactccggtgaagttccgcttcagtcactcagtgtcgggtatcagactatgtttgcctggaccgttgatctggcgtggcgcatggctcaacaccacaccacctctgaagatccgttacgcgagccagctatcgtattgatcgacgagctcgatctgcaccttcatccgaaatggcaacggcgcattcgccgcgatctgtcaaaggtgtttccgcgagtccagttcattgtcaccacacacagtcctgtgctcgcccaaacatacctcgacaccaatatagccgtggttaagcgcgatggtgatcatgcgagcatcgacaatgatccaaaaacagtaagcagttggcggctcgatcaggtcagcgtcagcctgcttcacgacctcgatccctattcgccagagatcgtcgaagcgttccagacacggcgcgcattgctcggcaagaaacggcttaacgcaactgagaaggcgcggctcaatgaggcgaatatcctggtcgcggctatcccaagtgaactcgatccagatgacctgaaggcggccgaactgatccgtgaagcggcccatctgcttgcgacacggccgaaatga

SEQ ID NO: 86289 - DNA, 786 bp, Mesorhizobium opportunistum WSM2075
atgattggttacacaaagtccacgaccgtgccctcgtcgctcaaacgcggcgttcgtgccaataccgataattgtgacgcctatgacgccgacccgacagcctacaccaaaggcgtcgcgaaattcgatatctcgaacggaatctatggcaccgacgtcgtaaagcggcgcctgaaggctgatcagcacgacaagtgcggcttctgcgaagcaatctttgacgctaatgtagccggtgacgtcgagcactaccggcccaagggagcaattgatactggtggtggaaaaatctaccccggttattattgggttggatatgcatggaacaacctttcctacgcatgtcccgactgcaacgaatatcggaagcgagatcgttttccccttgcagttgagggagctcgggcgcgaagtcaccacgacgacctcaccaaagaggagccgctgctgattgatccctatggcgaagccgatccacgccagcacatcgtcttccgcggcgaagcacccattggactgacaccacaagggaccatcaccattgaattgctggcgctcgaccgaaccacgctggggcgcgatcgtctgttgtatctggaaacattgagtgttctgtatgagagtgtggtgcttcttgagaacgacgtgcggcccgacgccgtcgatttcgtggcgagagttcgggcacagcttgccgcagcggtcctgccgaatgcgaaattcagcgcagctgccgctgatcacctaaccgcatgcgctgcgggcaagacgtatttgcctacctag

SEQ ID NO: 86290 - DNA, 1662 bp, Vibrio metschnikovii CIP 69.14
atgaaagtcgataaattacatattcgctcccgttttaaaaaccttgaaaacgtaactgtggactttgacgaagaccacctgatgactgttgtggtaggccgtaatggctcgggtaaatccaacgtgctggaagccttggtcgcgatatttcgtaacctcgatttgggggaagtaccaccgttttcatacgagttagtttatcggcttggcgaaccccacaaacccaagcagcccagtgagcgctggctggaaataacgattgatgccgacccaacacgtggcacaaccgccaagcagtaccaagtacatgtgcgcgacttattagcagatgacacagatgatgacatgtttggtgagaaaccttcaggcagcgccattccgttttcaaaagtgaagcgcgacaaagaaggtaaagctccgtatttgccaaattatgtatttgcctactattcaggccccagtgatcgtttggaaaaccattttaagaaacatcgcaccgatttttaccgtcgtttattaaaagatgaacttgaccttaaaggtgatatacgtccgctgttctatgccaaaccccatcacagtcaatttgttctattagcttttttcttgtctgagcaagacagcgcagaaaaagcctttttgcgcgagcacctagatatcgaaggcctagatagtattcattttgtgatgcgccaacccggttgggccaaacagaaaggtgaattgttctggggtgcacgaggcgttgttcgtcgctttttagatgagctgataaagtacacgctgtcacccgttaaggtcacgcgccaagaagacacctctttgactggcagcaatattcgcaatgagttctttcacctgtttttgtccgatgtaaacgcactcagagagtttgccaaagaccttagccctgatgaactgtttaaaatgctcgaaagtacactactttccgaaatcatctctgaagtaagtattagggtgaaggtatctagtagcaaagagccactcactttccgagagctcagtgaaggtgagcaacaacttcttaccgtattaggtttgctcaagtttactggaggaaaagactccttgtttttacttgacgagccggacactcatctcaacccctcatgggcagtgaaatatcttaaatttctgagcgagtttgtgcctaaccacgaaaccagccatttgctgatggtgacacatcacccacttgctattgctgaattaaagaaggagcaagtgcaggtcatgtggcgtgattctagccttcaggtatatgctcaagaacccgaagaaagccccagaggtatgggatacggcggaatactcactagtgatatgtttggtttgcgtacaacgctggataattcaacagagcgattacttcgcttacgtcgacgttttaccgaaaagactgaattatcacctattcaggcagggcgtttgaggaagatcgacaaagcaatagaaggtttaggtttcaccactgcccactgggatgaagaatatgcacaatatttgcgtatgcgcagagaagtggaacgggaatctgaagtcgttactgaaacgccagaacttaaacagattcgaaaggagcgagccaaagcgattgttcagcggatgctggctgccgaagaggaagaagacagcaaatga

SEQ ID NO: 86291 - DNA, 864 bp, Vibrio metschnikovii CIP 69.14
atgaggcacttagacattgatttcagccagctcgaacttccgcaaggctggagagataaagctcagcagctttcagactcactgagagatgcaaaaaatgaaaaacaacgatctgatattataaataagaatcaggatcactggaaagtggttaaaccattattagcctccctgttcaactataaatgctggtacacagaagcacctcagcaggggacagatgttgatgtcgaccattttcgtcctaagaagcgtgtgcaagaaacactatcgacagtaacacctcatgagggttactggtggttagcattctgccttcaaaattatcgatacagctgtatagttgcaaatcggcgccgaaccgatgtggtaactggcgtgactggcggcaaagccgaccacttcccgctttgcgatgaaagcaagcgagctcagactcctgactgcgatttagaggatgaacaagccgtactgcttgatcctctgaaagctaccgatgtgcagttgctacaatttaagcctgatggtgaagctatgccccggttttctaaagaaaaacatgctcgtaagtttatgcgtgcagaccaatcgattgtattttataacctcaatcactcagatttcgttcgttgccgcattgaattacgtaacaaaattgataaggacgttagtgctgcaaagaggtacttcaacaaattagagactggcgacgcagacaatgacctcgcgtatgagcaagcaatttaccgcttgtgcaaaatgcgcagcaaagaagctccattttccagtttttgtatagcttacatggatgaattcatgcataaacccgaatatgaaggcgtacttgatgcagtttatttataa

SEQ ID NO: 86292 - DNA, 765 bp, Neisseria polysaccharea ATCC 43768
atgaataaatttattgaaacaaaatcacagactgatttattttttacaaacgctgtgccatcgataggaaaagatgctttaagaaaaaaaataaattatttggatatccaattaaaaacagttaaagatgcagtacagaattttactaattttgaaaatattagggttcaaagaaaacctaaattacgcatgattgtaaaaaaaaataatctagaatttgaagtttcccaactctcccaaggcgaaaaatccctaatggcattgataggcgacattgctcgtcgtttggcaatgcttaacccaagtttggagaatcccttgaatggacatggtattgtaattatcgatgaagccgatttacatctacatccacaatggcaacgtcaattaattgaacgattgaccaaaacctttccaaattgtcaatttgtattaagcacacattcgccgcttgtaattagcgatagtaaggatattattgtttattcattagaaaatggagaaatacaacaagtatcatcacaatatgggcaagatgcaaacacggttttattgaatgtaatggaaacagctattcgcaatgaagaagttacccaaaaattgaatcatttattggatttaattcaggataatcaattggatgaggcaaaaattaagttaactacattacgccaagatctgcctgaaaataatttagaattagccaaggctcaacttttactcaaaaaacaggaaatccgttatgagaaaaattcaaaaagctga

SEQ ID NO: 86293 - DNA, 432 bp, Neisseria polysaccharea ATCC 43768
atgaatgagcatattcagccacgccatcattaccccaatttgtctatggattttaataatattgtagcaagttgcaatcaaacagggcattgtgacaattcaaaagattcgaaaatccttccacttacgcctttgatggacgaatgtgaaactgaatttgaatttagaataaatggtgctgtaagtggtaaaacagaaagggcaagaagtgcaattgatattttgcaattaaatcataaaaaattatgcgaatcaagaaagcaagctattaattccatgcttataaatcatggacttggaaatccaattgaagtggaagatgatgagttattacaatccgtttgtgatgatattatgcaacctgaaaacggaaaacttattgcttttacgccagctattgtcaatgcaattaaaaattggactaactcataa

SEQ ID NO: 86294 - DNA, 1332 bp, Photobacterium damselae subsp. damselae CIP 102761
atgaaaatttcaaaaatcaacgtcaaaaattttaagaagatacgtaatctagacttggatattcccgcagataaccgcgtgatctgttttgtcggagagaacggagcgaataaatcatctctattatcggcgttatatgcaaacttacgtcaaacaagcggtgtcacttctccgagtgatgggcaagatcgttatgttgataacttaaaccatgtttctacatcagttagtgctgatgagcgattctcattgctttcgttatctttatcagaaaatgatgctgtaataaagtcagatagggctatagtaccttcactagaggacttatctgaagaaaataagcaattactgagaactacatttaatatcttctatagcgaagatattaaattcttattagggcagagtaattttcgtaatttagattcttataacccagaccttgttcgtcaaaacgttgtactatttagaccgtttaatagaacagaaacgcctacttgggaaagagaaagtctgtctgaaaatcaggatgttgtagcaacgggtcataatattataggtaaacgaaaattccctatgcgtgttgcttctggaattgaaaaaacaaactcctattttttagatgttgtattagatcatctgatagactcttcgaataatagtgacactacctattcgctattcaataatttcagggaaatactgagcaccattgagccagctgctaatggtacttttgttgtgcaagagttcccaaacaaatgtatctcattcccaaatgtacctgaattagcgtcattatctgctggtcaaagcgattggtttgtaacggctatcaatatattgatacagatgaaagaacttgctagaaacattgcaccagagctgataagaaatgtgggcgggattgtttttattgacgagatggacatgaattaccacccatcatttcaagaaagagtactgccttggttcttagatttctttcctaatatccagtttatcattactactcacagtccatatctcattcgttcgttaggggaaaactctcttgtagtgaaattgccgtcaggtgaggtattggacgatgacttcagttattacgatataaatgaggtagctcttaaagtcttcggacaagatcaaggcttttcaccgatagtaaaagataagctagttgagttaaagcgagcacttaacgaaagcaataatgtagttgctcgtgctatttacgaccaactgattactaaatcagagtcattagatcgtgagttaaataaaattgtcatgacggttgctgatgaagagtttattgggggattgcagtga

SEQ ID NO: 86295 - DNA, 831 bp, Photobacterium damselae subsp. damselae CIP 102761
gtgagatacattaatcgaaactcgattcaagttcctcaaaagctagcaactttatatgcaaatcaagctgagtttgataatgcaaagcaagcaatagcgaatggtacagacataagaaagggtttatatcggcatgacagtgtaaaactggctttagagactctttataaagacgtttgcttcctatgtcagaagagtgtgaaagataactatgatgtagagcacttattaccctggagtaaacattttccagagcgggcttacgactgggaaaatttgcaccaatcatgcaaagaatgtaatcaaaaaaagaagaggcatacgtataaagagcttgatacgaccgatcataataaagttatcgatattttgttgttagatcctacaagagcacaagtagatcaatttatcacatttgacccgtttacatctgaatctgttgtaacagagaggggaaatactgtgcttaaagcccagacgactacgcactttttgaatagttcggattatgtattagcgcgtaaagctcattgggatgctattagggatatttttacgagtgaagagtggtttgatgcatacagaaagttgcgcagcgaatatagaaatcataatgttatcaacttaaacttcgcagatgagttagattctaaggtcggttctttgtgttacaggatagcaacaggatttttaggtcttaaccgcccatataatatgtttgtcgcaagggtcatgaatcagaatatcaaagtaaatccttatgctattaaacactttgcacagcagcattgtgtaaatgttggttcattattgccagccctagtagtttaa

SEQ ID NO: 86296 - DNA, 1212 bp, Arthrospira sp. PCC 8005
atgcaaatcaaccatcttacactcactaactttcggggatttgaacaggcagaatttgaatttcagccaggaatgaacttgattgttggtattaatggagtcggcaaatctagtgtcttggatgccttgcggattgccttcttaagaatcctccctaaattgacagcttgtcaaaagagacggattaattttaatatcgatgatattatgattggcaaaactgaattaacggttgaaataaatgtggatatatcaggaatcccttttcgatgtaaagttagccagggaaaacaccatgaaactgagcttaaacctaacggttcccaaattttagaacctctaaaaagggcgcaaaatcaacccctcgttgtatattgtgcaacccggcgctcaatagttacagaacaagacttaaatcctaatcgaagtttaggtaatcaatctgcggcttttgttgacgcactcattcctagaatgctacgtcttcgggaatttatagattggtggttagtccaagaggaacttttagacgaaaaaccccagttaacccagcgtcgcattgatgctttaaacgatgccgtcacctgctttttatatgggtgtaataatgttcgtgctgttccagcctcgggcacatacaaaaaaccaaccttgctacttgacaaaaacggggtaacactaaatattaatcagctttcagacggcgaacggggtattttagcattgatacttgacctagtacaacggctgttgcaggcaaatcccgaactcgaaaatcctgtacaggatggaaaagccgttgtcttaattgacgaattggacttgcatttacatccacagtggcaacgcatggttgtccataagctgacagaaatctttcccaactgccaatttattgccaccactcattcaccgcaaatgattggagaagtcaaaccagaaaatattattattttagaccaagataaacaaccctatattcccgaccaatccttgggtatggatagtaattggattttacgctttcttatggaaactcctgagcgtgatatggacacccagaaaaaattagaggacgttgaatcattgattgctgacaagaatttttcagaagcaactgaaaaaataaatagtctccgccaattaggagaatttcccgaattggtacgcctgcaaactcgcattgatcggatcagccgattaggtaaatag

SEQ ID NO: 86297 - DNA, 720 bp, Arthrospira sp. PCC 8005; identical to SEQ ID NO: 86273

SEQ ID NO: 86298 - DNA, 1350 bp, Bacteroides xylanisolvens SD CC 1b; identical to SEQ ID NO: 86148

SEQ ID NO: 86299 - DNA, 750 bp, Bacteroides xylanisolvens SD CC 1b; identical to SEQ ID NO: 86149

SEQ ID NO: 86300 - DNA, 1350 bp, Bacteroides xylanisolvens SD CC 2a; identical to SEQ ID NO: 86148

SEQ ID NO: 86301 - DNA, 750 bp, Bacteroides xylanisolvens SD CC 2a; identical to SEQ ID NO: 86149

SEQ ID NO: 86302 - DNA, 1365 bp, Granulicella mallensis MP5ACTX8
atgcctactgacacgaaagcccccgatgcgatgcactttaggtcgttgtgtctggagaatgtccgcgctttcgggagaccccaatcgctcgacctcttcgacaatgatggaaatatcagccggtggaacctgatccttggcgagaatggtgtcggtaagacgacgctgctcgaagcgctcatggtcatgcgaccggttccggcatcaatcgagaaatcaggtgccgctgggactcccacactgtcaatcgccaggatctcagagttcgagaatagagaaattatgcgcttcattcgaaggggcgaaagcaattcgaccgtgatgactgcggtgcttgagacggctgacggggcaactctcgaagtcagagttgagattaaaggaagcactaacgacctggaggacgtcagatttccggaagcccactatgaactacgttcggacggtcccctcgttatccgatatgtcgctggtcgtcatctgggtatccgcaatctcgggcggatcgccgatcgcgacgccacagactcgcccttctctgaggtcatcgaactttacgacgccgaggagattttagagaagctcgatcacgccgccaagactcatgatgacgagaacgatattgaggtgaggagattcatcaagctgaaatctgtcgctgcctcgattctgccggggctgacggcagaggacatcgaggtccggggaccgcgccttgaaggtcgtgatccagatttatcgggagttcacgtccgaaccccttccggcgttgtgccactcgaagagcttagtttgggctatcgaaccatgtttgctttgatcgtagacttgacctggcgccttttcaatgcattcccagatagtctggaacccgtaaatgagagcgcgatagtgctcatcgacgaagtcgatctgcaccttcatcctcgctggcagcgggagattgctcgccgtctcatgtctcagtttcaaaatatccagttcatcgccacaactcatagcccagttaccgcccaggagaccctatccgagggcggcaatgtggcggtcgttcgctgggagaacggcgaagcccacattctcaaccgtcccgttccgcccggtaactggcgtttcgaccaagttctgacagacgagctttttcctggaatggcatcagacagaccccaaaaggtcgaaccaatgctttacgagcgtctcgaactcatccggaactctaatcgctcagttgaacaagagacgcggcttcgagaactggacgaatttgtcgcatcccttcctacagcgcgcacgccgagcgagcaaagttttgaagatctgatggtgaatctcgccaaagactttccgagcggagtggcccggtga

SEQ ID NO: 86303 - DNA, 780 bp, Granulicella mallensis MP5ACTX8
gtgatcgcgattcacaagggtgcagctccgcctgccctcgttcgcgtcggcgagctgcacgcccgggagctatgcgacgcatatgatgcagatccggaaacttatcgggcgacgaaaccgatgccggttcgtaagtcgatttatacctcggacgctgtaaaagctgagctagagaccctccatcacggcaaatgctgctactgcgagaccgttattcccaaaccttacgccgattcgcaagtcgagcattggcggcctaagtcaagctcgcgtcagaatcttgacggcgaaagaatgcgtccggggtactactggttggcttatagctgggacaacctgctcctaagctgttccttctgtaacaagattaagaatgacctattcccgctcgccgaaccggcgacccgcgccagaagtcacgggatgcgcattgaagacgaaaggccgtcgattctcaaacctgatggtgataacgatccaggcgatcacatctcattctggagcgaggtaccggtcgggattactcaactcgggcgcaagacgatcgaagtgctcggcctcgacagtctgaagcacgggccgcgacttacgcacctggccaagatccgcgaagcccggaacctcgcgatcgacctgatgggcagcacggatccgaaggctcgccatcatgcagcgctcttccgtacatttgtcgaggaggcggtgcagcccgagaaaccgtacagcgctatggttatcgattatttgagggcgaaccctcttccggaccttctagcctga

SEQ ID NO: 86304 - DNA, 2361 bp, Ahrensia sp. R2A130
atgcgctttatagaccggtctcggatgtccccgcccagtctgttgtcttccaagagggctgatgaagcccgtggcgaggtcgaacgcttcatttcaatgacgcagcaaaaaggcggcacacggcgggtgcccgactgcagctggatgttgggagattggaattttcgcgagtctgtagagaggagcttccacagcgtttgcgcttattgcgagtcgtcagtcacccagtcatcaaaagacatatcaggggtcgtatctcaccaccgaccccgttcccttgcagaagacgagaacggctccaccgatctcacagcttactcatggctcatgtacgagtgggaaaatctggtctgggcttgcgacacgtgcgcgcgtttgaaaggcaacaaattcttcgtcgagaacagacgcggagaagcttaccagagcctgtcgcagcttcgggaaacggagcaggagttactgctagatcccacttttcaccaaccgtcagaacatcttgaattcaaactgaatggccgtgttgaatggaaaaccgagaaaggccacgcaacggtcgaggttttggatctcaaccgcgcggagcttcaaagggatcgagctgccggagtcggcaggcttctgaatctgcttttcacgtcaacaaatccaagctcaacaagcgaatccagttccggtgattcagaaagcgcattttttggaaacgatcgtgctctaattgatggaacgtcgccggcaggcaacggagcacatagcggatcagcgacactcgcaatcctggcttacgcaagagaagttgggatcgaagcaagcgatgaggtttcattttcagatgccttcagcgcttttgattttcaggcgaaagcacttttcgtagaaaatgcctttatggaaactcggaagtccgaacccgacgcacccccaccggaaaacctgagcggtaaaccccgcttcaaattcaccaaatcccgctcgacctcctcgtcagccccaccacctgaacgcgcgcctaaaaaaccctcccgcatcccgaacatacatcggctcgctgctgccgactcccccgttaccgccgtcaacatccgcaatttcaaggcgcttaccagcattgcgttcgatctccccagcgtcgtggaggacgccgagcagtcgccctgcatgatcctgctgggggaaaatgcgaccggcaaatccaccgttctcgaggccatggcgctggctatccttggaacggacgaagcgggtgaactcgacgacctgctaaaggatgaagacctgtcccccgacgatctcatccatcgccccgacacgaaggctcctgaagaaacggcggccagcatgtcggtcgatctcgttttcctcgatgggttacatcggacatcgctctatgccgaagccggtgacaagcgtttttcaggtgatgagcgaacctcgaaaatcgttctcggctacggtccgcgccgcttcttcaccaagcgtaaatcgcgtcgcctgcgcgcgcccgcccaccgggtgcgctcgctgttcgacccaatggcgatgatcgccaacccgatacactggctggccgatcttgatgaccagcagttttacgcagccgcccgtgcactccgcgaggttttgttgctggacaatgatgacgatttcgagcgcgacgccgatgatgatgatgatgaaggacggatctacatcacccaccacggtcagcgcacggcgttgaaagacatgtcggtcggctacaaatccgtcatcgccatggcctgcgatatcatccgcgagctgctttaccactacgacaatctggagtttgcccacggggtggtgttcatcgacgagattgaaacacacctgcatccacgctggaaaatgcagatcatgcaattgctccgcaaagcgtttcccaaggtgcagttcatcgtcaccacccacgacccgctgtgcctgcgtggcatgtatgacggcgaggtcttcgtgctgcagcgaacggaagcgggcgacacggtagaaaaagtgaccgacctgccatctattcgtggcatgcgcgccgagcagattttaacgtcggaattttttggcctcggctccaccgatccgaaaacggacgccattctgatacgcttcaatcgtctgctggaacgtcacgaaagcctcaatgacgatgagcggaaagagttggaggcgttgggcgaacaactcgaccgcgatctggtcctcggctccagcatcgcgcagcaggcccattctgcagccctgaaaaagcgcacccggaacacggtgtcgccaacaaaagcttcctcgccgcgccgtaaggatatcgaagcagcattccccgcgctgttcgatatgccgggacaggagtag

SEQ ID NO: 86305 - DNA, 915 bp, Ahrensia sp. R2A130
gtgatttccgtcaaacgcaccgcctgtccagctgcgctggacccgaatgatccgacggctgctggtccgaaggaactggcaaaactgaaacagaaactggtcgatggccaaaagctgaagagcgacgatttcaacgcctattcaggcaagccggtgcgcaatgcgctggaagagatgtttcacggaaaatgcgcctattgtgaaggcaaggtggccagcacgaacgacactgacatcgaacattaccgtcctaaaaagggcgtcaccgaagccggtgaacatggcttcaggcacgagggttattggtggctcgccatggtgtgggaaaatctcgttctgtcctgcgcccattgcaaccagatcagggcaaaacacatcatcatacctgaccatttggtcacggtcgaagagctggaagcctttctgatggatccgcagcacagcagggcgggcaagctcaacgcctttcccaccgccgacaataaatgggtgatcagtcctgaggaagatcacaacaccgagaagccgcttatcatcaacccggtcgatatggaccctgacgaacatctggactgggttcttcacaatggtgcttcgcttgtgcgcgcgaaaaacggcagcgctgcgggggaagcaacgcggaccattctcggcctcaaccgcaggtggctggaggaggagcgtcgcatcatgttgatggaaatgatcctcgaccgcgaagagattatcgaaggcgtgaacggctggctggaagcaaccaatgaggaggccaaaaccctcaacatgcgccaggccaatcacggcatcaggcgcttgcaaaaccgcaccctgccacacaaacaattcgccggtctggccaaggcctttttcatatccgtgcgggacgaagtggcatccatgcaggcggctgtatga

SEQ ID NO: 86306 - DNA, 1263 bp, Oscillatoria sp. PCC 6506
atgaaagttaaacgattgaaaatcaatgcgtttaggggaatagataatctaaatctggaatttaaccctgatgagccaatagtaattattgggaacaatggcgtgggaaaatctagtattttggactgtattgccattcttttgtcccgttttctttatttgattcaattccctaataaaaatgacagtttaaacccgtctttttttcgtgtactagatatcaaaaacggatataaagagataagaaatcaaattataatcgaactctctcagtcacaagaaatcagttggtctgtaacgaaagaagatagcggaaatgaaaaactagaaggcatggaaaaattaaaagaagttgcccaaaatatacataatcagtggaaaggtagtcctttagccaacataccactagcagtttactacccgactaatcgtggtgttattgagcgtcatttggagagtcagaatggatattcctttaagcagacagatgcctacaatcaagcgctagagcaaatacaaattagcttcgatagtttctttcaatggtttgcagatttggaagatttggagaatgaacaaatacgggataaccacgaacatcgaaacagaaatctagaaaccgtaagacaatccatttattcattaataccaaatttttcaaacttgcgtgttagacgatcgatcctaagaatgactgtaaaaaaacaaggtcaagaactgatcgtaaatcaactatctgacggggagaaatgcttgctagcaatggtaggagatttagccagacgcttagcaattgctaacccaggtttagaaaatccactggaaggcagtgccgttgttttgattgatgaaatcgaattacatctgcacccgaaatggcaacgggaaattattcccgctttaactagaacatttcctaattgccaatttattattaccactcattcacctcaagtcattagtcagattaaacctgatggtatctacattttagaggcaacacctgaaggtatagtagctaaacagccagaaagttcttttggtagagatagcaatcgtatccttgaagacgtgatgggtgtcccagaaaggccacaagaaatcaaggatagtcttcgccaactttttagactgatagacgcgggaaatcttgatgctgcgaaggaattacgccaacagatagaagatgaaattggcgaggatgagtcagagtttgtcagagcagatatattgatgagacggaaggaaattcttaaccgatga

SEQ ID NO: 86307 - DNA, 648 bp, Oscillatoria sp. PCC 6506
atgaagtatattaaaaagggtgaggaaccaaaagattttacagattggaaagctctagaaagcgatgactggaaacctaactgggataactttcaagcaccacaaaaatcaaatttgcatcaatcattactgcaagaacagggttttatttgttgctactgcggaatggaaatcagcaaacaaaaaagccatattgaacatttaaagcctcgtaaaacctatcccgaagaagcactaaattacaaaaatctgttagcttcctgtcaaagagaaagagaacctaaagaacctcaacactgtggagttaaaaaagatgagtggtacgatgaaaatctcatggtttcgcctttagatcccagttgtgctgatttttttagatattctggttcgggagagattttgccaactaatgaaccaggaaaacaagactctgctttaacaactattgaccaacttggactcaacattgataagctaaagaatatgcgaagtcaggcaatagatggaatattgcaagctatggacggtctgacaattgaagagatacaaatattagctcaaagttatgttcaaccggatgcagaaggtaaatacacaccattttgtactgtaatcgcctactacataaaaaactactttaagatttaa

SEQ ID NO: 86308 - DNA, 1422 bp, Vibrio parahaemolyticus Peru-466
gtgacgctcatgggctttagagttaaaaaggtaaggaatcacgttctctgggacaaggaaaatgacgatcgtaatgcgtttacggttatcatcggaaataatggctgtggcaaaacagagcttttgattgatacgtgcaacaagtaccacagttattacactagtgccttgcttgataaggatacccatgtcgcatctgctgttcactatctcagagaagacttttcaccacacaattggaaaacagtggagcgtgagtatggacaccgtttacctagaaaactgattgcagcctccactagccagtttgaaaaatttaaagctaattggagcgttcgaaatgatctagtgccgtcaggtttctacgcatatatcggctctaaaccttatatgccatcgttgtctccatcgacgcgtattgcatcaaaagccattcaacagttgttaggggcagagtatttcgaagaacgtaagcacaaggctctggtcgggtttttatcgaagttcgattttggtcaaaagttgctcctgaaattcgaactcacattccctaacgaagatctggagaatatccaaaatcagtcattaactgaacctgaaactcagttgattttgaaaaatgcctatatcgaacacgatgaaatggagttggttgaattactgggttactgcgaaagaattatagaggctcctgcatttgcattaaccgtgggcaatcaaaaccttaatctcatccatctgaagggctctgaacaaaagcctttctctaagctcatcatttcaagaatgctcagagcaggattgattactctttcaagcatacaaacgatgaaagataaatcgctgataaacgaccaatctactgtaaatatcgaaagttccgctatctcgtctttatcaaagcgtagttctggtgaacaatgcttgttcctgctgtttatgggtattatatcgtccatcgaagacaatgcgctgatctgcatcgacgaacctgaaattagtctccatccccaatggcaggaacgcttcgttgatatattaagtgaatcgttttcaagctatcgtggctgtcacttccttatcgcaacacactcaccgcttattgtatctgatataagcgcaaagaattgctgtgtgtacgatatggcaacgaatacattggtggatgcggcgccatatggtgaacgttcctcggactatcagctggcaacgctatttcacaaccctggaaacaacaacgagtatctcttaagccaagttatagaggtgctggatgacatttgtcagtcaaaggaaattgcatctgagacaaagactaaggcgcattggttattaagttatgaacctcgtttgcctgatggagataaggtaaaacgcttactatccattttagagcagacgttagaggcattttccaaatga

SEQ ID NO: 86309 - DNA, 645 bp, Vibrio parahaemolyticus Peru-466
atgataaagccctacgaattgagcgaagaagagtcacaaatcgttaagagcgtccaatgtgatgacctctcccctcagcaaaagtgggacgactgccgcgtgacgacaatgaaatcgaatatcaagaagcattatatagctgaacaagataaaacctgtgcctattgtcaggtaaatatgcacacaactcacggtatggtgtgggacacagaacacatcatcgataaagacagctcaccgcaatggatgttcaagccattaaacctctgtgtttcgtgtaaagattgcaatggagcgaaaggcacacgagcagtcacaaaaagtaagtcgtacaagaagtttccgagcaagagtgcaaattatcgaattattcatcctcattttgataattatgatgagcacattgaggttgcagtgccaggcgcgacctaccgatatataacagagaaagggcgatacaccatcgaggtttgtggactacttcgttatcaccaaactgtcggaagaaaaaaagttgaccttggtcttcaagcggttctacttgctgcagcgaataatcaaagccctgagatgttacagtacgccatggaagaaatcgcaagaagacaagcggcggtatctcaaagtactggtagcagtacctaa

SEQ ID NO: 86310 - DNA, 1230 bp, Vibrio parahaemolyticus Peru-466
atgattgaatcaatagatttcaaattaattggcactagtgataagcgtgttatcactaacttaaacggtaaaaatctcataatcacaggtgaaaacggctgcggcaagactcgctttctacgtcaattacatcaatacctacagcaattctttaaaagacagatacagtctaaagaaagcattcagcaacaattaaactatcaccaaacacagttagagaacactagcgtatcgcaccaaacttacaattatttcgttgagcacgttcagtcatacacaaagcaattagaacgtatatctaacgaaagcatggatatcagtgattctgatgctctgttcgaattggttaacaataatcaattcatccttcgctttttcgaagcgaatcgacttgcaaacaacatagctgggaatggtcaaattgaaagcatatcgaacgtgaagcaggctggtaaatcccaaaatttcgaacaagattcaagtaatcagttcgaaaaatatctagtcagttattacaactatggttcgcacgtaattgctcgtgaaaacaatccagagaaagagcaacagataaacgcatggtttgagaaagtacaaaatgatctccgtgacctgtttgaagatcatggactaattcttcaatacaacccagaggaacaagccttctacattcaccaagaaggcaaagatccatatcgatttaataacttgtcttctggctacagttcaattttaagcatttatgccgatttgcttatgaaggttgagttacgtgatatacctgcggaagatatcactggcttcgttttaattgacgagatcgatgcccatctacatgtttcgattcaacggaaaatattttctttctttgacaaggctttcccaaagattcagttcattgtaactacacattcaccttttgtagttcaatcggtaaatgactcaataatctatgacctaagtaaacttgaaccactggaagacctttctatgtactcatatgagtccattttaaaagggttactaggggttgagagcacttccgatatattaaacaaacggttggatgagatggctgaaatcattaaccaagagccagtaaacaccgaaaaattacaggaattaatcgattcaattgaaccgtatgaagggcagttaaacgctcgttcacgagcatttcttttacttggcaagaatgctcttttagattcgactgatggtgaggggtaa

SEQ ID NO: 86311 - DNA, 666 bp, Vibrio parahaemolyticus Peru-466; identical to SEQ ID NO: 86125

SEQ ID NO: 86312 - DNA, 1230 bp, Vibrio parahaemolyticus AN-5034; identical to SEQ ID NO: 86310

SEQ ID NO: 86313 - DNA, 555 bp, Vibrio parahaemolyticus AN-5034
atgttcaatgttgttcgaacataccctgagccacctagcatcgctaagaacgaatacaataaagatgatgtactcaagaaactcagaccgatgttcttcgataagtgctacctttgtgaacgggatgacattcaagatgtggaagtggaacatttcatcccacacataaaaaatacggcactgaaatacaattgggaaaacctgtactattcatgctctcgatgcaatggtatcaaaagtagtacacacattaatctattggattgcgctaatcgtttctacgatgtgggtgcaatggttaaatgcttgatgccttctacacctgatggagacgttgaagtttcggcaaccagtgccaccccatgtattcaaacagcaaacacggtgacattacttgaggcttgttacaacttagataacacggctctcagagaaattagccgagagactctgatggaggacatgtgggatcattacacggagttacttaatgctaggcaggtacttcgtaaaaagaggtctgggcacacagaaaagaaaatgcaaaagaaataa

SEQ ID NO: 86314 - DNA, 1413 bp, Vibrio parahaemolyticus AN-5034
atgggctttagagttaaaaaggtaaggaatcacgttctctgggacaaggaaaatgacgatcgtaatgcgtttacggttatcatcggaaataatggctgtggcaaaacagagcttttgattgatacgtgcaacaagtaccacagttattacactagtgccttgcttgataaggatacccatgtcgcatctgctgttcactatctcagagaagacttttcaccacacaattggaaaacagtggagcgtgagtatggacaccgtttacctagaaaactgattgcagcctccactagccagtttgaaaaatttaaagctaattggagcgttcgaaatgatctagtgccgtcaggtttctacgcatatatcggctctaaaccttatatgccatcgttgtctccatcgacgcgtattgcatcaaaagccattcaacagttgttaggggcagagtatttcgaagaacgtaagcacaaggctctggtcgggtttttatcgaagttcgattttggtcaaaagttgctcctgaaattcgaactcacattccctaacgaagatctggagaatatccaaaatcagtcattaactgaacctgaaactcagttgattttgaaaaatgcctatatcgaacacgatgaaatggagttggttgaattactgggttactgcgaaagaattatagaggctcctgcatttgcattaaccgtgggcaatcaaaaccttaatctcatccatctgaagggctctgaacaaaagcctttctctaagctcatcatttcaagaatgctcagagcaggattgattactctttcaagcatacaaacgatgaaagataaatcgctgataaacgaccaatctactgtaaatatcgaaagttccgctatctcgtctttatcaaagcgtagttctggtgaacaatgcttgttcctgctgtttatgggtattatatcgtccatcgaagacaatgcgctgatctgcatcgacgaacctgaaattagtctccatccccaatggcaggaacgcttcgttgatatattaagtgaatcgttttcaagctatcgtggctgtcacttccttatcgcaacacactcaccgcttattgtatctgatataagcgcaaagaattgctgtgtgtacgatatggcaacgaatacattggtggatgcggcgccatatggtgaacgttcctcggactatcagctggcaacgctatttcacaaccctggaaacaacaacgagtatctcttaagccaagttatagaggtgctggatgacatttgtcagtcaaaggaaattgcatctgagacaaagactaaggcgcattggttattaagttatgaacctcgtttgcctgatggagataaggtaaaacgcttactatccattttagagcagacgttagaggcattttccaaatga

SEQ ID NO: 86315 - DNA, 645 bp, Vibrio parahaemolyticus AN-5034; identical to SEQ ID NO: 86309

SEQ ID NO: 86316 - DNA, 1413 bp, Vibrio parahaemolyticus K5030; identical to SEQ ID NO: 86314

SEQ ID NO: 86317 - DNA, 645 bp, Vibrio parahaemolyticus K5030; identical to SEQ ID NO: 86309

SEQ ID NO: 86318 - DNA, 1230 bp, Vibrio parahaemolyticus K5030; identical to SEQ ID NO: 86310

SEQ ID NO: 86319 - DNA, 666 bp, Vibrio parahaemolyticus K5030; identical to SEQ ID NO: 86125

SEQ ID NO: 86320 - DNA, 1653 bp, Escherichia coli 2362-75
atgaccaaacaatacgaaagaaaagcaaagggtggaaatttactgtcagcgttcgaactttaccaacgtaatactgataatatgcctggtctgggtgaaatgttggtggatgagtggttcgaaacctgtagggattacattcaggatggacacgttgatgagtcaggaacgtttcgtccagataatgcgttctatcttcgccgcctgacgctaaaggactttcgccgtttctctcttcttgaaatcaaattcgaagaagatctgacagtcattattggcaacaatggtaaaggtaagacaagcatcttatatgcgatcgcaaaaacgctgagttggttcgtcgcgaacatcctgaaggaaggcggtagtggacaaaggttaagcgaactgactgacataaaaaatgacgctgaaaacaggtatgccgatgtcagcagcactttcttctttggcaaaggacttaagagtgtgccgatcagattgtcacgctcagcccttggtacagcagaaaggcgggacagcgaggttaagcctgcaagggatttagctgatatatggcgagtcatcaatgaggcgaagacgatcaacttgccgacgtttgctctttacaacgttgagcgatcgcaaccctttaaccgcaacacaaaagataatgccggacgcagagaagagcgttttgatgcctatagtcaagcgctcggtggcgcaggtcgtttcgatcatttcgttgagtggtatatttacctgcataagcgtaccatatcagatatctcaagttcaattaaagaacttgaacaacaagttaatgacttacagcgttccgttgatggcggtatggtttcggtaaaatcacttctggaacagatgaagttaaagcttagtgaagcttcagaaagaaacgatgctgcggtttcctcgaaaatggtaactgaatctgttcaaaaaagtattgtagagaaatcaatctgctcggttgtacctagtatcagcaagatatgggttgaaatgacaacgggttctgatttagtcaaagttaccaatgatgggcatgatgttactattgaccaattgtctgacgggcagcgtgtatttctgtcgttggtggctgatcttgcgcgaagaatggtcatgcttaatcccctactggaaaatccattagagggacgtggcattgttttaattgatgaaatagaacttcaccttcatcctaagtggcagcaggaagttatcctgaacctgcgcagtgtattccctaacattcaatttattattacaacacacagtcccattgttctttctactattgagaaacgctgtattcgtgagtttgatcccaacgatgatggcaaccaatcattccttgattctcccgatatgcaaacaaagggaagtgagaatgctcaaattcttgagcaggtaatgaacgtacatcccacaccgcctggtattgcggaatctcattggttaggtgactttgaactattgcttttagataattcgggagaacttgataaccagtctcaagagctttacgacaaaataaagacgcactttggcatcgatagtgctgagctgaagaaagcagacagccttattcgcattaataaaatgaagaataaaataaacaagataagggccgagaagggaaaatag

SEQ ID NO: 86321 - DNA, 651 bp, Escherichia coli 2362-75
atgaaagagttagctcggctggagagtccggagattctggaccagtatacagccggtcaaaatgactggatggagattgatcagtctgcggtatggccgaaattaactgaaatgcagggtgagttttgtgcttattgtgagtgccggttgaatagacgtcatattgagcatttcagaccaaggggaaaatttcctgctctgacgtttatctggagtaacctgtttggttcttgtggcgattccaaaaaaagtggcgggtggtcacgttgcggtatatataaggacaatggtgctggcgcctacaatgctgatgatctaataaaacctgatgaagaaaaccctgacgactacctgctatttctcactaccggagaggttgtaccagctatcggactcacggggagagcgcttaaaaaagcgcaagaaactatccgtgtttttaacctgaacggtgacataaagttgcttggtagtcgcagaactgcagtgcaagcaatcatgcctaatgtcgaatatttgtattctctgctcgaagagtttgaagaagatgactggaatgaaatgctccgagatgagctcgaaaagatagagtctgatgaattcaaaacagcgctaaaacatgcatggacttccaaccaagagttcgcatag

SEQ ID NO: 86322 - DNA, 1260 bp, Porphyromonas asaccharolytica PR426713P-I
atgcaacgctatatacagtccatccatattaataaggtacgtcatctacataatcttgacatttatatacctgatgacgagcatccacatctattgatcacgggtaagaatggaagtggtaagacctctttgctggaggctatacgagatcatattgctctcctgcaaaaagggcagagcttggatttcttaaagtatgacgagcaaatacaatactacgcccagcaactatctagctgtacagaccctctaaggaaagcagaactagagcaaaagctagctttttggcaggaaaggcttgatgagctatatggggcagtgcgtgtggagtttgaagaccctactcagattgtattccatagttctgacaagctctttatctgtgcgatgtatgccgctagtagagaggttcgaatgttagagccactcaacccaacgaagccgacgttcagagaccagtggcttatcaatcaaggagcctcagatcaatttctcaactatctctctgatctgaagatccaagaggctcttgcccgaaatgagcatcagacggaagatgcagaccgaatcaacgattggtttgtctcgttcgaagcgttactaggggaaatttttggcgatagtggcctgaaactctctttcaactacaaggactactcctttcatatagagaccgaaggcaagagctttaagttcaacgagctatcagatggatttgctgcggtgatagatatcatatctgacctaatcctaaagatgagctcgataagcgatcgcacgatgcagctctacgatatacctggcatcgtcttgatagatgaggtggagactcacttgcatctctctttgcagcgacaggtgatgcctttactgactaaggttttcccaaatatccaatttatagttacgacacattcaccttttgtcctcaactccattgcatctgcctctgtttatgatttggagcaccaaaaggtattgaccaatctgtctgactactcttacgaggctttggccgagggttattttgaggtgagtactcgctcgagctatctagagcaacagttgaatcgtctcatagaactcttgaagcaagcagacctagacattgcagagcgatttgaagtcaaagaactaatcaaagatcttgacaaagtatctgagagtgtctccccaaagatagcaggagaatacgaagagttgaaaattaagtgggcagataaacttatcgagattcgcgacgatgattcaaatctataa

SEQ ID NO: 86323 - DNA, 654 bp, Porphyromonas asaccharolytica PR426713P-I
atgattcaaatctataagtcctccacttcgcctaaatcccttgagacggggcatcagtacgatggtcaagatgtacaggaacagctacttatagaccaaaatagtaaatgctatatctgcgaaaagaaagttgtaactgactatcatatagatcacttactcagtcaggcgcaacattctgataaaacgaccgattggagcaacctattgctgacatgttcttattgtaatcagaagaagtccaacgcttacgaccaaataatcaatcctctaggacatcctatcgaaactttcatcaagcagaaagtggactaccagaggaacgtcgcaatctttgagggtcccgatgatagagagattgtaggtatagatgagactatcaagttgctttcctctgtgtttaatgggaagactcctgctcggcaagtgcgggaagagaaattttatgagtactttttccatcggattactctatttcaaaaggcttgtaatcaatttctagcgaataaaacggagcaacataaacggatagtttgtgagcttttaaaggcagaccaagagttccttggattcaaatattggattattcaatcaaatcagacgttgcaaaaaacctttctttctttttgtcagtggaatagggatgaaatctga

SEQ ID NO: 86324 - DNA, 1245 bp, Lachnospiraceae bacterium 5_1_63FAA
gtgcaggaatattttattagagaaattaatatagacaaattatatcatttgtcaaatataaaaatagaattaagttctgataaacggcagaatcttctcctgacagggaagaatggttcaggaaaaacttcgttgttgctgaagatagaaaaatttttgaaagcgattaatgatgaacgattgagtcaaatttttgaagaatatcctatgtggataagagaagctaaaaaacaagctttgtctgcatctagcgagaatgagaaatacaaaatagatcaagatgttaaactgtggacaggatatttacagagatatagtgatggtgttcaggtaaacttaaaccagtatgatggactagagatgttgtatgatcaaggcaaatttataacagcatattttccatctgaaagaaaagcacaatttatgcgtcctaatggtgtagagaatattacgctagaaaatacgtatggcattgataaatctgcaggtaatattttgctaaaatacatggtccatctaaaaactcagcaggcatacgcaagaaatgaaggcgatcaaacgacagcagataaaattcagcaatggtttgaccgatttgattcagcattgcagattttgttagatgaagaatcaatccatatagaatatgattacaagaaatatgattttaaaatccggcaaaatggacgagaaccattcagttttaatgaattatcagatggatattcatccgtgatctatatagtatctgatctgattttaagaatggataaaaattggctgttagaagataaaatcagcgaatatgattatcaggggattgtactgattgatgaattggaaacacatttgcatattgaattacagaaaaaaatctttccatttttaacaaaatttttccctagaattcaatttattgtgacaacacactccccatatattttgaattcaatctcaaatgcaaaggcatatgatcttgaacgacaggtagagttagataatttatcaggattttcgtctgatgatcttgcagagggatattttgaggcagatgcttattcagatgaattaaaaaacagcctgaatcgatatgaagaactttgtcttagaaatgatttgacagaagatgaacgtgccgaacgagcggaaataagaataaagtttaagaatatatctacagaactttcaggggttgccaaggaaagatttgaggatattgaacggagaagaaaagccaatgattaa

SEQ ID NO: 86325 - DNA, 684 bp, Lachnospiraceae bacterium 5_1_63FAA
atgattaaaattgaaagaaaggaaacagagaaaacaaaacaggcgattgcagatttgcaaaaagccagtgaaaatgaaagttcctataatattgaaagtgtaaatcaggcattaaaagaaatatttcatggaaaatgttatatttgcgaaaataaagcagtaacttcttatcagattgaacatctggttccacaccgtggagataaaactttaaaatatgattggaaaaacttattttggagctgtgcacactgtaataatatcaaatcagataagtatgaaccaattctagattgtacaaaagaaccagtagaaaaaatgatagcatttcgtaaaaggggttattttggaacggatgaaaaattagaatttacatccgttggggaagaacgagaagatgtaaagaatacaattgctttattagaagctgcatactatggaacaacacctcaaaagaagatagaagcacagatcataagaaaaacattacgacaaaatctttcaaattttaaagagtatgttagagaataccaggagacagaagacaaggaagagaaagaagatataggatatcttctgaaaaaagagcttagagatagtgcggcgtttgctgcatttaaaagatggctgatttgggataatgaaatgttttctgagatagaacaatttattcccgaaaattga

SEQ ID NO: 86326 - DNA, 1356 bp, Pseudomonas savastanoi pv. glycinea str. B076
atgcagaactatcgctgcttcggtgaattcgagatcgacttcgatccgcatctgaccatacttattgcctccaacggaggcggaaaaaccactattcttgatgccgctcgagttgcgctgtggcctttcgtcaagggttttgatcttggcggtcagacaggaaaatccgccactattcagattgaagatgtgcgactggcccaattcggcagtggcaatatggagtcgcaggtacccagcgttatcgaggcaaagggcgtctggtgggaaagcgccgttgaaagtagctggctgcagcagcgcgtcagcctgaaaaagtccactaacactattggcgatgctggatcgaaagcactgacttcgtacggtaagtcgcttcaggagtgtgtgcgaagcgatgcacatgtcactctgccaatggtgacttaccttggcacttccaggctatggttcgagggacgcttcagttcggcggcggctcagacaacactcgataaaagtgagtactccagaacgtccgcatacctaaattgcctgtcttattcatccagtttcaagaccttcaccgcatggtacatctggatgtaccgcagctatcgtgaagctcagttgatcgctctggagcgcgatgaagaaatgtctgatgccgggcagcgctttgagaaaatcatctcagctgtcaaagaagccatcgacaggttgataaaggctcctacggggtggcacagactggaatacagtgccagtcatcaacagcaactggtcatgcatcatccggaccagggggttttacctgtcgaaatgcttagcgatgggctgcgtaacactatcgccatggttgcggacctcgcttttcgtgcctgcaaactcaacccgcacctcggcgagagggcgcccttgcaaacgccaggtatcgccttgattgatgaagtggatatgtttctgcatcccttctggcaacagacgatagtcggttcattacgtgcggcttttcccgccatgcagtttattgtcaccacgcacagcccgcaggtgttgagtacggtccgacgcgaaaatattcgggtgatcggtaaagatgcccaagggcgtttgattgcatcccggccccttgccatgacctacggtgagccgagcaacagcgtgctgcgaagcgtgatgcaggtcgatccgcagcctccggtggatgaaaagccgggcctgctacaactcacggaatgggtggacaaaggtcgctatgacgaaccacaggcgatcttgctgatgcagcagataacggaggctctcactgaacaacaccctcaactgcagcgcctgcagcgcagcataaagcggcagaaggcattgcggggatga

SEQ ID NO: 86327 - DNA, 723 bp, Pseudomonas savastanoi pv. glycinea str. B076
atgaggtcagtgcacaagcggggaggaggaccttatcagttggcgcgttcacatcgcagcccacctgctaccagcgacacttccacaagccggtggagtagttttggctacaaggctcaggtactgggctgtcttttggaggagcagtacggattatgttgctatagcgaaattcgacctgaccgggttggcctgagtttccatatagagcacgtcgaaaacaagagccaaaaccctcagcgtacttttgactacaacaacctcgctgcctgcgcgctggacagtcagagcgatctggaggtattgaaaatacaaggcgctgaggtatttggtgggcacgcgtcaggtaagtcgaaaggggtcgacatggctcgcttcgtttcgtgccacatgcccgactgttcgcgcttcttcgcctatttgtctgacggccgtgtggtgcctgctgacgggttgtcaccggaggaagttgaccgagctgaatacaccatcggcctgctgaaccttaacagcccttatctccaaggcttgcgacaatcctggtgggatgagctggaagctctttttgaagagcatgttaatcaaaatatgagtctgcattgtctggcggggattgatctcatccctgtgggtgcgaacttaagtcagtttttcagcattacccggaattttttcggaggtatcgctgaagaggtccttgagcaagaggctggtcgctggtaa

SEQ ID NO: 86328 - DNA, 1359 bp, Pseudomonas savastanoi pv. glycinea str. B076; identical to SEQ ID NO: 85918

SEQ ID NO: 86329 - DNA, 525 bp, Pseudomonas savastanoi pv. glycinea str. B076
gtgctggaaaaatggaagcgcgcgaacaagggaaagaaatacgccgacctggtggggcgtgaagatatcaaggatgccattcgctacgcctgtgtcactgaacagcatggtttgtgcgcctattgctgctgcaggatcactgccgagaaaggcagtgcctgcaatgaacatattgaagcgcagcatctagcaccgcatcgcactttggatttcggcaatattgtcgcgagctgcactaacgccaagcggtgtgacaaggctcatggccgtcagcttttgccgcttacgccgctgatgatcgaatgtgaaaaagagttgcagtttgagctttcgggcctggtggcaggcaccacgcttcgggcgtgcgcaagtatcaacgtgctcaatttaggcgatacccatgagtcgaaccggggtcttgtgggagagcgcaagcagatgattgatgcgctgctgttttcttgcagcattgtctcgcccgaacacaaaaaaactgatactcccatgatgttctcgatctgttaa

SEQ ID NO: 86330 - DNA, 1266 bp, Pseudomonas savastanoi pv. glycinea str. B076
atgcgcctcgaccacctccatctgcagaattttcgttgttacgaagatgctcattttgatttccagccggggttcaatctggtggtgggggttaatggcagtgggaagacgtcgctgttgctgggtgtcgcgggatgcgtcgggaatttacttggaagcattggcgtccatcagccatcgatagctgagtccgatgttcggttcgcgttagtaaagttcgaagacaggattcgtttcgaacgcagctatcctcttgtattgactgcccaaggtggcgcgtttgagcgtcaggaatggcacgtatcgctagaacgcagcagtcttcagacaaatttcagcgcgctgcacagtctcgtattttcggaaaatctgattagcatcgatgtaagtacccacggggatttgcctgtattcgccgtctatcaagctaatcgacgctggctgacgatgagtgtaaccgctgagcttgctgcacagagcaaaccatcaagactggatgcgtacacctcttggttcgatgccgcctccaatttgaaaaacttcgagacctggttcatcggcaaaacactggagcgctttcaaaggctatcccgagtaggttcttccagcgttttcaacgacgaactgacctggataaactcagccatccaatgcgcactacccgacgccaagggaatagagtacgacatggagctacgtgcgttggtagtcgatatggatgaccgaaaaatcccgttcaacgacctgagcgacggacaacgcggaatggtcgcactcttcgccgatatcgctcgccgtatctgcctgctcaacccgcacatggggaaggatgttctaagcaagacaaacggcatcatcgtcatcgatgaactcgatatccatcttcaccccggctggcaacgcaccattgctccagcactgaaaaaagcatttcccagcatccagttcatcgccgccagccactcgccacaggtcatcggcagcctgcaaccgggcgaggtcatcctgctgaataaccatgacggctctcacccaagagcaacctacggcctggactccagcagtattctggaagaagtcatgggtgtaccgcagcgcgagcctgaaattgaagcactgctcgacgagctattcagcacactggaaaacaacgaacttgaaaaagccagactgcagcttgatgcgttaaagcagaaagcgcccgatctgcccgagttcgcaggtgccgaagcgttgctcaaacgcaaggagctcattggccgatga

SEQ ID NO: 86331 - DNA, 645 bp, Pseudomonas savastanoi pv. glycinea str. B076
atgaaacgcgtaatcaaaggagctgagcctgcgtcattcatcggatggaaagcccgcgcaaacgaagactggacgcccacctatccaaccctgcagaacccgcaaaaacgcgacttgcataattgcttgctgcaagagcagaacttctcatgctgctattgcggcagggaaatagagcttgatagcagccacatcgaacatttcagaccgcaggatcattatctgccattggcactggaatacagcaatcttcatgcgtcttgcctgcgcgagaccacaccaggaaacccgttgcactgcggtcactataaaagcaactggttcgatgaggacctgcacatttccccgacagaggacgattgcgaacagcgcttccgttatttgctcacagggaaaatccaaagcacgtcccacacagatcttcccgccacgacgatgatcgaaaagctcgcactcgatatcgcgtatctgacaaaaagacgccaagaggcaatcatgcgagtgtttgatgagcaaatcttagccggcatcagtgatacagagctgaacattttggtgcaaggcctgcgctctggggatgccaacaaacagctcgcctttggccacgttgtcgcccgctatgcggagcaattgctggcatcttga

SEQ ID NO: 86332 - DNA, 1266 bp, Pseudomonas savastanoi pv. glycinea str. race 4; identical to SEQ ID NO: 86330

SEQ ID NO: 86333 - DNA, 645 bp, Pseudomonas savastanoi pv. glycinea str. race 4; identical to SEQ ID NO: 86063

SEQ ID NO: 86334 - DNA, 1356 bp, Pseudomonas savastanoi pv. glycinea str. race 4; identical to SEQ ID NO: 86326

SEQ ID NO: 86335 - DNA, 420 bp, Pseudomonas savastanoi pv. glycinea str. race 4
ttgaaaatacaaggcgctgaggtatttggtgggcacgcgtcaggtaagtcgaaaggggtcgacatggctcgcttcgtttcgtgtcacatgcccgactgttcgcgcttcttcgcctatttgtctgacggccgtgtggtgcctgctgacgggttgtcaccggaggaagttgaccgagctgaatacaccatcggcctgctgaaccttaacagcccttatctccaaggcttgcgacaatcctggtgggatgagctggaagctctttttgaagagcatgttaatcaaaatatgagtctgcattgtctggcggggattgatctcatccctgtgggtgcgaacttaagtcagtttttcagcattacccggaattttttcggaggtatcgctgaagaggtccttgagcaagaggctggtcgctggtaa

SEQ ID NO: 86336 - DNA, 1317 bp, Phascolarctobacterium succinatutens YIT 12067
atgcagatagaaagattaagactgaagaatttccgttgttacgatgagcttgatattgcttttgaacctaagctgacagttattgtaggcgaaaacggcaagggcaagacggcgatttttgatgcgctggcaattgctctggagccctatctgcgcagctttgatgccagtggccggcaaattactccccaggatgtgcggcgtgtgcctgtttataaaaaggatatgcgtcatattgatggtatggaatgccattatccggtagaaattaagctggagggtgaggtttacggcaaaaagcttacctgtaaccgccgcctgctggagggaaatgtgcctgaggatgatgctgatgagctgtgcgaacgtggctgtgcattggcgcacgatgccaaggagaacggcaacaggctgttgccggtgctggcctattacggtactcagcgcatttgggtagacagcaagctgatgacaaattttcataaatcgctgatggaacgcaatgtaggctacgaggaatgcctggagccgtcttcttcctacagcaccttcgggaaatggtttgagtatgtcaccaagtgtgcgcagtcagagcagcagtacagcgcagaggtgaagcgcaatgtgatgctgaagaatgcgattcagaacgctgtcgacgtgtgtctggaaagtaccggcctgcgtgatttgtattataattaccgcctgaaatgctttgttgtcagtcatcccgatatgggtgaaatggtggtagatgaattgagcgacggctttcgcagtattatcagcatggtggctgacctggcctatcgcatggcgcgtctgaatccgcagctgcgtgaggatgcggtaaccaagactccggggcttgtattgattgatgaggtagaaatgcatctgcacccgctgtggcagcagacggtactgctggatttacagaaaaccttcccgatggtacagtttgtagtgactacgcatagtgcgcaggtgcttagcagcgtgccggccgagagcatacgcgtattggcctggagcaagcagttcgaaggcgtgcgccacgtagatttttccttgggcgccaacagctatcagctgctgcaggatattcagaatgtgagcccacgtccgcaagctctgccgattgtgcaggatttaaagcgttatctgcagctggtgagcgaggatgcctgggatacgccggaagcgctggaactgcgcaaaaagctggataaatggtccaatggcaaggagcctgctctgctgcgtgcggatatggatatccgtatgcgtcagttccgcaggaggcgctcatga

SEQ ID NO: 86337 - DNA, 780 bp, Phascolarctobacterium succinatutens YIT 12067
atgaaacgtgtttataaaagcaaggaagaacctgagcttctcaggcagtacaggctgcataatcccgaggaaacctgggagcatttccgccgtcgctgccgcaggggctataaacaggtgcgggaagcaattttgcgtgaccagcacggcctttgcgcctattgtgaggtaggcattaagctggcggaggaggaaggcgaggttgacgacttccgcgtggagcatttttatccgaaaaatgctacgcaggagcatgggcacaactatcatctggattggcgcaatctgttgggcgtgtgccacggcggcagtcagccttatgtgcctgaccccgagtggcgctattcaagccagaagcgtgaccgcagctgcgatgtgcctaagggtgggcgtgaaattacaaactatatcctcaatccgctgaagattcccggcaaaatccgtctgttccgttatgcggagcatagcgggcggatgtacgtagacgaagatacctgccccaaagatttgcagggtaaggcgcgcagcactatccgcgagctgaacttgaacgcgccgcggctgatgcgcatgcgtcgtgaggtaatccatacgctggaggaccagataagtgatgagcttagtaagggccgtgagctggatgaagttttggaaatgttggcaaccatctgtctggtgcctgactataatggcgtgacgctgccgttcttttccgttatccgttggtatctgggcgaggcagcggaagaagttatccgtgcgagcggtgctaagctgtag

SEQ ID NO: 86338 - DNA, 1653 bp, Escherichia coli RN587/1
atgaccaaacaatacgaaagaaaagcaaagggtggaaatttactgtcagcgttcgaactttaccaacgtaatactgataatatgcctggtctgggtgaaatgttggtggatgagtggttcgaaacctgtagggattacattcaggatggacacgttgatgagtcagggacgtttcgtccagataatgcgttctatcttcgccgcctgacgctaaaggactttcgccgtttctctcttcttgaaatcaaattcgaagaagatctgacagtcattattggcaacaatggtaaaggtaagacaagcatcttatatgcgatcgcaaaaacgctgagttggttcgtcgcgaacatcctgaaggaaggcggtagtggacaaaggttaagcgaactgactgacataaaaaatgacgctgaaaacaggtatgccgatgtcagcagcactttcttctttggcaaaggacttaagagtgtgccgatcagattgtcacgctcagcccttggtacagcagaaaggcgggacagcgaggttaagcctgcaagggatttagctgatatatggcgagtcatcaatgaggcgaagacgatcaacttgccgacgtttgctctttacaacgttgagcgatcgcaaccctttaaccgcaacacaaaagataatgccggacgcagagaagagcgttttgatgcctatagtcaagcgctcggtggcgcaggtcgtttcgatcatttcgttgagtggtatatttacctgcataagcgtaccatatcagatatctcaagttcaattaaagaacttgaacaacaagttaatgacttacagcgttccgttgatggcggtatggtttcggtaaaatcacttctggaacagatgaagttaaagcttagtgaagcttcagaaagaaacgatgctgcggtttcctcgaaaatggtaactgaatctgttcaaaaaagtattgtagagaaatcaatctgctcggttgtacctagtatcagcaagatatgggttgaaatgacaacgggttctgatttagtcaaagttaccaatgatgggcatgatgttactattgaccaattgtctgacgggcagcgtgtatttctgtcgttggtggctgatcttgcgcgaagaatggtcatgcttaatcccctactggaaaatccattagagggacgtggcattgttttaattgatgaaatagaacttcaccttcatcctaagtggcagcaggaagttatcctgaacctgcgcagtgtattccctaacattcaatttattattacaacacacagtcccattgttctttctactattgagaaacgctgtattcgtgagtttgatcccaacgatgatggcaaccaatcattccttgattctcccgatatgcaaacaaagggaagtgagaatgctcaaattcttgagcaggtaatgaacgtacatcccacaccgcctggtattgcggaatctcattggttaggtgactttgaactattgcttttagataattcgggagaacttgataaccagtctcaagagctttacgacaaaataaagacgcactttggcatcgatagtgctgagctgaagaaagcagacagccttattcgcattaataaaatgaagaataaaataaacaagataaggaccgagaagggaaaatag

SEQ ID NO: 86339 - DNA, 651 bp, Escherichia coli RN587/1; identical to SEQ ID NO: 86321

SEQ ID NO: 86340 - DNA, 1629 bp, Vibrio sinaloensis DSM 21326
atggttaataagcaaaaatctcaaagtagagcaattcgagcacaaatagagaatgcagaaaaaggtattctactttcacagtttcaattgtatgaaaactacctaaaaggtaagcatgtagaacaaaataaagaactggctcaaaaatactttgaagtgcttgaaaattcactggccgacaagaaattacgattaaattcactgtctttatccaattttaggcggtttgatgatctatgtctcgatttcgatgagaaattaaccgttattattggtgataatggtgcaggtaaaacaagttttgctgatgctatggccaacattttctcttggtttaacaataacttagagaaagactctgtgaatggcaactttgtcaaactaagtgatattaatatcaaagcgactgactatgcggagcttacctgcaattttaagctagaccaaatcaacaggtttgaagcatcactagccctaccagttcaaggttacacaggtagtaaatctaatgatgttaatgtcatcaagcagttcggggcaatatacaggagtacagcgaaaaacgaatcaattacacttcctcttctcgcatattattctgttgaacgttctgatttcgagttaaaaacatcagtaacagagaaagcttctggcgatcgagaaggaaatcgtttttcagcccttaaggattccttaaaaggtaatggtaagttagatgacttctccaaactatatatcgagttagtaaacttagctgaaggtgaagagacgaaggaagttaaagagctcaacgagcagataaacaccttacaaagaaccattgatgatgtataccaaggtgagcaaccacaggaaaatgacccatttaccgcaaagcttaattcattaaaagggcaacttgcagacttacgtaaatcaacggcctcagccaaatatcaaagacatttgaactttgtcaacgaagcaattgaaacgttggtgcctgacgtcaagaatcttgaggtggatcgtagtacaggtaaacctcgaatattagtagagaactttggcaataaagtaaacatagctcagttgtcacaagggcaaaaaatgctggtcgcattaactggcgacttagctcgtagattagtaaccttgaaccctgattccagcaaccctttgcatggacatggtatcgtagttatcgatgagattgagttacatcttcatccaaaatggcagcaggaaattattattggtcttcaaattacttttcccaatatacaatttatagttacgactcatagccctcaagttctctctacggttgataataaatgcattcgaaaaatttgccttaataaacatggttatccgattattgaaactccaacgtttcaaacgaaaggcgtaacaagtgcgagtatcctagcccgaattatgggaactaactcggtaccagaaaagcttgaagaagcttcttggctaactgacttctctagataccttaaagaaagtaacgaagagttgagggagtcgacatttgaaaaaattaaagctcattttggtgaaaaccaccctgtagttgtggattgtgaaagccagattaggatacatagcatgaaagctcggttgagaacaaaagagtaa

SEQ ID NO: 86341 - DNA, 540 bp, Vibrio sinaloensis DSM 21326
atgcaaaatggattttgtgtttactgtgagtcagtagcgattaaaggtaatgggcatattgaacatttctttcacaaaggccaaaaaaccgacggctcaacaccttataagcacttaacttttaattggacgaacttattcggctgctgtgggttaagcagcagcaacacttgtggtcattacaaggaccgtgaaggaaaaaatggacctggtcaatataatgctaatgatataattaagccagatattgacgaccctaagcttttcttaaatttccttgatacaggtgttattgaagtaaaaactgggctaactccacatgaacagaaaagggctgaagaaacgctgcgggttttaaatttagccctcctaaatggtgctaggaaaacacagatcgatatttttaaacaagaactcaaagagctagaagagttaagccacagtttaaatgacgacacacttcaacgtgaaattgacataataaaagaaaaagtttgcactcaagaatatcaaagtgcagtcttgggcgctttgttttaa

SEQ ID NO: 86342 - DNA, 1290 bp, Rubrivivax benzoatilyticus JA2 = ATCC BAA-35
atgtacatcgacaggatccaactgcgcaacgtcaagggcttcgagaaactgtcattcaaccttgtacgtcctggcggcagccacgcgggctggacagtgttcacgggtgacaacggcgccggcaagagtaccttgctgaaggccattgcgttggggctggtggggcgggaggtcgctcgctctttgcaacccaacctgcagcgttgggtgcgcgacggcttcacagaaggcgacatcactctgaccctgcagcccgagcagggcattgacgagtacatgagtggcggtcgaacgtcctacaaggctttcgatgccgttctgactctcaatgagcacgcgggacgggtcgtgctggatgatggccaagccaaggccaagaaggcagccgccgcagcgcgtggcccctggtcagggcaagcttcaggctggttctcctgtggctacggtcctttccgccgcgtgttcggggcgtcctctgaagcaacagagctgatggtggcacccatcaccgagcggtatgtcaccatgttccaggaagccgcctcattgctggccgtggacaaatggctgcgcgacctcagccacaagaagctggagaagcgcgaagccgaaacccgtttgctggacctcattctgggcgtactccgcgacgaactgatgcccaatcagatcaccgtagacacagtggactctgatggcctgtggctcaaggatcgcaatggtttgcgcttggcctggcccgacatgagcgatggctatcgcgctgccctcgcactgttgatcgatatcctgcgtcatttggtcaaggcgtatggcttcgagggactaactgagcgcgatgagcatggacggctgacggtggtgcgcagtggcgtggtgatgatcgacgagatcgacgcgcatttgcaccccgagtggcagcagaagatcggtttctggctgaagcagcactttcctcgcattcagttcctggtgaccacgcacagccccattatttgccaggctgctgaccctaatggtctgtttgttctgcctgagcccggcagccaagagccagcccgggcgttgagtgaggcagagcatcagctcatcatttccgcacggccggacaccatcctgctgtcccgcgccttcggtctgcaaaacacacgttcaccgcgggcggtagaggctcgcgccaggtacagtgcgctcaaggctaagctcaatgcgggcgtcaacttcaccccgaccgaaaagagccagttctctcaactgaagttatttgtgcagcccgaggcggagaactga

SEQ ID NO: 86343 - DNA, 741 bp, Rubrivivax benzoatilyticus JA2 = ATCC BAA-35
atgcgcaaggttcaacgcccggcagcatctacgtccatccagacgtatctgaccaagaaagaggccgccgtcacggtggctcacctgaggggacaactcgacatcgaaggcatctggaagcgcgccaggcagaccaaagtaattggcgagtctgctttggggctgctgcaaggtgccatgggtccgcgccagcgctgcatgtattgcctggacgcgcacggtaccgatatcgatcacttctggcctaaagctcgctacccccagcgtgctttcaaatgggacaactggctgctgtgctgcaccgaatgcggacgcatcaagggaagccgttttcctctttcccgcaatggccgccctttgctggtgaatccgtgcgccgaagacccatggctgcacctggactttgacgtggatactggaaacctgatggcccggtttgacgccacgcggcacggcccaagtaccaaaggggttaagacagttgaagcgctggaattggacaagcgggaagcactggccgctggctaccggctgaccttcaagcggcttgtggaggtgattgagcgcgcgctcaacgcgcctcagtttcctcgcggaaagttgctggccgacctgcaggaagccgatgaccacggcctcttgccgtggtgcttccactgggctgggcgcaacgagccagcgttcatcaagctacggcgatcgcaaccgactgcctggcaggcttgtgcggcagcagtgtga

SEQ ID NO: 86344 - DNA, 1326 bp, Bacteroides salanitronis DSM 18170
atgaggataaaggacataacaataaggaactttcgtggttttacagaacgatctttcatttttgattcaagaatgaatgttgttttaggaaataatacaacaggtaagaccacgttacttcatgccgtgcaaatagcattgggcgcttttttgcaagagttgactctcgtcaccggctgtgccagaaacacgaaagatagcgatgtcgtaaggaaatacagtgaattgactaaaagttttcaaaaacagcaggcgaaaccagtttttgaagtaaatgcttgcttcattgatggaaactacaatttcacatcaaaggaatactcctgccaagaaaaggacatcaaatggcttagacttggtcccaaaaattctcgtaaaaatgctggggaattgaaagatatggtggctaatatggaacagaaacgacgtgatgctgacataacaaaaacaacatcggtattaccgttaatgatatcattcggtgcttcccgtcttgagaacaactataatggggcagaaaaaacaaaagcacgtgcttcgagggaagaaaaggcatataaatgtgtgttggatgaaaaagtggacttcaaaagtgcatttgactggatttatagatttgataaggaactggataaagggcgtgaatttgcagggtctgacattgcctttctgaatgcgttatctgatgccatacctgcattaaaagtaattgagattgaccggaaaaacaatgagtttactgccgaaatacagatggcaaaagatccacaaccctactggctcacgtatgacatgatgagcgacggttttaagtcgatgataaacatcgtcgcagaaatcgcctatcggtgtattgaactcaatggttttttaggtgtagacgcggtaaaaaagacaccgggaattgtcttgatagacgaggtggacttgtatttacatcctcattggcaaaagcacatcctcttggatttgcagaccgcatttccaatgatgcagtttattgtgactactcactcgccgtttatcgtgcaaagtgtgaaaagccagaatgtaattactttggacggggtaaagggtattgatgacccgaacaaacggagtattgaggagatcgttataaacgagatgaatatggatactgtcagaagtgccaaatacaatgaaatggtagaaaaagcggaagaatactaccggcttgtgaaggaagaaaaggcagacacgccagatgctctaaaggtcaagaaagagttggatgagatagaaagcctgttttctgacgacccggcttatgtggcacttcttagagcagaaaggaatgtgttatga

SEQ ID NO: 86345 - DNA, 738 bp, Bacteroides salanitronis DSM 18170
atgaggcctgttgagaaatggaatcctgagaatgagccacgcatcaatgataattatcccaattataaagatgcaaagcaccctttatgcatgaacttgggaacgatatgttcttattgcgaaaaagcttatgacgatgaacgggacttgcaggttgaacatatccaacctaaaaaatacaaagatgctgatggcaactatatctatgcccatcttgaaaccgcatggagtaatttcttgctttcctgtccaacttgcaacggagcagacaacaaagacacaaaaaacgttgtgtatggaagttgccacttgccacacctcaacaacacttttctgagcctttgctataaagcaggaggcgtggtagaagttaatccttctttaagcggaaaatcagcgaacaatgcccgtgcgttgcttgagcttgtgggactaaataaaggaccgaaagattcaagtgcgaaagactatcgatggaggataaggttggaaaaatggaacttggcaaacatatatctggaaaaatatatagctggatcaattgatgtttatacgattgtcgatttagtcaaggggcatggttgctggtctatatggtttactgtatttaaaggacatgatgaggtacggaaagcccttatagaagagtttccaggcacagcagcttcttgctttgacgcacaaaaccattttgaaccaatctgtcggaatccactggatgacgaggatcctgtataa

SEQ ID NO: 86346 - DNA, 1440 bp, Acinetobacter pittii PHEA-2
atgagcaaaattaattttttatattttaaaagtaaaaaaattgagttaaaagaaagaaatttaataatcacaggtaaaaatggttctggaaaaactcgctttttaagacaactagaagacaacctaataaataatttaaattttaaatatcaagatttagaacgtgaaaatctactaaaagaaattaaatatggaatcgacaacttctccaaatccttaaactttaaaaatgaagaaattaaattttattatgacttgaaaaataaaaatttcagtgaagatgaatttaaaaaaaatctatttcaactatactcaatacttttaaaaaaagatgcgaaattcagaattgatactcagaactatataacgaatacaagtgaagatataaaaaattcccacagaaaagaaatcaaccccaataaaataagtgaagaatattattattacaacaatcccgaatatattattgatttcatgaaccgtattactatatcaatagatcaatatattaaaatttcaaaatcattcagaatatcccctaataatttcagcaaagataaaatttttgtttttgatgcatctcgagtagaaaacaatcgatttgttaagaaagtttttagagattatgagtattataaaaaagataataataaaaacaatatggaagaagctctagaggcatatttaatattgaataaatttaaactcatctcaattacagaacaacaagaagctatagaaaaagttagcaaagaaattaaaaaattaggcaattggtttaataaagtagaaagtgatcttaaatttatattagaaaatcctaatattagaatttcgtttaatcatcagagtgatcaagttttactcgtagacagtcaaaaaaattcttttttttcctttgattctttatcttctgggtttaaagcaatttttaatatctatgccaatttattaatgcgtgcgcaaatacaaaacttagcacctgaaaatttagcaggtattgctattattgatgaaattgacgttcatttacatatttctctacaaaagaaggtattaccctttttaataaaagcttttcctaaaattcaatttattgtcagtactcattcgccttttgtaattacatctacagacaatgatactgtcgtttatgacatttccagtgatgagttttttgaagaagatttaagtctctattctcatgaatcaatcataaaagagctatttcatgttcaagatgaaaatgaaaatttggtaaccttatcaaatcagcttataggatttattaaaagtgaaactcaaatttatgatttagactcaatccaaattttattgaatgaagttaataaaagtttcgataagctttcagtagaactgcaactccaatatatggttgctaaaaataaacttgctaaattaaaacatgagggaaactaa

SEQ ID NO: 86347 - DNA, 672 bp, Acinetobacter pittii PHEA-2
atgttttcagttactcgacctactacttttcctaaaagtttaacaaaatctactaaagactatcgcgcagcagatgttgttgaagcacttcaagatatatttttttcaaaatgctatctatgtgagagacaaggatttcctgatgtaaatatcgaacatcgtgaccctcatttaggtaatgatataaaaaaatatgactggcataaccttttttatgcttgtgtaagatgtaacagtattaaaggcgatacacatataaatattttggattgttgccaatctattgatgtatctcaagcaattgaattacattgccctattgtcaataatgaagcccataaaataactgtacaattaggcaatttacctaatagtttagagatttcatcaactattgagcttcttaacaaatgctttaatgaaacaaatactgcattaagaggtataagtagacattcattaataaaagaaattcaaaaatatcaaatccaattgtccattttgaaaaataaactactttatcccgaattacctttaacatccaaagcaaaaactgaaattctagaacaacttaaagctatgtgtgacaaggaatttccgttttctgcattttggaaatgggctattactcgtgatgatgacctatctaaaatagtaggtaatgtattttaa

SEQ ID NO: 86348 - DNA, 1332 bp, Polymorphum gilvum SL003B-26A1
atgatcgcgctgagcctcgacaagctatcgctgacgaattttcgctgcttcgcccattgcgaggtcgagttccacccccgcctgaccgtgctggtcgcggagaacggcagcggcaagaccgccgtgctcgacgccgctggagctgcgctctcggtcttcgtcaacgcgctctatccgccggagaaggtccggcgcatcgagcggagcgacgtgcgcctagtccctggtcaggagcgcaggatgtccccctgccttccgaccgaatacggagcgcaggctaccgttcagggcgaggccgtgacgtggaagagcgccgttagaacctacggggacaaagtgcggccgagcacccggcaccttagtacgatgaaagcagccgcgcagcctttcctgtccgacacggcggttcttccgctcattgcctattacgggacgggtcgcctctggagcgagcaacggcagaccgaatatcgccgatcctccgtcaccaatgtcggggagcgcgtcgccggctatgccgattgcctcacgtcgtcttcgtccttcaagggcatttcggcgtggttcgagcatcgtttcaggcagacggcatcgccttcattccgggaaagcctgcaagccaaccttgcgatgatcgagggcgtgaaggccgccaccgacacggttcttcagccgaccggctggtcaagcctccgctgggatgacgagcttcataccctgacagcccagcacgagtcgcggggcgagctgccgttgtccatgttgagcgatggcgtgcgcaccatgcttgcgcttgtcgccgatgtcgcgcgccgctgcgcaagcctcaatccgcaactgagcgatcgggctgcgatcgagacccctggcatcctcatcgtcgatgaagtggacatgcacctgcacccccgctggcagcagcaggtgctcggcttgctgcaagctgcgttcccggccctacagatcattgtcagcacgcacagcccgcatgttctgtccaccgtcgataagtcgtcgatccgcgtcctccatatcagcaacggcgacgtggtgatcgagacgcccctgattcagaccagaggcgtcgagagcgccgatgtcctggcgaccgtgatggacgtggaccccgttccgcaggttgaggaggcaatcgacctcagcgcctatcgaaagctcatcgaggcgggcgaagccgaagggccggaagccaccgacttgcggcaacgcctgatcgcgcactacggcgagagccatcaggtcatgctggaggccgaccgcctcatccgcttccaacggttccggctagccaaaaaccggccggagggtgcgtga

SEQ ID NO: 86349 - DNA, 642 bp, Polymorphum gilvum SL003B-26A1
atgcggaaacttgatcgcgccatctgccctgcgccggcttgcctgggcggctacgcccacggcgttcatacgtgggacaatgtgtcttccgtccacaaggaagagatcagaacgcatcttgaaacgatgcagggccgtcgctgcgcttattgcgagggcgacatagaaactctcggccagcacatagagcatttccggcggaagagcgtgcatcccgcgctcatcttcgattgggagaatctcttctggtcttgtgaccagacggactcatgcggtcacttcaaggataacggcgcaggccaatacaacgtcaccgacctgataaatccgtgctgcgacgatccggatggcttcttcatctttcaggccgatgggacgatcagcgtccggcacggtctttccgaagtcgatcaacgacgagcgactgagacgctgcgcgtattctcgctcgatgccaagtggggtcgcctgcgcgctatgcgcaaggccgccgtatccgggtacgttgacgacgcaaatacagcgttcgacgaaggttggccgtccgatgatattcgaacccttttccacgcggagcttgagatcgcgcgaaacctaccattctacacagccatccggcatgttctgacggaaagacaataa

SEQ ID NO: 86350 - DNA, 1359 bp, Escherichia coli 97.0246
atgatgaatatccgcacgcttaagctcactaatctggggcggtttgaagaacttgaagttcatctggctccagtggaggagttcaagagcaatgtgaccatttttattggtaataatggtgcaggtaaaacatcaatattaaaatcgttggcaaccagcctgagttggttcgttgcccgagttcgtactgaaaagggtaacggtagccctattcctgaagacgctattctgaacggtaggagttcggcgacaattgaacttcaggtactgaatacgcatccagcgacggaggccgctacgccctaccgttggttgcttgccagaacggccagtgggaaaaaatcgaccaccgcctccagcctgcaagaggccagccaattggctgcgttttatcgagatcaatacacccagaatagcggggcatccttcccgcttatcgccttctatcccgtagaacgtgtcgtgctggatgtgccgttgaaaataaaagaacgtcataattttttgcaactggatggctacgataacgccctgaatcagggtattgatttccgccgtttctttgagtggtttcgcaatcgcgaagatgcagaaaatgaatcgggcttaccccaagacgttctggataagctcagtaccaggatagatctcgataacaccgtcttaaatgcattaacggcaatcatggcctcgtcccgggatcgccagttgaccgccgtcagaacggccattagtcgctttatgccagggttcagcaacttacgcgtcaggcgtaaacctcgcctgcatatgtcgatagataaaaatggccagacactgaatgtgctgcaattatcgcagggtgaaaaatcactgatggcgttagtcggcgatattgctcgccgcctggcaatgatgaacccgatgttagaaaacccgctaaacggcgagggaattgtattaattgatgaagtggacatgcacctgcatccaacatggcagcgtacaatcatccagcgtctgacgacaacattcccacattgccagtttgtcttaacaacccactctcctttagtgatcagtgattgcaaagatgtgctggtttattctctggatgatggcgaattaacgcagctcccgtctctgtatgggcaagatgcgaatactgtgcttttgaatgtgatggatacggatattcgcaatgcgacagtggcagaaaaacttaacgatcttttggatctgattcagaaaaacgactttatcaacgctaacgctcttctgaatacgctaagcctggaacttcctgaaaaccatcttgaactggtgaaagccagaatgcttctgcgcaaacaggaaattaaacatgcgcgaaataactaa

SEQ ID NO: 86351 - DNA, 663 bp, Escherichia coli 97.0246
atgcgcgaaataactaaagggcaaccaccggccagtttgcaacagtgggtgagagcaaaaccacgggataaaaatgccaatcagtggtttcaggaactttatgcgcaaaaaaaatgggatatcgttggcgatctcagccagcagtgcgctcaggagcaattttatctctgtgcttattgctgcgatcgcgtgacaggtacaaaccgcgataccgttaatgaacatgtcgaagccagggatttagttcctgctcgcagtctggaattcacgaatatcgttgcaagctgcaaaacaaaaggccagtgtgacgactcgcataagaaccagccattgctgttaacgccgcttatgccggaatgtgaaaccgagtttatcttcaagatcagtggtcgaattgaagggacgacgccgagagctatcgatgcgattaaggtactcaaccttggcgatagtgaacgtaacaatcgggcattaattgaaaaacgtaagcagctttccgacagccttctgtgggctaatggcattgatccttcagaggggcttgaggatgacgacctgctgcaagcggttatcgacgaattactcacccccgtcgacggttatcgcacctttcgctcccgtggtggcgaatattctaaaaaactggatgaccgcatgacataa

SEQ ID NO: 86352 - DNA, 2292 bp, Escherichia coli 1.2264
atgcaatacgttgacaggagccgtgtgctcccaccaccaagtttagtcactgacaatattgtaaaggaaaacctctatgatattggggcatttctggcgttggaatctcagcggagagctcagactcgcccaccgcgtctggctagcttatccaaagttgaggggcttaaagactcactctatgaactctttaacgggcggtgtgccttttgtgagtgcaaccatcattcattaagtattcaacgttttcgtcctagcagtaatgctacccctatgggaaaaaatgcagatgcaccgctttattacctttggcttgcttgggcatggcaaaacttttatctcgtctgcgctcagtgtaatgagttaatgatgcgcaattttcttgtaacagggaaacgtatgccagtaccttcctcgcaggaatatcaggactatctgcgtagtgaaagtagtttgtggcctcagtggccgccaaaggaggaaagcctgctgttagatccatgccagataaaatcctttgcttcacattttgatgttagacctcagggagaatttaattacttaagccgtaggggaatggcaacgattaatattttgaatcttaatgacgctgatctgatatcacgccgtgcgcagcgctatagtgagtatatgaagcgcctatcagagtctattgaggctcgctctatcgatttgctttccagcgtactcaatttcagtagacaggagtttggcggcagttggtatctgcttttaagacgacttgcgtcacatatcgatggtgagaaaggcaaggcgttgtcaatgggaaaaataaaatctttcttccagctcatgtttcagaatcctgagcaaggaagcgatcatctgtatcaggcatttgaagacctttacgcgcttcccagggatgagcggattgaggaaatgccatctcccccaaaaggtgacttacgtcgcgtacaatttcagaatttcaaatcgctggaagcggttgaacttgagctacccgcaatgcctgagttggagaatggcaaaaaaccagaggctagagctctactgctccttggggaaaatgcggccgggaaaagtaccattctcgaaggtattgcgttagctcttgtctcggcggaaggaagaaagaggctcaatttgcggttacgggattttattttgtctcctgcattactggccggtgatccccgtttggcgcctcatatggctgaggttgtacttactcaggataatgatgcctcgctgacactgacgttaaaaaaaggtgggagtatcgtcgtaactttgaatgggcagtttaatgttgggccagtatttgcttacggagcttttcgtcagtatagacaaggaaggcggttatatactactgacaaaacagtgcgcaatctcttcgatggaagtctactcgggaatccacaaagttggcttttgagcctcagtaacgtagattttgaccgagtagttgcagcgcttagggaggtgttgtccattgaaggcgagttcgacgtgattaaacgttctcctgaaagaaaagtatgttctattatcaccgctattaatggtatcgaaactcatactcccttgaatgttgcgtcttcaggcttccgcactgtgctggcaatggtctgcgatattatgcagggtttaatggatgagcgtgttgccccgcaatttgagggctttgagaatgctcggggaattgtactaattgatgaagttgaagcacatcttcacccacgctggaaaatgcagatcatgggtggtttgcgacgggcactgccgggtgtgacctttatcgtaacaacgcatgacccgctatgtctgcgtggcatgtataatggagaagtccgggttatgcaacgtatattgcataatgatttacgctcagaatcaagggcttcccagagggttgaaacgttgactgaattgccagacatcactaaattacgagtcgatcaactactgacctctgatttttttcagctcgactccactgatgaacccaggctcgatcgccttattgctcaggttgccgatctgctggcaaaacgcgaacaaggtgaggatcttaccgcagaagagagtgaggttatcggaacatttgaatgtgacattgccagtgctatgcctgtagggacttctgaggcacatcgcttggttcaggaggctgtagcggaatatttacaggaacggcgtcaggctaccgctacaaaaattcaggcattacaggatgggacgcgctcacgcattttaaacattctgcgtgaggtgatgcaatga

SEQ ID NO: 86353 - DNA, 927 bp, Escherichia coli 1.2264
atgagacacgtccctcgtgggtcagcccaaccgccgttatcattatcggcgttggattctaatggaaaaagtgaattacagcgagcgcgggaacattatgctgagccagaacaggcaaagcgatttgaatttaaagcctattcttccgacgatgtaaaatggcgattaaacacactattccattttaagtgtgcctattgtgagacttttttctctgcttcttcaccggtagacgtcgaacactaccgcccaaaaagtagagtgagtgaagatgctgcgcatccgggatactggtggctagcgatggactgggagaaccttttacccagttgcattgactgtaatcgtaaaaggcggcagcacattgttaatcagtccagtaatcttatttctcttttggagaatagccggagagcagccacttctggagggaaaaaagacagctttcctctagccaataggggggtacgtatgcagcctgaaagcagagatcactttgaagaacaggctttgttacttaatccctgcgaacaccaaccggaatcattcctgcattttgtcagcataggcgcaccttctcttagtctggtagtgcctacaggagatagagaaagtccacatggcgcaacgtctattcatgtctacgggctcaatcgtctcggtttagttcaggaccgcacgcgttacttacgtcgactcgaatttttgggtgatatgatgatatcgctcggtgagcttattgatcaagtggatagaatggcgttagaagaagttcagagggacgaaatcatacgcccattgagattattattggataaaaccggtaaagaaatgactcagatggctagaccggatcagccatattcagtgatggctgaaacgtggatagcccaattctttcaacaaatagccaaccggggagtatga

SEQ ID NO: 86354 - DNA, 1398 bp, Burkholderia gladioli BSR3
atgtcgagcttgaatatccgaaggttaagcttgaagggctaccgctgcttcgatgcaatagacatcgacttcgacgagcgcctgaccgtgcttatcgcatcaaacggtgctggcaagacttctatcctcgatgcgctcgcagtagcattcggtccatacgtcggggctttcgacgaaggcatgggtcgacattttgagaccagcgatatccgccagttgcgtgtaagggcaactgcaaccaacgaaatggaatacaccccaggtggcattcaactggaagccactggttggattccggacagcatcatggatcgtctgggggagccggccgtctggagacgcagtcttgctggccctgttcgagcgaaaactaccatccgagacgcgaaggagctgattaattacggcaagcatttgcaggaagcggtcagaactcccaagacggatgttgtgctaccgttggttgcctattatggaactggccgcctctggcaacgcaagaaactaacagacggaaaactgataggtacgtcccgcaccagcggctactcagattgccttaattcggcttcgagctacaaggcgtttgtggcttggttccggtactggagcacgaacgcgctgaaagcggaattggaagcgcataaggtgcggcgagagcccgaaaagaccgagttccatgactacattgaatcggtcagcaatgccgtcgacacttgcttgaaacccagtaactggcgggagatcgcctattcgcttgcccgggaacagctggttgctcaccacgaacagcatggggagttacccgtcgagctgctcagcgacggcattcggaacatgatcggcatggtggccgacattgcgtttcgagccacaaagcttaatccgcaactgggcggctatgcaggccgcgagactccgggcattgtcctgattgacgaagtagatatgcatttgcatcctgcatggcagcaagtcgtggtgcagaccctgctaacggcttttccggccatgcagttcatcgtcacgacccacagtccgcaggtgttaagcgccgtgccagcccattccatcagaattcttagccggcattgggatgaggagtcgaagaagtaccactccgttgtcgagaaacccagcgtgcaaacagaagggatacccagcgcagatgtgttggccttcgccatggatacggatccaacgcccaacgtggcacccgctcgacagctaagcgaatataaggcattgattcagcaggacatggaagagtctccggaagctttgatgttacaccgaaaattgcttgatcatttcggagccgctcatcccgtcttgctcgaatgcgatcgactgattcgccttcaacgattcaagcgcaaactaccgcgcagggactga

SEQ ID NO: 86355 - DNA, 630 bp, Burkholderia gladioli BSR3
gtgcataaattgcaacgaggccttgcgcccacatgcctgaacaactatcaacctccccaactttggagtgacgttacatctgcagataaagggcaaatctggcaggaacttgaggcaatgcaagggcagcgttgtgcgtattgcgaggcacagattgagaacggaaggcgccatatcgagcactttcgtcaacgcggccgcttccctcaaggtacgttcgactggctcaacctgtttggttcctgcaaccgatccgattgctgcggcaagcacaaggaccagtgcggcctctatgatccagccgatctgatcaagccggacatagaagatcccgatcatttctacgtattcgttagcgacggaacgattgcagtacgccaaggactgagtgaccatgatgcgcatcgcgcacgcgagaccctacggatattgaatctggatgcgcagtacggtccgttacgacgtatgcgtgagcaagcggttgcgggatatattcaaaccgccgaagaatggcagcaaatgtctgtcgagttcgagccgcacgaatggatgcctgcattgcagaccgagctcgcattgatcctggagatgccatttgctactgcaatcaggcacatccttaccccgtga

SEQ ID NO: 86356 - DNA, 1338 bp, Bacteroides fluxus YIT 12057
atgagaatcaaagaggtcaatatagtcaatttcaaaggtttccagaacgagacagtcactttcaatggaaaccttacggttgtcatcggaaacaacacggccggtaagaccaccttgctgaaagcgcttcaagtgggtttgggagcttatctgcagagcctgaaaacgcttcccggtggaacttcctatcgccgcaatttcagttcactcgacaaattcatgagatttgaccaggagctgagagattatgttcccaatacagagaagcccagaataaccatccatgccgattttccgataaccacatcttcggatgggcattgtcctgaagtgtcatttatacccatccgttggtacagggaatatgcaggcaattacaccacacatacacgcgtttcggcaggtgaactgattgatgcggttcaccatatggaacatttaaggaatgaagagaaagagaactccatttatccgttagtcctttcctttggagctaaaaggaccagtgatgctcaggccaaaagcaagtctacagtcaaagaaagggcatcccgaattgaaaaagcctacaaatttgccttgcatgacaaagtggatttcgagggagccatggagtggttgaagcactacgacaagaatatcaaagacaggaaagaatttgaaggcacaagagaggctttttttgaagctttgcagcaggccattccagccttgtctgagatagatttcgacaacggagagattgaagccgtggtcagcgttaccggacataccccatcccgtcatcacttttcctacatgagtgacggacttcagtccatgatcaacattgtcgctgaaatcgctcaccgctgtattgaactgaacggttttctaggacagcatgcaatcaagatgactcccggaattgtcatgattgacgaaatagacctgtatttgcacccgcactggcagaaacatgtcttgcaggatctgacaaatgcctttcccatgatacagttcatcgtatccacgcatagtcctttcattgttcaaagtcttcaggaaggacaacttgtaagctttgacccaaatgtcctgacctctggagaacccttccgggaggggctggaggatatcacttcagaacgtatgggattgcagcaagatatccggagcagacgcttcaatgaaatggtggaagttgcatcacgcttgtttgaagcaaccgataagggaagtgcggacagagatgagctaaaggctcgccttaacgaaatcgaagcggaattcagcgatgacccggcctatcttgcgctggtcaagacggaacttaaagcaaggcagaaacaattatga

SEQ ID NO: 86357 - DNA, 738 bp, Bacteroides fluxus YIT 12057
atgagacctgttgagaaaaaacgacccggagaactgatctgttacacggattcgaacaaccaaaaggtagaacatcggataaaggaacattatcctgattatggtgatgccaagttccctttgagtgccaacatcggtgctttttgttcctattgcgagggatgtgaaaaaatccccacgctggatgtggaacatcttgctgctaaaagtaaaggtggagctgagacagcatgggataatttcctgttgtgctgtaaagtctgcaacagcaataaaggcacaaaagtggatgccgattgtcactggcctcatttgaacaatacttattatagtcttatctatgatgaaacagggagagttcatgtcaatggcaatatgtcggaactgtcaaggaagaaagcccagaatttgttggatctgatacagcttcaaagataccctggaactgacaagtctccttctccgaaagacttccgatggaaatatcgctttgaagcatggaacaaggcatccagatacaaagaactctacctgaaaggtgctatagcagaagatgatgtaatagactatgcccattgtaacggacaatggtccatctggtttaccgtgttcaaaggtatagactctatcagacaccggctgattaccgattttccgggtacctgcgcgcattgctttgatgcaaacaaccattatgagcctattgaaaggaatcctggctctccggatccagtatga

SEQ ID NO: 86358 - DNA, 1242 bp, Vibrio parahaemolyticus RIMD 2210633
ttggttaaaagcatgattgaatcaatagatttcaaattaattggcactagtgataagcgtgttatcactaacttaaacggtaaaaatctcataatcacaggtgaaaacggctgcggcaagactcgctttctacgtcaattacatcaatacctacagcaattctttaaaagacagatacagtctaaagaaagcattcagcaacaattaaactatcaccaaacacagttagagaacactagcgtatcgcaccaaacttacaattatttcgttgagcacgttcagtcatacacaaagcaattagaacgtatatctaacgaaagcatggatatcagtgattctgatgctctgttcgaattggttaacaataatcaattcatccttcgctttttcgaagcgaatcgacttgcaaacaacatagctgggaatggtcaaattgaaagcatatcgaacgtgaagcaggctggtaaatcccaaaatttcgaacaagattcaagtaatcagttcgaaaaatatctagtcagttattacaactatggttcgcacgtaattgctcgtgaaaacaatccagagaaagagcaacagataaacgcatggtttgagaaagtacaaaatgatctccgtgacctgtttgaagatcatggactaattcttcaatacaacccagaggaacaagccttctacattcaccaagaaggcaaagatccatatcgatttaataacttgtcttctggctacagttcaattttaagcatttatgccgatttgcttatgaaggttgagttacgtgatatacctgcggaagatatcactggcttcgttttaattgacgagatcgatgcccatctacatgtttcgattcaacggaaaatattttctttctttgacaaggctttcccaaagattcagttcattgtaactacacattcaccttttgtagttcaatcggtaaatgactcaataatctatgacctaagtaaacttgaaccactggaagacctttctatgtactcatatgagtccattttaaaagggttactaggggttgagagcacttccgatatattaaacaaacggttggatgagatggctgaaatcattaaccaagagccagtaaacaccgaaaaattacaggaattaatcgattcaattgaaccgtatgaagggcagttaaacgctcgttcacgagcatttcttttacttggcaagaatgctcttttagattcgactgatggtgaggggtaa

SEQ ID NO: 86359 - DNA, 666 bp, Vibrio parahaemolyticus RIMD 2210633; identical to SEQ ID NO: 86125

SEQ ID NO: 86360 - DNA, 1422 bp, Vibrio parahaemolyticus RIMD 2210633; identical to SEQ ID NO: 86308

SEQ ID NO: 86361 - DNA, 645 bp, Vibrio parahaemolyticus RIMD 2210633; identical to SEQ ID NO: 86309

SEQ ID NO: 86362 - DNA, 1290 bp, Nitrosospira multiformis ATCC 25196
atgtttaaaaaaatcgtactacatggttggcgtcagttccggaacgttgacatcgatttccacccacgtctgacagtgctgactggagctaatggagcaggtaagaccacgttattaaatttggttagtaggcacttcggttgggacgggtcatttataagcacaccagtaccacgtcggtcgaacccgagtctcatgtattcgacagatttttgggatatagacgatatccaagttgacattatccattcctttgaaagagagcagaatcggaaaaagcaagctgctgcgcaaggatcgcaaacaacaattgggaaaattatttacggagatggaactgagacactaataacagtaccaaatagcgaagtcggatcaagatacgatgtaagtattccggcacgacaacgcatcgatggcctgcatattccttcacaccgcgcaccgtccacttatcagcaggttcaaaatattccgacgattcctcgcagaagacaggaggtatttaaccaatatcttagtcttgtccagagtagataccttggaagctacactcaatggtctccacagtattacatgaaggaaacgctaatcagtctagctacttttggatatggcaatgcagttgtagatgcagacccagagtctgctaggctctttgaggggtttcaggaaattcttcgaaaaatgcttcctccaaaactcaggtttaaacgcttacaaattcgtgttccggaggttattctagaaacagaaacgggaaacttctctatcgatgctctctccggaggggctgcagcagtaatagatttagcgtggcaagtatttatgtatgagccatcagaaagtgagtttgtggtaacactggatgagcctgagaatcatctgcatcccgaactgcagcagagagttttggcagatctcctgacagctttcccgtccgtacaattcgtagtcgctacccacagtccattcattgttggatctgtaccccattctcatgtttatgtactcggatatgacgacagtcgccgcgtaaatagcactctgctagatacagtaaacaaaactgggacggccaacgaaatactgagagacgtgcttggacttgagtttacgattccagtctgggtcgaaaacaggttggagaatttgattgaaaaatattcgaaaaaggatttcacggaagacaacctaatgatgcttcgtcaagaaatgacttcgcttggtttgggcaagcacgtacctcaaacgatttcaatgctggcacagaagaaggatgggcaatga

SEQ ID NO: 86363 - DNA, 651 bp, Nitrosospira multiformis ATCC 25196
atgatcaagctaaataaattgactgtgccacctgagattgcggagaaaattagacagcgccagcagcattacaatgaacttgatgcgaaaggtgaacaaataccagattccctggcttccgcatataaagcacctgaagttaaagagttacttcgatgcgaaactgcggaaaaatgtgcttattgcgagagcaaaatatctcacgtcgattacggagatgtagagcacctacttccaaagtctaagtttcctcagctgagatacagctatgagaacttaacttatacatgcagtgtttgcaacacaaaaaagggggatttttttgacgcacaaacacctctactaaatccttacaaggataagcctgaagatcatctgatggcggtaggatcaatgattttctttatcccagggagtgatagaggtttagttactcagaaacggcttgcattaaaccgaagcaacctagtggaacggcgtggcgaacgtttggagagcgtagctactctcattgatcagattgctcgaacgaaaacatcagccatcagggaggtgcttctccatgaattaaaggaagaatgcgaagctagtgaggagtatgcttttgtggtacgaacttacgtggaggcagttcttccgtggatcaattag

SEQ ID NO: 86364 - DNA, 1452 bp, Aeromonas salmonicida subsp. salmonicida A449
atgaaagtcaataatttgcatattcgctctcgctttaaaaaccttgaaaacgtgaaggtggactttgacgaaaaccacctgatgacagtcgtggtaggccgaaatggttcgggtaaatccaacgtactggaagccttagtggcgatttttcgcaaccttgacttgggagatgcaccaccgttctcatacgagttgatttatcgacttggcgagcctcacaagcaaaataagcccagtgaacggtggctggaaatcactattgatgcagacccaactcgtggcacaatcgcaaagcaataccaagtacaagtgcgagacttattagcagataacgaacttaataatacatccaccaataaaccttcaggtgaaaccattccgttttcaaaagtgaaacgcgacaaagaaggtaaagccccgtacctacctaactatgtgtttgcctattattcaggccctagcgatcgtttggaaaataactttaagaaacatcgcacaaatttttaccgtcggctacttgaggataagttggatctaaaaggcgacattaggcctttgttctatgccaagccacaccacagccaatttgtgctattagcatttttcttatcagaacaagacagcgtagaaaaagcatttttgcgcgaacacctaggcattaaagacttagacagcattcactttgtgatgcggcaaccaggatgggcaaaacagaaaggagaattattctggggagcgaaaggagttgttcgtcgttttttagatgagctaatcaagcacacgctgtcccccgttaaagtgacacgtccggaagatacttcgttaacgaatagtaatattagcaaagagttcttccatttgtttttacccgatgtaaaggcactacgcgagtttgccaaagacctcaatcctgacgagctgtttaaaatgctcgaaagtacgttactttcggagattatttctggagtcagcattcgagttaaagtgtccagcagcaaggagccactgactttcagagagctcagcgaaggtgaacaacaactacttactgtattaggtttgctcaaattcactggaggaaaagactcattgtttttactcgatgaacccgacactcacctcaacccatcatgggcagtgaagtatttgaagttcctccgtgagttcgtaccaaaccatgaaaccagccatttgttgatggtgactcatcatccactcgctattgctgagttgaagaaagagcaggtacaggtcatgtggcgcgattctaactttcaggttcatgcacaagagccggaagaaagccccagaggcatggggtatggtggaatactcactagcgatatgtttggtttgctcacaactctggacaattcaacagaacgtttgctgcgattgcgtcggcgttttaccgaaaaacggagttatcgcccatacagagtaggcgtttga

SEQ ID NO: 86365 - DNA, 864 bp, Aeromonas salmonicida subsp. salmonicida A449
atgagacacttagacattgatttcacaaagcttgttctaccgcaaggctggcgagaaaaaactaaggaactttcagattcactcatagccgcgcaagacgaaaagcaacggtctgagatcataaataaaaatcaagatcactggaaagccgttaaaccaatattggcatctttgttcaaccataaatgctggtacacagaagcgcctcagcaaggtacggatgtagatatcgaccattttcggcccaaaaagcgtgtgcaagaaacactatcaacggcaaaacagcatgacggttactggtggttagcattcaaccttcaaaattatcgttacagctgcattgtcgcgaaccgtcgacgaaccgatgtggagactggagtgactggcggtaaagctgatcattttccactatgcgatgaaagcatgcgagcgaggaccccaagttgcgatctagaggctgaacaaccaatactgctagatccattaaaggctaccgacgtacagttgctatacttcaaaccagacggtgaagcaatgcctcggttttctgaaaaaaaccatgctcgcaagtttatgcgcgcggaccaatccattatattttatagccttaatcattcagattttgttcgctgccgcatagaattacgcgacaagattgatagtgacgtcaaagctgcaaagagatacttcaataagttggagacaggggatgcagacaacgacctcgcgtatgaacaagcaatttgccgcttacgaaaaatgcgcagcaaagaagctccattctccagtttttgtatagcttacttggatggtttcaggcataaaccagaatatgaaggcgtattggatgcagtttttttataa

SEQ ID NO: 86366 - DNA, 1095 bp, Clostridium sticklandii
gtgagggttttagatgttgtatttgataatcatcctatatttgatagcaatactatttcttttgaaacagaggataaaaaaattctagatactattattttagctgggattaatggttcaggtaaaactactctgctttctagtattttcaagacatttaaaaagctagaggataacaaattctgtttagatgaaaaagatacagtaaatttacatttagatataaatgaagatgaacttgagaaagcacctaaaatgatttatcttccatctgaggtgagatttcaaagtattcataactccaatcaagctgatgagatacctcttgcctattgtattgatgataaaagcactcatgatataatttcatatatcaagcaggcttttgataagcagattttttcgaatccagaaacaacggtaggaaagagtatagatgcagtgtgcgatgaaataaattctattttttcaattctagatatggatgtttatttggtaggaattaaagaccctaaaaccaagatgccgctgtttagaaatgagtcaggagtagagtttgatattaacgggctttcatctggagagaaacagctgtttattaggcttttatctcttaaatctctagagcctgaaggttgtgtgattttgatagatgagccagagatttcgcttcatccatcatggcagcaaagaatagttgaagtatatcaaaatataggtaaagataaccaaataatcatagctacccattctccacacattatttcatcagtgaaaagagaatcactcaaaattctatctaaaaaagagagatgggtaaaggtaataaatggtgagaatctagatgagacctatggtgttacagcagatatgatattgcttgatatcatgggactttcgacaactaggcatcctcacatccaagagaaaattgatgagttaaaaagcatggttagaaatgagctttacgaaactgaagagtttaaactattatatgaagatattacaggagtcatagggacaatagaccaggatattttactggttaatatagaaatagctagaagaaagggactaaaaaatgctggacattaa

SEQ ID NO: 86367 - DNA, 603 bp, Clostridium sticklandii
atgctggacattaaaaaggcagatcctccagattttttactagaatttatagaagaaaagtctaatgccagttataagaatatgcgtggagatatgagaaaggatttacgtcattatattgcatataatgagcagtgcaaatcttcgagatgtttttgcgcttattgcgagagagagattgttgtgaattcagacaatgccaatggctcgcatattgaacatatcaagccgcaatctagatttccagaagatgatttggattatgacaatatgattgtttcatgtaatgctaaggaaagctgtgggataagaaaaggaagccactatttcgaaggctttatagatccagttaatttttcaccagatgttttttttatttatgaccttatgactggagagataattccaaaagaaggaataaaagatagtaatactccagcgtataaaagtctagatttgctaggcttaaacagtgtaagactaactgatgcaagaaagcgtgtgatagttgaaatagataacttacttaaatttatgaagaaagaagatataagacattttttaaagcagttcccaagcttattggattatatgcttaaatag

SEQ ID NO: 86368 - DNA, 2931 bp, Aliivibrio salmonicida LFI1238
atgagaagttttaaagaaatacaagaaattttaggtacgcagcctgatgtgaaaaaaatataccttataggctgtacaggtgcaggtaaaacatcactggttcaacatatcataggctctaaaaaacacggttttccggtgactagtcatagacgaactacgattgcacctactgaatatgtaattcaaaaaaacattccttttaaaacaacaattattttaaaaaataagaatgatgtagtttttgcaatagaggaattaattcaaggagctatattaaaagctaagcaagataaagcgaccactgaagatgtggtttttgaattagaacaatcccccgatgaccgatttaagctgaatcaaatggttaaaggtgaaacgtttgtaaaagttgcaaatgacattattacgaatgtattaccgcctataagtggtaaagatattaacgatgaaacgttgctatcagactcatttattaaagatgaaataaagaaaattgttactgaaattttagctgaaattgaagctaactttaatagagcgtgcggaaatggtcatacgctatttacaaataaaacgttaacgatagatggtattagtgacaaagatgaatttatactgaaaactaagaaactcttaagccatgattttggttctatttctatattagctgaatatatacgcattgaaggcgacttgttagctgattggcttgatcctaacctagagtttttattaattgatggagaggggattgggcactctttaggtgaaaaaagagatacgctatcttcacgtcattacaatttttttaattattgtaataatattgtattaattgatgatgcgaatgatccgtttgcggctggtggtcatggtgcaattgaggggatattcttaaacgggtatcaagagaaatttaaattagtattctctaaaacagataaacttgagcagacagatctgaatgcatactttagacgtagtttaaataatcttagaaatgcgctaaaaaaagatgaaatagaatttaatgaagaaaacaaagatacttacaaactaaatgcgcttgatgataaaaacattaatgatgaatctagaaaaacaatacaacggctattaactaacattagtaatagtaaaaaaaagcacttaacccctttagaatatgattttgacttactgctttctaaatacaatagtgagacattggtatcaactattgttaatagaattgaagaggaacattgggctgtagttaaagctctttcaaaacgacttcagagtgcagatattgaatataggcatttaaaaccaattagctggattctgatttttttgatgcatgaacttaactcttttcttaaaagagatgaactaacttctgaagtatttgatagtcaaaatataatcaaacagaatgtatctcaccgattggtacagtatatatatactaattttgtaaaagagaaagagcacttgtggcaacaagcatatgaaaaaagtggttttggctctcacagagaacggaaagattttatctttaatcaaatagttagggtttttttacctagtaaagataaagaggatgcatttaaatcatttaagaaagacattaaaagcttactattaaagtcaggagcacttgagctaaagactgcggtaaaaactgaaattactcatgtatctataaaaaaaatatttggatctaaaaacgttgaatggtcgttaggtgatgatgttaatgtcttaattggtaagaatggttgtggcaaatcaactttgttaaaactcatttttgcttgtattaataatgatgaggaaacattagagtcatttaggtctccatatgtagaattaacaattttaaaaacctttgataatggtgaaactcaaatatctaaaatatcacaaagtaaatcaccatcaaaaattaatgctgtcatggtgaatacattcgatattaagttagatcggcagaacaatgatgtagttgacttagatagtcagttactgaaactaacaggagagctagaaggatttcagcgtggtctattacaatcaattaataaaactgttggagaacaaattaagcaacgagatgaggcaataagtaaacttacaactgctactcctgatgattttgctcgtttacaagaactaagcattcaaataaatgatgcaacgacaaaaatatataaaccgttgattgagtttaagtcaattattgatgagtatttttcaggtacaaataaatcgataattattgatgatgaagagttcccattagttgtcgaagttgaaaataattctcaccatattaaagtgacggatttgtcgtcaggtgaaaagcaacttttaattatcttcttaacggtgattctacaaaagaataaatcatttatattattaatggatgagccagaaacatccttacatgtagagtggcaagcaacgtttattgattttattaagaaattaaatcctaacgtacaaattattattgcgactcataaccctcttattttgttgaatagagaaagtgatgaaataggaattattgaagcaaataatgatgaagtgcaaaaaagaacaagtggaactaagtacctagatatatcatcaatcttgttagaccattttaaattaccatctttggttggcactcaaatgcaaaatgatatccagcgttttagtgcgcttaagatgcgagagcctgaattaaatttggaagagaaaaatcagttatctgaccttggtgaattattagaaaatagtttggctggtgatatgatttataataaaaaatatttcgattttttaacctttcttaaaaataacaagcacatcagttatgaacaatatgaagcttcttcagagcaggatatggcagacttcttaagtgagtttggaggctcattcaatgattga

SEQ ID NO: 86369 - DNA, 750 bp, Aliivibrio salmonicida LFI1238
atgcgtactttatatcaacatgccgactactcagtagctcttcaaaactttaatagcagtagtccaaagaaatggtctaagttccaaggagttcaccttgcggttactaatcataggtgtccaatttgtgaatgtactttaaaaaatgggcaactgttaatgagagctagtagtaagcctggtaagcctcctgtccaagttaaagctactgttgatcattatcgaccgcaaaagtattatccttttctagagtttgaggataaaaattatattttaatgtgctctgaatgtaataatatttataaaggctcggaattcccaatatttggcgttcaggtaacgagagcaaccagtgttgcaggattagcaacagaacaaccacttatagctaatcctgttagtgataatatattcgatttatttaaagtcgttgctaggcgtttaacaaatgggcgaaaggttctagagttaacgcctaaacatacatctggttatctgcatgagaaagctttagccacaattaaactattcggtataggggagtgtgaagttaatgcacattctaatgttaatattaaagcattgagagttaatctacttcgcagccatttttcaatgtttgaagatttcattaatgcttatgaaaataaagatgtacctaaaatgcgaagtgaaatcacgagaaaaaaattagattcatacggtttcttgaaaattatacttgctaataatgtaacaaacctaacttaa

SEQ ID NO: 86370 - DNA, 1245 bp, Aliivibrio salmonicida LFI1238
atggacaaatatatcaatcgtattagcggcttactgccaaacacagaaaaaccaatttcaattgaagctaatggaagaaatataatcgttactggaatgaacggatgtggcaaaactctctttctaaatgcattatttgatgcaataaaaagaaatgttgaacctagtaacatacaacaaaaaaataatctacagacaaatattgagcattataaagtgttattaaaaagggacggtatcgataaagttcaacgagaacaatataaagacacattagctcaatgggaaactcaattagacaatatgttcaatgtaaataccattgaacttgaatgggataatcatgataatgcattggataaatcgttacaaaaatcattagttgttaatttctttgaggctactagacaatactcaaataatcggccacatcaacaacaacagcaaaatactttatctaaaataagaagttatggaaaatctcaacaactaagtcaagatttttcaaccacttttgaagcttatcttgtagctttattagaggctggttatttagcctatgcattacgaaatgactctgaacaaaaagaaaaagtagatttatggcttggaacaattacgaatgatttacagttcttatttgaagatgaatcattacaacttatttataacgaaaaagaaaaagttttttacataaatcaaaatgataaaaaaccatacctactttcaaatctatcctctggctattcatctattttaaaaatctatattgatttgttaatgaaagttgagttacaagagattcaacctaaagagctatctggtatagttattattgatgaaatagatgcccacctacacgtatctcttcaaaagaaaatattatcatttcttgataattcttacccaaatgtacagttcataatatcaactcattcaccttttgttcttcaatcagttaataacgcagttatttatgatctaagtaaatttgagcaattagaggatttatcgttatattcttatgaagctataattaaaggtttattaggagtaacaactaactcaaataacttaatagatattgttaatgaattagcatctctaacaccgaacattaaattaaataaagaccgcgttaatgaactcattggcaaactgacactaattgaggataaattagactcaaagtctaaagtcgtatatctcatggcacaacaagctatagacgatttaggagtataa

SEQ ID NO: 86371 - DNA, 666 bp, Aliivibrio salmonicida LFI1238
ttgtttaatgttactagattggcggaagtgccagaatgcttatcacgcggtaatcaatataatcatcaacaagttgttagctccttaaaaacaatgttttttgaaaaatgttacttatgtgaacgaaacgatattcaagatgttgaagtagaacattttaaccctcagcaagcaggtggtggacgaacagattggaataatctttattactcatgcagtcgttgtaatagcttaaaaagtaatactcataccaaattattagattgcacagatgcaaatattgatatatttcgtaaaattcgattagtgatgacagtagctccagacgatgatgtgctagttgaagcgaccgataaaaacccttgtgaacaaacacaaaatacggtgcggctcctaaatgaatgttataacagtacaaatactgctttacgtggtgttagtcgagaggcattaattgagcaaatatacgaatatatgattgcatttatgaatgcgcggaatttgttaaaaaaaccgtctacgggtaggacaattaaacaaggagcaatggaaacaatcgaagcaatgttaaatgttacgcatccatttagtgcattctggcgttggcaatatttgcatgacagttttctaacagaacattattcaaaccttgaaaatggtttttaa

SEQ ID NO: 86372 - DNA, 576 bp, Acinetobacter oleivorans DR1
ttgatactcctactggagagattttttttagaattcctttcgtctggctttaagtcaacactattcatacttttgggattaataaaagaaatagactttcgttttgataaaaatagaatagcggccaaggactttgaggggattatactaattgatgaaatcgaattacatttacaccctgaatggcaaggtcgaattatcaatattcttaaagaacttttcccttatgcacagttcttcatcgctacacacagccctcatgttattcagtcagcctttgctggagaagtgatcgcattagaaagactaaataacgaaatagttcttcgggatataccaaatccagaatacggttaccaaggatggacaatagaagaaatccttgaagatgttatggggatggcagatttaagaaccaagctttataaatcggtaaaagggagatttgatgaggcgcttcaagaaagaaatagagataaagcatatgaagcatattgtcagttagataaaatgcttcatcctaattatcctttacgtccggtattcaagctacagttagatagtcttggagaataa

SEQ ID NO: 86373 - DNA, 723 bp, Acinetobacter oleivorans DR1
gtgattaaactggaaaggagcaaaaagcctgcatatttgacagctgaaaaagttgaagagcttactaataaatttaaggcaactaaggctagtgtttggaagcatgcagaaataggagaagcattactggatagtagttcatttaaatgtgcttattgtgaatgccccttgcaaatagaagactcatatatgcaaatagagcattttaaagacaaggacacttatccggactacgtagttgattgggaaaatcttttgccatcttgtcagagatgtaatagaaagaaatggacgttagatgtagttatcgaacctattgttaatccatatgttgattaccctaaaaatcatttctttttagaagaatttagactttatgcaaaagacttgaaaggggaaataacgatttctaagcttgaccttaatgatgataaaaggcttgttcttccacggtttcttgctagtaatgaaatcgctagccagttagacagtatttttagaaatattataaatttggatgaagcaaggaaaagtttgtctaaacttttgaacagttgtcaggctgatagtccttacgcagcatttttatctacttgtttacatggaaagaaagagtatcaaattttgaaggaactattaaaaagtgaggaaattaacctttgggatgatgaaatggaggagttagattttaggtcaaagcaattgacattagaccgcaggtaa

SEQ ID NO: 86374 - DNA, 1296 bp, Streptomyces coelicolor A3(2)
gtggtagctggccgcaatggcgcgggaaaaacatctctcctgcgctgcattgctttggccctggctgccaaccctgagacgggccgcgcattggtaccgagttacgtcatgtggaggtcaccttttgacacaaggaccgtagggaagatctcagcagatctctttttggattccggtgatctttccgacctaaaccttgaaggtctccccgagaaacccggcacccatgcacgagtaggcatcacgctgactccacctgaagagatccctaaaacaggccgcaaaagaagcttgaatctaggctcggaatggactcaggtaatcgaatgcgacgacgatgacgaggaagtcgaccaggcaatctttccaactagaaattggttcacagcgggatacggccccttccgccgcctttcctcggaaattgcagatccgagatctacacgctcacaactggtcaccccaatagatccttcatcagtgatggatcgcttctctacattgttccacgaggacgccacgctaggggagggtgtttcatggctcgttggcctacatctgcgcagtctagaaaacgaaaagggagccggccggctccttcaaaacgtcctggaagtactgtcagatggactactgccagatggctacagccctgttcgagtatcttcctctggtctatgggtcaggcgccaaacaggtaaagcgtttccgctcaaagaaatgagtgacgggttcaggaccgtgaccgcgctcgttctcgatataatccgacaactccacacattctacggcaccctgcgaatgaggagatcaaagaaggggattgcaatttacgctccaggcgtgattttgatcgacgaagtcgacgcccatctacacgtggggtggcaacagcgaattgggggatggttgaagtctcacttcccaagaatccaattcatcgtctccacacacagcccttacatctgccaatcagcggacattgggggtttgattcgcctgcccggactgaacgagaactatccaccccaagtcgtgggagagcaactctacaagcggatcgtttacggcagcggtgacgatgctgcactttcagatctattcgggttggatacgccatacggcagcgaggctgagaaacttcgcagcaagcttatcgagattgaaggacgagtgctcgacggttcagcaagtaaagcagaggtaaggcagtacagggagatgagcgagacactcaccagctcgcttagcgcccgcgtagatgaagtctctggacgtctcgggagaagaaattga

SEQ ID NO: 86375 - DNA, 750 bp, Streptomyces coelicolor A3(2)
ttgattccactcaagcgtccgggtatctcggcaaacttagagaaaaggttgaccggcaagaccaagactctgaccgataatttggctgacccaaagaatgctcgcgaagcatggaaaagtgctcggacgatccgcagagacttgaaggtgctacttgccagcatggcggccggatttgcgcgctgcatgtactgcggagatagcctcgggacagacattgaccatttcaagccgatagcccgggacccactttctgcattcatctgggccaaccacttcctcgcctgctctcactgcaacagcaataagaagcgcgaccagtatccctgcagcccttccggtgaatgcctccttgtgaatcccagcaaggaagacccttacgagcacatgaatctgaacctccccacggggaaatatcaaggacaaacccaaaagggaaaggagactatacgggtattcggcctttctcgacccgacctggaacttggccgggcgcacgcgtacgtcagatgcgagtccatgctccgcgactggtcaacacgggtaggaaacggtcaggaggaagctgctagtgcagtcctcaagtctcttatgattcaaccattcgccgatgtcctttatgccatgattaagaaatctgaagcgccgggggcacctaacctctttgaagctgacgtccttacggcgctcaggagtgtgcgagaaaggatcgaaacacaggacgtagcggcttcctttcgaaatccgtga

SEQ ID NO: 86376 - DNA, 1602 bp, Shewanella sp. ANA-3
atgaaagtcgataaattacacattcgttctcgatttaaaaatttggaaaacgtaaaggtggactttgatgaagaccacctgatgactgtggtggtggggcgcaacggttcgggtaaatccaacgtgctggaagcgttagtagcgatatttaggaaccttgatttaggcgaagaaccaccgttttcatatgagttgatttatcgacttggcgagcctcgcaaaccaaatcagcccagcgaacgatggctggaaatcactattgatgccgatccgactcgtggcactaccgctaagcaatatcaagtacaggtgcgagacttgttggaagaagacgcatctgaagacatgtttggcaagactgcatcaggaaatatcgttccgttttcaaaggtgaaacgcgataaggaagggaaagcaccatatttgccaaactatgtatttgcttactattctggccccagtgatcgcttagagaatcactttaagaaacatcgcaccgatttttaccgtcgtctgcttaaagatgagttggatttaaagggcgatattcgcccgctgttctatgctaaaccccaccatagtcaatttgtactattggcttttttcttatcagagcaagacagcgcagaaaaagcgttcttgcgcgagcacttaggcattgaaggtttagacagtattcacttcgtgatgcgacaacccggttgggcaaaacaaaagggtgaattgttttggggtgcgcggggcgttgttcgccgctttttggacgagctaattaaacacacgttgtcaccggttaaggtaacgcgccaagaagatacctctttgactggtagtaatattcgtaatgagttctttcacctattcttgcccgatgtaaacgcattacgtgagtttgccaaagatctcagccctgatgagttgtttaaaatgctcgaaagtacgctgctttcagaaatcatctcagaagttagtattcgggtgaatgtgactagcagtaaagaccctctcaccttccgagaactcagtgaaggtgagcaacagcttctcaccgtattgggtctgctcaaatttactggtggcaaagactccctatttttacttgatgagcctgacacgcatctcaatccctcatgggcagtgaagtatctgaagttcctccgcgatttcgtaccaaaccatgaaactagccatttgctgatggtaacacatcatccacttgctattgctgagctgaaaaaagagcaagttcaagtgatgaaacgaaacggtgatcagcaaattgtcgctaagatgcctgctgaaaacccacggggtatggggataaatttgatactgcgcagtgatatgtttggtcttcaaaccacgttggatgatgatactaatcagaaactcagtaatagaaatgctctcgccgccaaagattctttatctaaagaagaagtagtgcgtgaaaatggatttcctgcagagaatgaagagcagtatctagccagacttaactcggagcttgggcaattaggcttcaatttggcgacagatgatccggattatctggagtttcttcgcaacaagtaccacgccaatcaggaggccggtcattaa

SEQ ID NO: 86377 - DNA, 810 bp, Shewanella sp. ANA-3
atgcgatggatttgtaaggatgacatagaggaatgcttgactcaggcttggcggactatggctgaccaagctaaggctgagcttattgcggctcaaacccaagaagagcggaaaaatatattaaaaaaagtcgcctcttcaaatgtttggcgtcagttttatgatttgctcccagaaaaattaaagaaaaagtgttggtactgtgaggctgaagatatacgtgctgatatgccagtcgatcacttcaggccaaagaataaggtggaagaagataaaaagcacgatggctattggtggttagcattcgattggcaaaactatcgatgtgcttgtacgttttgtaatagccgcagggtatttgatgagaccgagggcggaaaggcttgccgatttccacttgaaaatccggatgaaagggccattgcacctgaagacctggataagctgaggaaggagcgtccttcgtttcttgacccctttaattctcaagatgaaaagttgctttggtttgacaacgatgggttacctgagcctaggccactggcaacaattgagcagaaaactaaggtcgaaaattcaattgaaatttttcatctccatgaagccagaattgttcgggagcgaaataagattcgtttaaatattgagcgagaagttcgggatatcagggaacatcgaaatgttaaagacgcaactgataggttgcgaaaaatggtaagagatactgagaagctgtctcgtgccgcggtagtttatttgcgggctcatagagatctcccggaagtgaaagatattttgaatctggattaa

SEQ ID NO: 86378 - DNA, 1419 bp, Brevundimonas diminuta ATCC 11568
atgttcgacgaaccgatcgtggagttcgtccacgacggtcagcaacaaccggacgactgcgcctattcggtcgtcatcgggaacaacggttccggcaaaagccgcctcctcggcaatatcgccggtgagttcgttcgcttccatcggggtgccagcgggcgtggcgggcgatcccgcaagattcgggttctggactacgctgtagacggccggccctctgtcaacgcctttgaagacgtttgggctccacgcccgtcggtggacctttttccagagttgccatcccgcctgatcgcggttgctcttacggtcgtggacaagttccccctcgaaccctcggggtccagcgacgatgttctggaacgcaatctgctctccgacggcgaagacccgcagttctattgctacgtcggaatgcgggaccggaccaatcgggcctcgatctcggccctgatctatcgcgcgctcgacggcttggaccgcgcccgcagtgggcaggacaacgaacggctcagccaggttttcgatctgctcggctatgcgcccgagatccaggtcaagctgggtctcggaatcactccagacgttgcggagttcgcccgaggcgaacgggatttggagaaggtgtcggacacagacacgcgactgctcacccgtctacgcatggcgtccagaagcaagcgctactcgatcgattggctgcgacgcgcgctctacccgttcgtttccgcgaccaaggcgaaaacgatcagctacaacataactttcgacggcgcccttcggtcgagcccgttcgacaaggaggcactgcggctattgcggcgactgggcgccctgacgcttaagagcgtcatcgtccgacgccacgatggttttgagcacgatctgagagacgccagctccggccagatcacgatgctgacggttttcctgtctgtggccgcgaaccttcaggacggcagccttgtcttgatcgacgaaccggagacgagtctgcatcctgactggcaaagccggtacatcaacctgatgcgcgaggtcttctcaaacttcagaggctgccatttcgtcttcagcacccatagtccgctgattgtggctgacatgcccgagggggcgagcgtctattcaatggatcggcgtgagacggtatccagcgccgagctgatcggacgctcaccggattatgtaatggcgagagcattcgatgtcgtcgagccgtcaaacctctatctgcgcgatgtcttggccgaggcgctccgcttggttggcgaacgccagatcgggtccgaagccttcgaaaagcagctgacggaattagtccggctgtcagaaacgatggacgatggcgaacaggtcaagcgcatcgtgaaggatctgcaggacgccaaagcggagctgtcgcccgatggcggttaa

SEQ ID NO: 86379 - DNA, 651 bp, Brevundimonas diminuta ATCC 11568
atggcggttaaggcgatcgtttttagtgacgcgcaagctggcctgatcaagaccgctttcgacgaggcgctggaatggggcagcgaagagctgaccggccttcggggcgagatcaaacgcttctatctcacggaacaggcccggcgctgttgctactgccgcaagcagatccagaccaaccacggacgtgtttgggacgtcgaacatgtgatcgccagggttctcagaccggacttcacgttcgaacccgagaaccttgcggttgcctgcatcgactgcaactcagccaagagcgaccagaatatcctcgttgtcgagcgaagaacatttcctcgccgatccgacgcctattccatcatccatcctcattacgatgagtgggaagaccacctgttcttcggcaacgcgctcttcgcgccaaagtcggagaagggcgcacgcaccatcgtcgtctgcaagctctaccgatactataacctcgagtgcggggaggccttgctcaccaaagatcgtcgctatgccgatctggccgagaatatgcttctggccaaaaccgctctcgaagcagagccgtattctcttgccattggcgccatggtcaaaagagcggtggcggacgaactcaaaccgaatcctgcggaagaagattga

SEQ ID NO: 86380 - DNA, 1371 bp, Parasutterella excrementihominis YIT 11859
atgtcactttcagaactgaaagcaaaaatagaaagatccgacaatattggttgggagttagagatagggggccaaaagagtcttgtacatgagatcgacgaaaaagcttatttccagtcttttttcgtatcgagattaacccttttcaattacaaaaattttagttctgctaacggaaaacctttttctattcacttttctcctaaaaaaaatcaaagcccgaacgcgattttggtgggaataaatggggcaggaaaaaccaatcttttaacagcgattgcaagaggtttatcttggttggatgctggtatttctggagaacaatcccaagggaaacgcttaacagaaagcgatataagttacaatcaacctagtagcttcacagagctcgcactttctattactcttcctaattattccgctgaaactcggacattgatccttcgaaccacgaaaaaaggttccaccgaaactgtaacaaatgaagtagcatcttttagatcgttaggtagaaccttaagaatactcgctaatgaatatggtcacgcccttccagtccttctttattacccagcaaaccgctttgtttccaaagggatagattctggaaatattcgggcagacgaaaacaacttttctacctttccttcgattaactggttaattaaacaattcaaggtcatttccaatccttcttccgagggatatgcgtcatcaacactaattattgaagaggttaagaaactattaagcaaaatatttgaaacgtttaaaaatataaggctcgatcaaagctcaggagaagatgaaattattcttgactggagaaatgatcttcgaaccaaatttaaggatctctccctaggtcaaaagagctttatgattttatttttagatatcctcatgaatatctttctaaagtcaaaagaaaatatctcaaatcagagaggagtcttattaattgatgaaatagagaatcaccttcatccctcttggcaaagaaagatcttccctacattaaaaaaagcttttccaaacatacagattattgcatctacacatagtccgttcgttattcagacagttcccaaatctgaaatttatgttttggattcgcaatatccaactgatgccggccatcccacatctcaaaccgaaggtagtcaattcgactccgtaattgctaatatttttgatttaaatgaaaggggagatcaggaaattgttaatctgctatctgaatgcgaagcccatatcagatcaaatcaaattgaaatagccaaacgagaattagaaaagctgaaattacactttgggaaagacgacccatacgttaatttcttggatatattattaacatcaaaacaataa

SEQ ID NO: 86381 - DNA, 651 bp, Parasutterella excrementihominis YIT 11859
atgagatatttcgcaaaaactcagggagaattgtttgacacattgagaaagcaaacaaagaagaagatattacgcttgagctggtctgactttgtcacgaaacactataatctatactctgatattaaaagagaccttctgtcttcgcaaggagagtattgtgcctactgtgagaagagaatagatatagaaaatagccacattgatcattatttttctaggagtttattcaccaacctcacatacgacaaaagcaatctttatctatcttgcatgagcaatggtcattgcggtatcgcgaaagataacttaacagaatgtaaagaaatagacatcaaagaaacaattaaaccggatcaactaataaatggtaaatatatagagaattttcttttttacaccagagagggtgaaataaaggtcctacctcttgatgaattatctcctcgtgactttataaaacttgaaaacacaatatcaaaattaaatcttaacgaaccctctcttgtaaatgaaaggaaaaacctcctcagtactttagaaaaaatttataaagcacaaggtagaccttctaatgagatgattcaacgtatcaaaaacaaatatggaataccaaccctaattgaacaatacctcaaagaaaaaatataa

SEQ ID NO: 86382 - DNA, 1290 bp, Selenomonas sputigena ATCC 35185; identical to SEQ ID NO: 86166

SEQ ID NO: 86383 - DNA, 639 bp, Selenomonas sputigena ATCC 35185; identical to SEQ ID NO: 86167

SEQ ID NO: 86384 - DNA, 1374 bp, Eubacterium rectale DSM 17629
atgtgtgagttcaaaattcaagagttaggccttagaaattatagaggatttgataataaaaaatttgtgctcaatccaagaatgaatgtttttgctgggaaaaatggttctggtaagacttccgtattggaggctgctaatgtgatgctgggagcttatcttgcagcttacaagacttatgtaccttcacggtttgtatataatataaagtcaaccgatgcaagaagaaaaacgttgatttcagatgatagcatgattttgacgacaggatcaattgcacagtatccgtgtgaagtaagttgcaaggcgcagtggggcggaaataatacagagaacaatattgaatttagacgagttattttaaaagaagatgcaagaactaaatttggtggttctaatccgatgcagccagctgtaattgaatgggaaaataaaatatctaatgcgaatcactcggatagtaaagtggttcttccattagtgctttatttgagtacagcacgcctttttaaagatggaaataagaaaacaaatataaaaggtgtatttagtaggactgacgcatataatcattgtttggattcgcaacatggacttgaaattgcatttcgttatattgatactcttaaagctgtttcactagaagaaaatgggggaaaattatttcctgcatatgaggcaattttaaaggctgttaatgatgcattttgtgatgaattgaagccgggagaagaaattatatcttcgaccaaatatgaggatgatattattgcattaaaaacagcagatggaacaatccttccgtttcagctgttgagtgatggttatagaaatgtaataaagatggtacttgatatagctacgcgaatgtgcatattgaatccttatctaaagggtgatgcactcaaaatgacacctggaattgttataatagatgaaattgatttgagtttgcatcctacatggcagaaacgtattataggaattctgaaagaacaatttcctagaatacagtttatatgtgctacgcattctccttttattattcaatctttggatgaaggagagcttattactttggatcagccattagatagtgagtattccggagaaggattggaagatatagctgaagatgttatgggcgtagaattgcctcaatatagtgagagaaaacgaaagatatacgaagcagcctcaaaatattatacagccttgaaagaggccaagactcaagacgatatagctaggcttggcaaagaattggctgatttagaggcggaatatagtgataatcctgcttatatggcgtgggttcatcaaaaatatactgaacaggcatggaaagtgaagaaaaatgagaccagtagataa

SEQ ID NO: 86385 - DNA, 708 bp, Eubacterium rectale DSM 17629
atgagaccagtagataaaggtgaatcaccatataatacaataaaaaaatatcaggatgcactgccatatttaggtgaaaagataggttattattgttcatattgtgaatttccaattaagcatgtaccggaggttgaacatgttgtatcaaaatcaaagggcggagatataacggattggaagaacttgctgttgggatgtaaatattgtaatgctagaaaatcagctaacacaactcctgaaaatgatgatgattttttatggcctgatgtgaataatacagcaattgcttacttatatgaaaatggttatccaaaggtaaatgagcagcttttaatggaattagatccgacaggtgagttaaaagaaaaggcaaccaatacgtatgagctagtaaaacttggtaatgttcctgatttgagtaaaggggataaagataggcggcttatagaaagaaatactgcttattataaagcaaaggagtcattggacggatggctacatatgaaagatgcgccagatagctatagagaagatttaaaaaagcaaattattatgactgctttgggagatggcttttattctgtttggatgacagtctttgcaaatgagccacaaatattattagctttaattgatggttttgtgggaacaaataagaattgttatgatgaagaggggaatgttaaaaagaatatttcagtttag

SEQ ID NO: 86386 - DNA, 1374 bp, Eubacterium rectale M104/1
atgtgtgagttcaaaattcaagagttaggccttagaaattatagaggatttgataataaaaaatttgtgctcaatccaagaatgaatgtttttgctgggaaaaatggttctggtaagacttccgtattggaggctgctaatgtgatgctgggagcttatcttgcagcttacaagacttatgtaccttcacggtttgtatataatataaagtcaaccgatgcaagaagaaaaacgttgatttcagatgatagcatgattttgacgacaggatcaattgcacagtatccgtgtgaagtaagttgcaaggcgcagtggggcggaaataatacagagaacaatattgaatttagacgagttattttaaaagaagatgcaagaactaaatttggtggttctaatccgatgcagccagctgtaattgaatgggaaaataaaatatctaatgcgaatcactcggatagtaaagtggttcttccattagtgctttatttgagtacagcacgcctttttaaagatggaaataagaaaacaaatataaaaggtgtatttagtaggactgacgcatataatcattgtttggattcgcaacatggacttgaaattgcatttcgttatattgatactcttaaagctgtttcactagaagaaaatgggggaaaattatttcctgcatatgaggcaattttaaaggctgttaatgatgcattttgtgatgaattgaagccgggagaagaaattatatcttcgaccaaatatgaggatgatattattgcattaaaaacagcagatggaacaatccttccgtttcagctgttgagtgatggttatagaaatgtaataaagatggtacttgatatagctacgcgaatgtgcatattgaatccttatctaaagggtgatgcactcaaaatgacacctggaattgttataatagatgaaattgatttgagtttgcatcctacatggcagaaacgtattataggaattctgaaagaacaatttcctagaatacagtttatatgtgctacgcattctccttttattattcaatctttggatgagggagaacttattactttggatcaaccattagatagtgagtattccggagaaggattggaagatatagctgaagatgttatgggcgtagaattgcctcaatatagtgagagaaaacgaaagatatacgaagcagcctcaaaatattatacagccttgaaagaggccaagactcaagacgatatagctaggcttggcaaagaattggctgatttagaggcggaatatagtgataatcctgcttatatggcgtgggttcatcaaaaatatactgaacaggcatggaaagtgaagaaaaatgagaccagtagataa

SEQ ID NO: 86387 - DNA, 345 bp, Eubacterium rectale M104/1
atgagaccagtagataaaggtgaatcaccatataatacaataaaaaaatatcaggatgcactgccctatttaggtgaaaagataggttattattgttcatattgtgaatttccaattaagcatgtaccggaggttgaacatgttgtatcaaaatcaaagggcggagatataacggattggatgaacttgctgttgggatgtaaatattgtaatgctagaaaatcagctaacacaactcctgaaaatgatgatgattttttatggcctgatgtgaataatacggcaattgcatacacatatgaaaatggttatccaaaggtaaatgagcagcttttaatggattag

SEQ ID NO: 86388 - DNA, 1236 bp, Bacteroides xylanisolvens XB1A
atgggtaattttattacgagtatcaaggttaatcatatttttcatttggagaacttttgtataccaatctctgaaaatgaaaaaaaacatctgattattacgggaaagaacggaagtggtaagactattctgttgaatgcaattgtggagcatttaagtaaggtttgtaatgataagatgttgagtttcttagattttaagaaatatttagagtctaatcaagcatggttgcagcaagctgagaccactggtgattcgaaaagtattgcttccggccagaataacgttgaatattataaaaatagaattgaagaattttatggaaaagtagaactttcattccatgatatatactctatacctaaggattttttaagtcaggactttattatagcctactatgctgatgaacgtaagtctctttttgtagaacctaagaatcctgttaagccagatttgaagatgaagactgatctgaaacataataaagtagatcagttcttgaattttatggttgactgtaaagtgcaagaggccttagctcgtaatgaaggaaaaacagaggatgctgattatattcgtcaatggtttgtcggcttccgaaatattcttcgtcagatatttgatgatacaaccttagaacttgatttcaattataaagattactctttccttattcaaacacgcggaaagtcgtttaaattcaccgaactatcagcgggatattcggctgcattagacattgtagccgatttaattttaaaaatgcaatcacagaataatgtggtccgtgcatacgagaaagaaggaattgtgttgattgatgaaatagaaacgcatcttcatttggaactacaacgagtgattttgccgatattgactactatttttcctaatatacagtttgttgtcactactcattccccttttattcttaattctttagagaatgctattgcttttgatttggagcatcgtgaaccaattgaagacttaacggattattcttatgaagcattagcagaaggttactttggtgttcgtacagactccagtgagattcaaatgcgtttacaacggatggaagaattgattcgttccgatcggctttctatttcggataaaagtgagttggaaatgtatctgcaggattttgataagattccggaagcagttgctcctgctgtaaaagctaaatattatgatctgaaaagagagtggcaaaataagaattaa

SEQ ID NO: 86389 - DNA, 642 bp, Bacteroides xylanisolvens XB1A
atgattagaatttgtaaaaatgcagataagccacaaactttagataagagttataatacggacgaggtctgcaaacaattactgatggatcagaatgataaatgttatctatgcgaacggcgtttgacaactgattatcaagtagagcattttaaatcgcaagccaataatggagacttgaaacaaacatgggaaaacttatttgtagcttgtggatactgtaacaataaaaagtcgaataagtatgatgatatcttagatccgactcaatatgatatcgaaactataatagaacattcaaatgattttgttaatcagaaagcaatatttgatagtgataatagaacttctgaagtactttcaacgataaagttattgaatttattatttaatggaaaactatcttataggaattgtcgtgagcaacgattttatgatgaatttattcaaaaaatgaatttcttttcttatgttgttgatgaatatatgtcaggtgagaaagaatattattatccggttataaaagaacagttggatattcgtagtgaatatttgggatttaaatatgccattattcatagtaacgatttgctgaaacatgattttggagatatgacgatttggaataagaaaggagaatga

SEQ ID NO: 86390 - DNA, 420 bp, Arthrospira platensis NIES-39
ttgattgatgaagtcgatttgcatttacatccctcgtggcagcgtagtttttgcgatcgcctgatcgacacttttcctaactgtcaatttgtgctaacaacccattcacctcttatcatcagcgactgtcaaaatatcttggtttacaccttaaacaatggtgaattgcaacaattgccttcccagtatgggcaagatgctaatacggttttactagatgtcatggataccagtatccgtaatgagaccattgatactgaactgaacaatctgctagatgccatacaaaacgccaacctaaccgaggctgaacaattgctttcacaattaactgagaaattgcacgccaatcatttagaattgatgaaagccaaactcctgatcaataaacaaaaatcacgtcatgcgaaagattcataa

SEQ ID NO: 86391 - DNA, 630 bp, Arthrospira platensis NIES-39
atgcgaaagattcataaaggctcggagccacctaatttgacagcatggaaaaagaaaaatcctcatagacgatatagccagttacctgaagatatgagacgagttattcgggaatatgctctgaaagaaaaattctatatttgtgcttattgctgtcagagaatagaagatattaataattgccataatgagcatatagaagctcaaaatttgaatcctaaccgcaccctcgatttttcaaatattgtcgccagttgtaatacctctaatcaatgtggcaaggctcatgaatctaagcccttacccttaactcccctgatggaagaatgcgaaacagaacttaggtttaaaattagtggtcgggtagaaggtttgagcgatcgcgctaaggatacgattcaagtgttaaacctgggcgatgatgaaaaaaataaccgtgccttaatcgagaagcgtaaacaattatccgataccttgttatggaaaagcggtatagatcccaatcaaggcttggaggatgaagaattgctagagatgttaatcagggatctatcacaacctaacgaggataagatggactcttttgctccagtgctgattaatattttgcaaaattggctgtcatcttaa

SEQ ID NO: 86392 - DNA, 786 bp, Coprococcus sp. ART55/1
atggcagctgagtcgaatgaaaagctgatgcttaattggtttcatactcagacattaaaatgtctccaggagcggcagagaactggtgttatagaaaaatcgttattgttaaagactgtagaaacagctatctgcaagtgctttgagagaattagtggcgctaaaaatgctagcattatattcgatcttgatacacacagattggttttggattttgaaagtgcagatggcattttacaaaaatttgcaatggatgaaatgagtgatggatacaagaatacacttagtatgattggcgatatagcgtatcgtatggctgttttaaatcctatgctgggtgaaaaggtgctggaagaaacaccgggagtcatcttaatagatgagatagatctacatttgcatccgcagtggcagcagacaattataagcgatttaatcagtatttttccaaagatacaattcatcgtcagttcacatgccccggcagttatcaattctgtttccagagagcagattcgaattctggataacggagagatttatattccagcggcgcagacatatggaagagatgcaaattccatactaagggaagtgatgaaggtatctgaacgtccaatgagaataacagagctattgaaggcattttatgtattcatggataataagcaatatgatgaagcggataaagttttatcggagattgaggatgttgttggaacgacagatcctgatattgcagcagcgagaacagcacttgatttggaaaagatactgggagaatag

SEQ ID NO: 86393 - DNA, 678 bp, Coprococcus sp. ART55/1
atgatagttgtaaaaagaggaaaggaaccgaacagcctgttgcaattccgtaagcagtatcctgaggcagattatgaggtggacatgcctacgaatgttttacaggacgtcagaacccagttgtgggaagaacaaaagcatttgtgtgcatattgtatgaagaaaattgctagtccaaatgtcgaaagaattgaacattgcagaccgagacatccacatggtgaaattgaacatgacaaaaaatctactttggattttaaatggatgctaggagtctgctatggaaacagtttgacaaaaggagtaaaacatgatgatacaacttgcgatgcacatagaggaaatacagagcttgcagttaatccctttgatgaacagtcaattagaaagataaagtatagatcagatggcagcatttattcggatgatgaagaaatcaataaggatgttacagagaccctgaatttaaattgtgaggcggtttctcttcctgcgacgcgtaaaaaagtattacaggaagaacagcgcagaatcatgaggaaatgtaaggggaaatcccaggaagtatttatacgtgagttggagcgtacatatgaaagcctggttcgggaaagaaatttaacaccgtattgtggaataatcatttcttggcttgagaataagttgaagatatcatag

SEQ ID NO: 86394 - DNA, 924 bp, Photobacterium leiognathi subsp. mandapamensis svers.1.1.
gtgattactaatcttgatgagttcgttgttaattaccaagaactaaaagcgcttttaaccaagtttgaagcgatgagaaaatctgaaattactaagccaacttcagttacgagcattaatagcttaaaagagcaagacaaacagtttattcaacagtcacatagaaaagataatacctcaacattatttgaattattcttagtcacaaataaagcaaatcaagccttttctgaatcggaaaaaattaagaacgatccgatagaagcagaaaaaatagaaaaatggttctcgaaattagaatctgatttaagaaacctttttgaagataaagatctcaagttagtttttcaatcagactcttttacttttgaaattcatcagccctataaagctccttatacattccaaaccttatcatctagcttctcatcaattatggcaatatatgcagatctaattactaaggtttcactacgttcaatcgctccagatgaattaacaggaatcgtattaattgatgaaattgatgcacaccttcatgtttctttacaaaagaaaatattatctttttttacgcaagcatttcctaaggttcagttcatcgtaaccacccactcaccatttgttgtctcatcaattgatgatgctgtgatttacgatctatcgaaacaaattcaagtcacagatttatcgatgtattcatatgaatctgtccttgaagggttatttggtgtacttccaatttctaatttacttcaagaacatatcgagaatatagccaagttgttagataagccttcgattaatactactgaaattcaagcgcttttagataagataccacaggacgaaacttccttagattcagaatcactttattatgtcaactcagcaaaattagcaatcaacaaggcaaagaggtag

SEQ ID NO: 86395 - DNA, 666 bp, Photobacterium leiognathi subsp. mandapamensis svers.1.1.
atgttcaatgtagttagaaatgaaccagctcctgcttcgctaacaggaaaatcaaaatatgattcgaaagatgtttggagtgccttagaaaaagtatttcataagaagtgttatatatgtgaaacaagctctccattagatattaacgtcgaacatttcgtaccacatgaaggtaatacagaattgatgtttgattggaataatttgtacttctcttgtggtcgatgcaacaacatcaagttggctaaatatgataatcttttggattgttgtgacccaaatatagatgtcgttcgtgctataaagcataaacctccaatgacaccatttgccaaaaaacttcagattactgctcagaataacgataataaaactatcttaactgcagagttattagatagagtttttaatagtgaacacacacctaataaagctgtcacagcttcttatctcaggcggaatgtatttaatcaatataatttattattaacgcaattaaataaatattatgacccattaaccttacctgatgaaaaaaacagagcagttgaacgaattaaactgctactagtaccttcagcaccatatagtgcgtttatcagctggtgcatcatagaagatgaagagctagcaccaattctacatgattatattggtctaacttag

SEQ ID NO: 86396 - DNA, 1260 bp, Porphyromonas asaccharolytica DSM 20707
atgcaacgctatatacagtccatccatattaataaggtacgtcatctacataatcttgacatttatatacctgatgacgagcatccacatctattgatcacgggtaagaatggaagtggtaagacctctttgctggaggctatacgagatcatattgctctcctgcaaaaagggcagagcttggatttcttaaagtatgacgagcaaatacaatactacgcccagcaactatctagctgtacagaccctctaaggaaagcagaactagagcaaaagctagctttttggcaggaaaggcttgatgagctatatggggcagtgcgtgtggagtttgaagaccctactcagattgtattccatagttctgacaagctctttatctgtgcgatgtatgccgctagtagagaggttcgaatgttagagccactcaacccaacgaagccgacgttcagagaccagtggcttatcaatcaaggagcctcagatcaatttctcaactatctctctgatctgaagatccaagaggctcttgcccgaaatgagcatcagacggaagatgcagaccgaatcaacgattggtttgtctcgttcgaagcgttactagggaaaatttttggcgatagtggcctgaaactctctttcaactacaaggactactcttttcatatagagaccgaaggcaagagctttaagttcaacgagctatcagatggatttgctgcggtgatagatatcatatctgacctaatcctaaagatgagctcgataagcgatcgcacgatgcagctctacgatatacctgggatcgtcttgatagatgaagtggagacccacttgcatctttctttgcagcgacaggtgatgcctttactgactaaggtttttccaaatatccaattcatagtcacgacacattcaccttttgtcctcaactccattgcgtctgcttctgtttatgacttggagcatcaaaaggtattgactaatctgtctgactactcttatgaggctttggccgaggggtattttgaggtcagtactcgttcgagttacctagagcaacagctgaatcgtcttacagagctcctagagcaagcagacctagacattgcagagcgatttgaggtcaaagaactaatcaaagatcttgacaaagtatctgagagtgtctccccaaagatagcaggcgaatacgaagagttgaaaattaagtgggctgataaacttatcgagattcgagactatgattcaaatctataa

SEQ ID NO: 86397 - DNA, 654 bp, Porphyromonas asaccharolytica DSM 20707
atgattcaaatctataagtcctccacttcgcctaaatcccttgatacggggactcagtacaatggtcaagatgtacaggaacagctacttatagaccaaaatagtaaatgctatatctgcgaaaagaaagttgtaactgactatcatatagatcacttactcagtcaggcgcaacattctgataaaacgaccgattggagcaacctattgctgacatgttcttattgtaatcagaagaagtccaacgcttacgaccaaataatcaatcctctaggacatcctatcgaaactttcatcaagcagaaagtggactaccagaggaacgtcgcaatctttgagggtcccgatgatagagagattgtaggtatagatgagactatcaagttgctttcctctgtgtttaatgggaagactcctgctcggcaagtgcgggaagagaaattttatgagtactttttccatcggattactctatttcaaaaggcttgtaatcaatttctagcgaataaaacggagcaacataaacggatagtttgtgagcttttaaaggcagaccaagagttccttggattcaaatattggattattcaatcaaatcagacgttgcaaaaaacctttctttctttttgtcagtggaatagggatgaaatctga

SEQ ID NO: 86398 - DNA, 1227 bp, Haliscomenobacter hydrossis DSM 1100
atggaagatgttttcgttacagagttaaaacttaaaaaagttcgtcatctggagaatctgagtatttcgctctccaaggagactccaaaacacctcattttaactggaaaaaatgggagcggaaaaacatctgttcttaatgaaatcaaagccttttttcaacaaattgatggcaaaacaataactaatctgaaaagttggaaaaaataccgaagtagtcttactgacaaacaattctattcgaattatgattattctatggaatctaataaggcgtttaatgagataaaagaaattatctcaagcaacaaccgtagtcaatcaggaatagaactaatatttaatgccaaaaattttattggtcctttttttcatgaaaattttatttttgccttttttgaggcaaaaagattatctgatttccgacaaccttctggacctaaaaaactagatattaaagatcactatggaattgatgaaaaagcgaatatcgaatttgtgcaacaccttattaatttacggtataattaccttgaagcgaaggagagtggaagacaaaagattgccaataatattaatcagtgggtggaaggattcgaagcttctctcaaagaaattttcagcgatgaaagtttaaagttggtaatagatagtaaaaattttaaatacgacataataactaagggcagagaggtttttgatctcaaaactctttcagatggattttctgcaattatcaacattgtaactgagttgataatgagaatggaaaaaaaacattcaaacgtttatgatgcccaaggcctcgtcctcatcgacgaaatcgaaacccatctccatatcgacttgcaaaagaaaattctcccctttctaaccagcttttttccaaaaattcaattcatcgtaacaactcattcacctttcgtattaacttcgttagcagatgccataatctacgatctggaaagtcaagagccaattgaagacctttctggttattcggtggaagcgattatcgagggatattttggttcggataaatattctgaggccttaaaagataaagtagatgaatatgagcagttggcaaaaaaggatgaactttctttctcagaggaaaaaaggttcaaatcgctcaaaaaatattttgacgatctatccgatgtctttgctgaagagttaaagcttaaaatccagcaaattagaatgctcaagccagtgaaatga

SEQ ID NO: 86399 - DNA, 660 bp, Haliscomenobacter hydrossis DSM 1100
atgattaatgttgaaaaatcgcagcctgcacccgagtgtctggcgctggaaaaattgaaaaaagatggcgattgtggctgtaaagatgtgcgtttacgccttaaacatgattttttcaacaagtgctacatttgtgaagaaaaggctccatcttctattgcaatcgaacatttcatcgcacatgaaggtgatctcaatctaaaattcgattggaataacctcttcttcgcttgcacccattgtaacaacatcaaacacaactccttcaatgacattctcaattgtactgatttttcagaaatcattacagaatgccttgaatttcatttcactcccttcccagaagaaaaaaccgcaataatccccataaaatcaagccctaaaattctgagaactgcagaattccttatgaaaatatacaatggaaaaacaacaaaccaaatcattgaggccgataacatacgttccaaactaaggaatgaaatcagccactttctagatgccatagaagattatcagcactctttgcaagaaaaatatcgactaaaaattaagcagttattgagcccagaatctgcatttactgcttttaaaatttggattatcaaaagcagacctgattacatgattcaatttggagacctacttccttcgttttaa

SEQ ID NO: 86400 - DNA, 1299 bp, Haliscomenobacter hydrossis DSM 1100
atgtctatactccgcatcaccgaactggaaatgcatcaaattggcccctttggcgatttgacactgacttttcctgaaaaacctgcggggatggaggataaggcggagattcatattttgacgggggagaatgggacggggaagtcgacggtgttggaggcgatggcggtattgttcagtcaagaggcgggcaagtattcgaacaaatttcgtaaagacaataatgttagcctcaatttaacattaagcgaaggcgatacgcacttcttagcaaatcttgcagaatcgactatttttttaaaagataaaggcggtcaagtattaagaaaaaatcaattgattgctaaaaagtatactctgccatatattgattataagcaagaaccttttggaattgccttttttgcgtattctggtcatcgtcgctttgatcacgcttctatcattggtattaaagaaatcgatagtcacccttttgaacatgctttagattttcggcagtccattcagccagagaacattttgcaatggattgccaataacatcgctggtcaagcgcttgctcaagtaagtggaaatttggcagaaacagaacaactgcgccaaattatggccaagttggaaagtactatttcccagatcatccaaaaatcgattcggtttcaggtaaaaaccaagccttataatgtaacactagcagtggatcaggaagaattagatttcaaccaactccccgacggacttaaaagcatcatttcctggattgccgacctcctcatgcgcatggatcgcgtaaaatgggaaaatgacacccccgttttcgaccgcaacttcatcctgtttcttgacgaaattgaagtgcacatgcatccggcctggcaacggaaagttttgcccgtagtgcaacgccttttccccaatgcacaaattttcatcagtactcactcgccgtttgtggtaggttcagttgatggggcctggattcataaattggtgaagccgaatggagatagtaaattggcggaggggtatccgatattatcggaggacgaaaagtcttatcaatattggctggaggaggtttttggcatccatgaaaaatatggtttagatgctcaagataaatatgagcgccgtagagaattaatccgaaaatcagaactcaacgctgtagagcaagaagagcttatccaattagacgaggaatttgggacgcttgtgccggaagatagttccctaggtcagcggattgttgagcacttgaaacggttgaaaaaagaagaaaaaacggctttttga

SEQ ID NO: 86401 - DNA, 747 bp, Haliscomenobacter hydrossis DSM 1100
atgatcaagatagataaatcgaccatctcaacaccgaagatattggatcaaaagaatccccaaagcaaaggtagtctagctactcaagcattgaatgctgatcatgaaaaaggggtaagaacatttacttttgactcagccatctatggacatgcaagcgtaaaagaggccttgataagtgtccaaaataaaaaatgctgtttctgcgaatcttttgtaagacatattgcgcatggtgatgtagaacattttcgacccaaaggaggatatcaaattgatccagatgcttcactcattactcccgggtactattggttagcctatgatttcgaaaacctatatttttcttgccaaatttgtaaccaaaagtacaagcgtaatttttttccattgactgatgactcaaaaagaatcaaatctcatcatcatttcaccaatttacatttggaagaacctctaatcattgatcccgctaacgacaatccagaagatcacatttattttgaccaagaaattccaaaagctaaagacaaaaaaggagaactaacaattttaaggttaggtcttgatagagatgacctcaatgaatatcggcttaaatggctacaattgatcagagacattgctagacatgcagctaaaggagacctgatctcgcttaacctactccaagaagcggcagaacctcaaagtgaattgtcattgatggtacgcagcaattttccttttttgtcgaaggttgagtga

SEQ ID NO: 86402 - DNA, 1263 bp, Haliscomenobacter hydrossis DSM 1100
atgcgaattcgagaattaactatatctaacttcaggggttttggagaaaccgttaagttccctttttcagaacatttcacagtcattgcaggtgtgaatggccgtggaaaaacggcaatattggatgggttggtgcttttgttttcttatttgttgcctcaaatttctgaagcgaaaaagcagaccaaaaaagtgtctgagacggatgttcatttaagtgcgagcgaagccaatatcagtgtaaagacaaattgcgcaggaattccacttgattattttgtgactatttatggggttgatcgaaaagtcgtacctcagaaattatatgctgaagtttccaagactataaaaaatgcctatggtgacccctcgcgcgctgatgatcaagcacctttggttgtttattatacgactgaccgggcaggatatcgttttcccaaagcgctacctcagattgtaacttctggccaagcaatggcttataatggggcgctttttaacagaatggttgattataaagacttcatgtctcgttatcgtgttgcacttacgctaacgaatgatgaaaaaataaaaaattcttcttttttgggcgcaaatgcagtcaaggctatcaataaagccattgaatatttccttgatgggtttgctgaacttcaggtgcaagaaaaccccttaaagctatgggtcagtaaacacggagaaaaattagatttacgccaactatctgatggtgaacgatctttaatagccctaatctgtgatttaagcagaaggcttgcacttgctaatccagcgttgaagaacccacttgaaggagctggagttgttttgattgatgaattggaattgcatttgcatccgaagtggcaaagagagattagggacaaacttaggaaaacgtttcctaacattcaattcataacaactacccattctcctttcattatacagtccttaaatgaaggagaattgatcaatttggatcctaaagaactggatgaagaatattctgatgagagcatcgaggatattacggagtttgttatgggagttaaaatgccacaaaaaagcaagcgatacattgaaatgatggaagcggctgaagcttactttacactacttcataatgtaggtgataaatcgacaattgaagttgagcatgccaaacaaaagctaaatgagctttcaataccttttagtgatgaccctgcctttcaggcatttcttaatattgagcgtaaattaaaattggaagaataa

SEQ ID NO: 86403 - DNA, 690 bp, Haliscomenobacter hydrossis DSM 1100
atgcggcctgtaacaaaaggaaacgctcctaacatttatgctaattatcaagatgcagcttctgatcttcaaagctgtattggtgagttttgtagctactgtgagcgtcacatcgaaacccaccttgcggttgaacatattcaagccaaaactcatgttcctgcacttaggaattcatggatcaattttttgcttgcatgtgtcaactgcaactctaagaaaggtaggaagaaaataatactagacaactacctctggccagatattgataatacactaatggcttttgaatattcaactggtggattggttaaagttaataccactgtacctgcctctattcaagttctggcaatgagtacgataaaattagtagggttagataatgaacccggcaaccccgacattaaaagtagaccaaccaaaaaagatagaaggtggctcagacgtcaacaggtttggcaacttgctgaagaatgtaaaaataaattgattgcaaacaatactatagaagttcgagaacttatcgtaagtaatgcagtgggacgaggtatgttttccatttggtggactgtttttaacggggatcaagatatgagagaaaggctaagagtagcatttattggtactgctgccgattgttttgaccacaacgaaaatttgatcaaccgagtgggaggaaaaatttaa

SEQ ID NO: 86404 - DNA, 1347 bp, Haliscomenobacter hydrossis DSM 1100
atggaacaggtgtttagtgtagaagcaaggcaatatcggtttttggtagaccgcatcaaattggcttcatttcggggtttccaaaatgaggtggaaattcattttgaaccagatttgaccgttttcattgctcagaatggaggaggaaaaacgacggtattggatgccctttatgagcatttgcagttattggagaagaatacttttcaaccaggtaaatacacctcaattctgactggcaaagatgtcaatgttaatacggacacttttagtgagctgaatgcagattttatcctggattttatggattatgaactgttggaggaacctgtaagcatagaagaaaatgatgaagatcaaggcggggcgttgctagaataccgaggtatacccatccacacgtctttttatctcaacaaagtggcgggaattgatggaatcagcatcattgattcagagcaaagcctctcacaaattcgagccttcaacaacctcaagcgagagctatgcaattttcccgttttcaagtattatcaaccaggggagcgaagtggtaaaaatgccaagcaagacttcaaaagcatcacggattggattgaacgttgccaaaaaatggcttaccaggccaaagaagattcaaaatttgaatccagactgaagtggctaaacgaggctatatccaccattttaaaagacgaggagtatgagtacagcgatttcaaggtaaaatataccgaaagaggagacatactcgaactcactaaacaacaacgtttcagtccggataaatacacgttcagtattgatcagctttcctcaggtgaaagagccttgatcggcatcgtggcagatttggccattgaacttattgaaaaaaatccaaactttagcaagaatcccatcaaagaaggctttggcgtggtgttgattgatgaggtagacgtgcatttgcatccagagtggcagttgaccgttgctcaaaaattgtgcgcaatatttcccaatgtacagtttgtagttacgtcacacagcccacttgtactcagtagcttaaccacaagacaagttcggcagataactgattaccaaatttttggagtagacaatgtttatggcagagatgcctcctatatcatcaaggttatcatggaggtggctaatggctctttggctgatgaagtgaaaaaaattggtgatgaaattgtgcaagataggctgagtgaagcagaacaaaaattgaaagcgttaatcacggatataaattcaaaaggtgaagatggtgaaaaccacccggatgtgttgcgcttgagcaatttaatgactcgaaaaaaaatactcagtagatga

SEQ ID NO: 86405 - DNA, 690 bp, Haliscomenobacter hydrossis DSM 1100
atgaagtatattcagaagaaccccactgctccagtttacctaacccagtggatacaacaaaatcaaaaaaaactcaccggaaaagggggggacgagcaatggaaattttttaaaggggtagtcaaaaagcgcctgcaaaagcaattactcaaagaacaagggcatatttgtgcctattgtaatcaacgcattcatgtgagtcatcccgaggatgatcaacaaatgcgcatcgatcatttagagccaaaatctcatccacaaagcctggataaagtttttgcatacagtaatttagttggctcttgctttgggaatgaacgagaaccacagccgaaatccttgcattgcgacccccgaaaggcaaatttattactgcatcgcgatttatttcctacggatcccctctgtgaagaccaaattgaggttgttttgcgtccagacggtgcacagcttttcggaaaacgcggcgatgttgatgactcagtccaaaacgtactcaatttaaaccatccaaagttacaagaattacgcaaaaatgccctagaagcatataattcattagaaaacaatattactccatctgaggctttggcattaattgaagcataccgagataaggatgaggatgaaaactttcgcccattcagtggcatcatcatcacctatttgattcaggaatacatcgcttaa
